United States Patent Application Publication US 2005/0196754 A1 - sequence listing, part 19

SEQ ID NO: 48609 - protein, 264 aa, Homo sapiens
MGDIEVDLNEIIEWTRCVFIIAWNRMESSDAHGWAHQRLVSSSLIVLIRVSMTARCDAALDPVAEFLCYCRVHSTSSLEPNDLRDSLRVSLNVLQTSLCRLYKNSVAQPLYQKAAVEPKEDTITVTAAPAPQESAWGPAATIAARQSATGTKTDTPIQKVPQSISVVTAEEMALHQPKSVDSRGSPLDKDHCMDTNGIIILWNRMESLNGFDRYHQRMGSNMIINKSIPIAIEGVSVVGSRAIGGGVVLLTIAGVDVIVLGGIA

SEQ ID NO: 48610 - protein, 326 aa, Homo sapiens
  DOMAIN (9)..(28): LEU/ILE/VAL-BINDING PROTEIN FAMILY SIGNATURE domain identified by eMATRIX, accession number PR00337E, p-value=1.000e- 23, raw score of 9.59
MGPEGVGNASLSNIAGDAAEGMLVTMPKRYDQDPANQCIVDALKADKKDPSGPYVWITYAAVQSLATALERTGSDEPLALVKDLKANGANTVIGPLNWDEKGDLKGFDFGVFQWHADGSSTAANTYALIAIGYTMVYGIIGMINFAHGEVYMIGSYVSFMIIAALMMMGIDTGWLLVAAGFVGAIVIASAYGWSIERVAYRPVRNSKRLIALISAIGMSIFLQNYVSLTEGSRDVALPSLFNGQWVVGHSENFSASITTMQAVIWIVTFLAMLALTIFIRYSRMGRACRACAEDLKMASLLGINTDRVIALTFVIGAAMATWGGPS

SEQ ID NO: 48611 - protein, 85 aa, Homo sapiens
  misc_feature (1)...(85): Xaa = X or * as defined in Table 2
LFGRFSNGFLIVVCQRLRQAVVNEQFLPETATLTHRGELLFHSPAXLPGVFRYLAQMXRHAVIQVFRATGVPEPERCRQRRPHER

SEQ ID NO: 48612 - protein, 177 aa, Homo sapiens
  DOMAIN (10)..(42): Bacterial-type phytoene dehydrogenase proteins domain identified by eMATRIX, accession number BL00982A, p-value=1.554e- 15, raw score of 18.41
  DOMAIN (9)..(164): Pyridine nucleotide-disulphide oxidored domain identified by PFam, accession name pyr_redox, E-value=0.0011, PFam score of 15.1
RMSDDKFDAIVVGAGVAGSVAALVMARAGLDVLVIERGDSAGCKNMTGGRLYAHTLEAIIPGFAVSAPVERKVTREKISFLTEESAVTLDFHREQPDVPQHASYTVLRNRLDPWLMEQAEQAGAQFIPGVRVDALVREGNKVTGVQAGDDILEANVVILADGVNSMLGRSLGMVPAS

SEQ ID NO: 48613 - protein, 358 aa, Homo sapiens
  DOMAIN (10)..(42): Bacterial-type phytoene dehydrogenase proteins domain identified by eMATRIX, accession number BL00982A, p-value=1.554e- 15, raw score of 18.41
  DOMAIN (9)..(137): Pyridine nucleotide-disulphide oxidored domain identified by PFam, accession name pyr_redox, E-value=0.0011, PFam score of 15.1
RMSDDKFDAIVVGAGVAGSVAALVMARAGLDVLVIERGDSAGCKNMTGGRLYAHTLEAIIPGLDFHREQPDVPQHASYTVLRNRLDPWLMEQAEQAGAQFIPGVRVDALVREGNKVTGVQAGDDILEANVVILADGVNSMLGRSLGMVPASDPHHYAVGVKEVIGLTPEQINDRFNITGEEGAAWLFAGSPSDGLMGGGFLYTNKDSISLGLVCGLGDIAHAQKSVPQMLEDFKQHPAIRPLISGGKLLEYSAHMVPEGGLAMVPQLVNEGVMIVGDAAGFCLNLGFTVRGMDLAIASAQAAATTVIAAKERADFSASSLAQYKRELEQSCVMRDMQHFRKIPALMENPRLFSQYPRM

SEQ ID NO: 48614 - protein, 448 aa, Homo sapiens
  DOMAIN (308)..(388): Transposase domain identified by PFam, accession name Transposase_1, E-value=3.6e-13, PFam score of 57.2
MSTLAHRKGKITYACRLRAQRPENKINTLSLVSLCKGLSGGIAEEGIIIIGDDSSMRVIALEDLPVKQDAEVEDSDIDDSDPVNFDGDQTNTVIKVLHQKYTPATVNRSVSTNDQGYAANPFPTSSAAKPDAVLVKNEEKNASETGSIYSSMTLKDFSKFVKDEIGFSYNGYYRSGWGTASHGSPKSWAIGSLGRFGNEYSGWFVLQAAIVIIDIFANQRDINFTRTDFPVFQTYTRCGISTLRFPDSEGVLMKPDGLKVVLAPSLSLSLLLPCEEGACFSFTFCHDCRFPEGSPAMLNLTSFGKFLYKYTSNNQLSGWTEKKLQSTSHGQTCAKKKVMVTVWWSALSLIYYSFLNPGETITSKKHAQQISEMHPKLQCLQPALINRKGPILLDNSAQPHVIQPVVQKLNKLCYEVLPHPPYSPDLSPTNYHFFKHLDNFLQGKCFHS

SEQ ID NO: 48615 - protein, 148 aa, Homo sapiens
SVSRAIISTSFLPNVTGRLSGSVCATVRFTRRVKIISEPMTATAASVSNPAASLANNVSAFTRRIGAINPPTAPNRFTKPIPAASAVPESSCVGIVQNTGCTAINPIAATHSATIAITGESSPDRPIPMPAASNVSAATLRRSPVLSE

SEQ ID NO: 48616 - protein, 958 aa, Homo sapiens
  DOMAIN (475)..(500): Hypothetical cof family proteins domain identified by eMATRIX, accession number BL01228B, p-value=7.840e-18, raw score of 19.42
  DOMAIN (452)..(660): Cof family DUF3 domain identified by PFam, accession name DUF3, E-value=9.1e-19, PFam score of 75.8
  misc_feature (1)...(958): Xaa = X or * as defined in Table 2
MAGVPGFEPGNAGIKNRCLTAWRYPIRTTLSGEWCGRRDLNSQEATLQQPLLQAIDLKKHYPVKKGMFAPERLVKALDGVSFNLERGKTLAVVGESGCGVLACTLFAWNRNYFVLLFVGVFLSSFGSTANPQMFALAREHADKTGREAVMFSSFLRAQVSLAWVIGPPLAYALAMGFSFTVMYLSAAVAFIVCGVMVWLFLPSMRKELPLATGTIEAPRRNRRDTLLLFVICTLMWGSNSLYIINMPLFIINELHLPEKLAGVMMGTAAGLEIPTMLIAGYFRQTSGPDKAFTPHPARSYKKRAEIISALFISAIRNYHPANLYFLGQHVIIMGLFDEVVGAFLKGDAGKYQAILSWVEEQGGIQVLLEKLQSGGLGAILSTWLSNQQGNQSVSGEQLESALGTNAVSDLGQKLGVDTSTASSLLAEQLPKIIDALSPQGTNLPGELMAIKLIAIDMDGTLLLPDHTISPAVKNAIAAARARGVNVVLTTGRPYAGVHNYLKELHMEQPGDYCITYNGALVQKAADGSTVAQTALSYDDYRFLEKLSREVGSHFHAWDRTTLYPANRDISGDMGPIPSGMLCWSVAHRQNAAILLDNARFFGQIALIIKATIDRELTTCQTVTSNIPLEYLGYTFGFIIVIMARQQLFTENTVTAVLPVMQKPTMSNVGLLTRKRGVVLLGNILGTGIAAWAFEYMPIFNEETRDAFVKIGMDVMKNTPSEMFANAIISGWLIATMVWMFPAAGAAKIVVIILMTWLIALGDTTHIVVGSVEILYLVFNGTLHWSDFIWPFALPTLAGNICGGTFIFALMSHAQIRNDMSNKRKAEARQKAELDKIILPTGFLPMLTVKQIEAAKPKEKPYRLLDGNGLYLYVPVSGKKVWQLRYKIDGKEKILTVGKYPLMTLQEARDKAWTARKDISRWHRSCKGEKGFVXQQFLXCDLQGMVRAQEASMVSRVCN

SEQ ID NO: 48617 - protein, 39 aa, Homo sapiens
ARSGFDLFFNRIGPLATRGIILESRALNFGTRGHFSAPE

SEQ ID NO: 48618 - protein, 151 aa, Homo sapiens
AVVELNHRPICTSPLRKRSLKGLLNNAIIVFLNLFNDVPRRSMTATAASVSNPAASLANNVSAFTRRIGAINPPTAPNRFTKPIPAASAVPESSCVGIVQNTGCTAINPIAATHSATIAITGESSPDRPIPMPAASNVSAATLRRSPVLSE

SEQ ID NO: 48619 - protein, 541 aa, Homo sapiens
  DOMAIN (380)..(407): Fumarate reductase / succinate dehydrogenase FAD-binding site proteins domain identified by eMATRIX, accession number BL00504B, p-value=4.000e-26, raw score of 16.41
  DOMAIN (171)..(361): ABC transporter domain identified by PFam, accession name ABC_tran, E-value=4.2e-06, PFam score of 9.8
MASLPEGLHHPVKLVFLGKPGCLLTDRPLKGPNTAKPVVSPSHGAAHLPALSYAGRKRQEEDNHTKESLVEKPFRKILVIKMRYHGDMLLTTPVISTLKQNYPDAKIDMLLYQDTIPILSENPEINALYGISNKERGKKPMNQPLLSVNNLTHLYAPGKGFSDVSFDLWPGEVLGIVGESGSGKTTLLKSISARLTPQQGEIHYENRSLYAMSEADRRRLLRTEWGVVHQHPLDGLRRQVSAGGNIGERLMATGARHYGDIRATAQKWLEEVATAIVLTLYIIYMVGFFATSGELTYEVWIGFFASAFTKVFTLLALFSILIHAWIGMWQVLTDYVKPLALRLMLQLVIVVALVVYVIYGFVVVWGMRAALQISQSGQTCALLSKVFPTRSHTVSAQGGITVALGNTHEDNWEWHMYDTVKGSDYIATHTVKMFSIPAVLGNCWIRKRISTLAASYLHYVYQQFGNNRIFSSAAYNAGPGRVRTWLGNSAGRIDAVAFVESIPFSETRGYVKNVLAYDAYYRYFMGDKPTLMSATEWGRPY

SEQ ID NO: 48620 - protein, 135 aa, Homo sapiens
  DOMAIN (2)..(120): Integral membrane protein DUF6 domain identified by PFam, accession name DUF6, E-value=0.006, PFam score of 23.2
MASIQGGASLAKSLFPLVGAPGVTALRLALGTLILIAFFKPWRLRFAKEQRLPLLFYGVSLGGMNYLFYLSIQTVPLGIAVALEFTGPLAVALFSSRRPVDFVWVVLAVLVMAIVALCVAAIGFIAVQPVFWTMP

SEQ ID NO: 48621 - protein, 627 aa, Homo sapiens
  DOMAIN (1)..(56): DNA gyrase/topoisomerase IV, subunit A domain identified by PFam, accession name DNA_topoisoIV, E-value=4.6e-47, PFam score of 150.9
SARVVGDVIGKYHPHGDSAVYDTIVRMAQPFSLRYMLVDGQGNFGSIDGDSAAAMRIRGSKRHKPARSSHNRASRRMEYSRQMPLRRYARRCCQARFAPALVRRYKLLRRKYDYCQTADKHIAAIGFIAVQPVFWTMPTQLLSGTALAAGIGFVNLFGAVGGFIAPILRVKAETLFASDAAGLLTLAAVAVIDRRGTSLNRLRNTMNALLSNPFKERLRKGEVQIGLWLSSTTAYMAEIAATSGYDWLLIDGEHAPNTIQDLYHQLQAVAPYASQPVIRPVEGSKPLIKQVLDIGAQTLLIPMVDTAEQARQVVSATRYPPYVSFRETFQEEKLLTMKGSYKSRWVIVIVVVIAAIAAFWFWQGRNDSRSAAPGATKQAQQSPAGGRRGMRSGPLAPVQAATAVEQAVPRYLTGLGTITAANTVTVRSRVDGQLIALHFQEGQQVKAGDLLAEIDPSQFKVALAQAQGQLAKDKATLANARRDLARYQQLAKTNLVSRQELDAQQALVSETEGTIKADEASVASAQLQLDWSRITAPVDGRVGLKQVDVGNQISSGDTTGIVVITQTHPIDLVFTLPESDIATVVQAQKAGKPLVVEAWDRTNSKKLSEGTLLSLDNQIKHIFSMAG

SEQ ID NO: 48622 - protein, 191 aa, Homo sapiens
MKADILSTKPRRWNIADSILSWSKAVRITLKSRARKIWHRAEFFPHPTHPSGEYIMRIGHGFDVHAFGGEGPIIIGGVRIPYEKGLLAHSDGDVALHALTDALLGAAALGDIGKLFPDTDPAFKGADSRELLREAWRRIQAKGYTLGNVDVTIIAQAPKMLPHIPQMRVFIAEDLGCHMDDVKGEITGPQD

SEQ ID NO: 48623 - protein, 94 aa, Homo sapiens
KRQHLCTHSGAIRLRIAGVGSWKGGRPNWRKMAVRWRVPASAVVSGWLRRWHCWPVAMPSAESPRIRCGAGCCICRLPLFRCGCCTPARLTISH

SEQ ID NO: 48624 - protein, 73 aa, Homo sapiens
CGNGASGGKHGNSSVYDVFGSATGIGGAFTGNRQNQRGQRLQPDNLGRFPAQDLRQYGLLCQPHCVASAGDFQ

SEQ ID NO: 48625 - protein, 33 aa, Homo sapiens
  misc_feature (1)...(33): Xaa = X or * as defined in Table 2
FRRWYWGCCSTTRLSHCLTRXMXCMRWSLAVCC

SEQ ID NO: 48626 - protein, 862 aa, Homo sapiens
  DOMAIN (268)..(314): DIHYDRONEOPTERIN ALDOLASE DHNA FO domain identified by eMATRIX, accession number PD02260, p-value=5.500e-22, raw score of 26.95
  DOMAIN (442)..(605): short chain dehydrogenase domain identified by PFam, accession name adh_short, E-value=4.9e-57, PFam score of 202.9
KTKFLPIKRTGKPCSRALRAYSIIPPSICQTLLNPLCFIQALAFSQRMPPVQYMTIFLSLCACIILDCFWHLLTEGICRNFERVFKILTNIAGIKVRIVNTVGNNAIAYLHAQYPEGGSSRSLLRPQEISNNPEIIRRLGVIALNIGLEFDIYGHANSTHVAGVDLMNGIGGSGDFERNAYLSIFMAPSIAKEGKISTVVPMCSHVDHSEHSVKVIITEQGIADLRGLSPLQRARTIIDNCAHPMYRDYLHRYLENAPGGHIHHDLSHVFDLHQQLSVITTIGVYDWEQTIEQKLVFDIEMAWDNRKAAKSDDVADCLSYADIAETVVSHVEGARFALVERVAEEVAELLLARFNSPGLLMSDMHSLLIAAILGVVEGLTEFLPVSSTGHMIIVGHLLGFEGDTAKTFEVVIQLGSILAVVVMFWRRLFGLIGIHFGRPLQHEAGASVVVSDINADAANHVVDEIQQLGGQAFACRCDMTSEQELSALADFAISKLGKVDILVNNAGGGGPKPFDMPMADFRRAYELNVFSFFHLSQLVAPEMEKNGGGVILTITSMAAENKNINMTSYASSKAAASHLVRNMAFDLGEKNIRVNGIAPGAILTDALKSVITPEIEQKMLQHTPIRRLGQPQDIANAALFLCSPAASWMAQTIYIPAIADMARDLNVREGAVQSVMGAYLLTYGVSQLFYGPISDRVGRRPVILVGMSIFMLATLVAVTTSSLTVLIAASAMQGMGTGVGGVMARTLPRDLYERTQLRHANSLLNMGILVSPLLAPLIGGLLDTMWNWRACYLFLSVLCAGVTFSMARWMPETRPVDAPRTRLLTSYKTLFGNSGFNCYLLMLIGGLAGIAAFDACSGVHRL

SEQ ID NO: 48627 - protein, 192 aa, Homo sapiens
  misc_feature (1)...(192): Xaa = X or * as defined in Table 2
MTKWFNTNYHYMVPEFVKGQQFKLTWTQLLDEVDEALAVGHKVKPVLLGPVTWLWLGKVKGEQFDRLSLLNDILPVYQQVLAELAKRGIEWVQIDEPALVLEALPVQGLHVDLVHAKDDVAELHKRLPSDWLLSAGLINGRNVWRADLTEKYAQIKDIVGKRDLWVASSCSLLHSPIDLSVETRLDAEVKSX

SEQ ID NO: 48628 - protein, 234 aa, Homo sapiens
SLPRGWFQPEYGNLEIMEKTYNPQDIEQPLYEHLGFPRVGLRRELKKAQESYWAGNSTREELLAVGRELRARHWDQQKQAGIDLLPVGDFAWYDHVLTTSLLLGNVPARHQNKDGSVDIDTLFRIGRGRAPTGEPAAAAEMTKWFNTNYHYMVPEFVKGQQFKLTWTQLLDEVDEALALGHKVKPVLAGPGTWLWLGKVKSEQFYRLSLLNDILAGYQQGLAETGVGPDDIVTA

SEQ ID NO: 48629 - protein, 936 aa, Homo sapiens
  DOMAIN (610)..(921): Methionine synthase, vitamin-B12 inde domain identified by PFam, accession name Methionine_synt, E-value=3.7e-10, PFam score of 10.9
  misc_feature (1)...(936): Xaa = X or * as defined in Table 2
MKQTVYIASPESQQIHVWNLNHEGALTLTQVVDVPGQVQPMVVSPDKRYLYVGVRPEFRVLAYRIAPDDGALTFAAESALPGSPTHISTDHQGQFVFVGSYNAGNVSVTRLEDGLPVGVVHVVDGLDRLARQLIKNLATLKAGNARVVNSNAMSFLAQKGTPHNIVFVDPPFRRGLLEETINLLEDNGWLADEALIYVESEVENGLPTVPANWSLHREKVAAFAGAEPYHYLNHTLGFPRVGLRRELKKAQDSYWAGNSTREELLAVGRELRARHWDQQKQAGIDLLPVGDFAWYDHVLTTSLLLGNVPARHQNKDGSVDIDTLFRIGRGRAPTGEPAAAAEMTKWFNTNYHYMVPEFVKGQQFKLTWTQLLDEVDEALALGHKVKPVLLGPVTWLWLGKVKGEQFDRLSLLNDILPVYQQVLAELAKRGIEWVQIDEPALVLELPQPWLDAYKPAYDALQGQGLHVDLVHGKDDVAELHKRLPSDWLLSAGLINGRNVWRADLTEKYAQIKDIVGKRDLWVASSCSLLHSPIDLSVETRLDAEVKSCGDTAALAEWSAPIQARRHSTRVHNPAVEKRLAAITAQDSQRANVYEVRAEAQRARFKLPAWPTTTIGSFPQTTEIRTLRLDFKKGNLDANNYRTGIAEHIKQAIVEQERLGLDVLVHGEAERNDMVEYFGEHLDGFVFTQNGWVQSYGSPQTKNTKPXVNCFIKNSRINFLARSWRRLYXKASQRTVDKMVVISLATRILSLNFPRPSYKLIRKQITIINKNENTTLTQTIAPIFEKYLMEILPQRSDTLDKQELNLKSDRKEKEFPRIKLNGQCYFPGRPQNRIVCRHIAAQYINDIYQNVDYKPHQDDYSSAEKFLTHFNKKCKNQTLALVSSRPEGRCVAACGDFGLVMKAYFDKMESNGISVMAAILLVDNHALTVPLKNKEHN

SEQ ID NO: 48630 - protein, 95 aa, Homo sapiens
  misc_feature (1)...(95): Xaa = X or * as defined in Table 2
MNFGASLNSPTPRSYLSLGGEKKAPVWEHTLGVPSRRPAAGKLKKAPERYWGGEHPPVKKWLGGXARKCRPRPWETLXKSHLRRRPSLGPWAGGL

SEQ ID NO: 48631 - protein, 180 aa, Homo sapiens
RFQVFYLGFPRVGLRRELKKAQESYWAGNSTREELLAVGRELRARHWDQQKQAGIDLLPVGDFAWYDHVLTTSLLLGNVPARHQNKDGSVDIDTLFRIGRGRAPTGEPAAAAEMTKWFNTNYHYMVPEFVKGQQFKLTWTQLLDEVDEALALGHKVKPVLLGPVTWLWRGFRPVNHSTSV

SEQ ID NO: 48632 - protein, 655 aa, Homo sapiens
  DOMAIN (401)..(412): Neutral zinc metallopeptidases zinc-binding region proteins. domain identified by eMATRIX, accession number BL00142, p-value= 2.688e-10, raw score of 8.38
  DOMAIN (10)..(613): Peptidase family M3 domain identified by PFam, accession name Peptidase_M3, E-value=1e-104, PFam score of 361.3
  misc_feature (1)...(655): Xaa = X or * as defined in Table 2
MNENFGTQICVNNRLSFTDCSGYVTRYDHDRFGQVTAVHREEGLSQYRAYDSRGQLIAVKDTQGHETRYEYNAAGDLTTVIAPDGSRNGTQYDAWGKAICTTQGGLTRSMEYDAAGRVIRLTSENGSHTTFRYDVLDRLIQETGFDGRTQRYHHDLTGKLIRSEDEGLVTHWHYDEADRLTHRTVNGETAERWQYDERGWLTDISHISERHRVTVHYGYDSKGRLASEHLTVHHPQTNELLWQHETRLAYKRTGLANRCIPDTCPPVNAYLGTACCQHEICDTPWLSYRDPFTGKSWLSGRYELHKRIYGITAKERKDVDVWHPDVRFFELYDENNELRGSFYLDLYARENKRGGAWMDDCVGQMRKADGSLQKPVAYLTCNFNRPVNGKPALFTHDEVITLFHEFGHGLHHMLTRIETAGVSGISGVPWDAVELPSQFMENWCWEPEALAFISGHYETGEPLPKELLDKMLAAKNYQAALFILRQLEFGLFDFRLHAEFRPDQGAKILETLAEIKKLVAVVPSPSWGRFPHAFSHIFAGGYAAGYYSYLWADVLAADAFSRFEEEGIFNRETGQSFLDNILSRGGSEEPMDLFKRFRGREPQLXHTVVELPRPFHREILAFRPLXITQAYLRHHRXRAXRCXCLASGCTFLRTV

SEQ ID NO: 48633 - protein, 77 aa, Homo sapiens
  misc_feature (1)...(77): Xaa = X or * as defined in Table 2
TGNDAPVPAQSAQYRYLQXSVRNFCRLSFRLGINLSLPYPHVDDVIPLMAEGKILPYLDIPLQHASPRILKLMKRPG

SEQ ID NO: 48634 - protein, 146 aa, Homo sapiens
SAGSVKTQRSGANKQRRTRSRLASFCETLSSVSFPAWRKISFLIPVGLPISNNYVCSLNPVWCAMRLNMPPMSKSICWQKHWKSTVSRWITTRHSFVQTLISTACWRRSPVTQSSWRSTFACSTGLLSHAPPLPIRHCTNITNVWY

SEQ ID NO: 48635 - protein, 508 aa, Homo sapiens; identical to SEQ ID NO: 46419
  DOMAIN (63)..(220): SUA5/yciO/yrdC family domain identified by PFam, accession name Sua5_yciO_yrdC, E-value=0.00014, PFam score of -0.9

SEQ ID NO: 48636 - protein, 335 aa, Homo sapiens
  DOMAIN (301)..(319): MUSCARINIC M1 RECEPTOR SIGNATURE domain identified by eMATRIX, accession number PR00538F, p-value=2.355e-09, raw score of 10.59
MKIKHEHIESVLFALAAEKGQAWVANAITEEYLRQGGGELPLVPGKDWNNQQNIYHRWLKGETKTQREKIQKLIPAILAILPRELRHRLCIFDIMNAFDSQTEDSSPAIGRNLRSRPLARKKLSEMVEEELDSKNRLTRDKRQRLRLPAPVFHKLTRQFDRIPRHTADTGNQATNVDISKICRHIMFCIIPSMRGDLVSRPIGEVLSEAKRLVDAGVKEILVISQDTSAYGVDVKHRTGFHNGEPVKTSMVSLCEQLSKLGIWTRLHYVYPYPHVDDVIPLMAEGKILPYLDIPLQHASPRILKLMKRPGSVDRQLARIKQWREICPELLWVMAA

SEQ ID NO: 48637 - protein, 104 aa, Homo sapiens
WVSYCSGSTTLLLRALQECQRQQGPWASAGDPGEGAGERERLPQALASPPLQVKPARQRDPGLRTPDPGDTASPALNGHIFALPAGTAGDCFPRPPRGRKNSGT

SEQ ID NO: 48638 - protein, 191 aa, Homo sapiens
SWVCQPNPEQRRWRRWPSPVAPVLLALELVAMEELQEPLRGELRLCFTQAARTSLLLLRLNDAALRALQECQRQQVRPVIAFQGHRGYLRLPGPGWACLFSFIVPQRCQEGAGGSLDLVCQRFLRSGPNSLHCLGSLRERLIIWAAMDSIPAPSSVQGHNLTEDARHPESWQNTGGYSEGDAVSQPQMALE

SEQ ID NO: 48639 - protein, 124 aa, Homo sapiens
  DOMAIN (30)..(57): TRANSMEMBRANE FOUR FAMILY SIGNATURE domain identified by eMATRIX, accession number PR00259B, p-value=5.800e-10, raw score of 14.81
QGRGSSRPGCGHLDPGGEEWLPQRPGLQHLCPSAYILIFAGVLVMVTGFLGFGAILWERKGCLSTTTGDRFWKDRQPWTCRWQTSHRNQSGAGGQWDRFRSHQGHRDHEGRTSNWGSGFPREVA

SEQ ID NO: 48640 - protein, 177 aa, Homo sapiens
MMPLLKLCLWWLLAGLPAATTSQQVLMPHVSPKDQVVIAASGSRMRRHSNVPVTIVIECLPRAFNKPGKQTHNQMMRVRCVFRKAPRRAASSAAMDPNQEEIPDLPEKEFRKLVIKLIKERPEKGEGQFCKIRWTINRKMRAAQSGLTFFQLIHKHKDLKAKSVTLQMSLGYTVALG

SEQ ID NO: 48641 - protein, 96 aa, Homo sapiens
  misc_feature (1)...(96): Xaa = X or * as defined in Table 2
AASTDRAAETGXXKTRHRWFLSVKLRTSTPTAVSPKKXKRLAWTRCMTPPSKRXKKRVITPSSSPTSLTSTLPGATVATSPVMPRVWNCSTAVCRS

SEQ ID NO: 48642 - protein, 307 aa, Homo sapiens
  DOMAIN (18)..(142): Fimbrial proteins domain identified by PFam, accession name Fimbrial, E-value=8.6e-06, PFam score of 10.0
MVMGAFTSTATIAAGNNGTARFYGTIEDSVCSIVPDDHKLEVDMGDIGAEKLKNNGTTTPKNFQIRLQDCVFDTQETMTTTFTGTVSSANSGNYYTIFNTDTDGPTITLNQRLRTESSCQRQEVPQYGTLLELVADVNLAVLENNPQLHEKMVNADELARLNVERHGAIRVGTAQELATLRRMFAIMGMYPVSYYDLSQAGVPVHSTAFRPIDDASLARNPFRVFTSLLRLELIENEILRQKAAEILRQRDIFTPRCRQLLEEYEQQGGFNETQAQEFVQEALETFRWHQSATVDEETYRALHNEPR

SEQ ID NO: 48643 - protein, 705 aa, Homo sapiens
  DOMAIN (16)..(60): Aromatic amino acids permeases proteins domain identified by eMATRIX, accession number BL00594A, p-value=1.000e-40, raw score of 16.75
MATLTTTQTSPSLLGGVVIIGGTIIGAGMFSLPVVMSGAWFFWSMAALIFTWFCMLHSGGISRVDCRMLALWGLLSVGIDIGTTTTQVIFSRLELVNRAAVSQVPRYEFIKREISWQSPVFFTPVDKQGGLKEAELKTLILEQYHAAGIEPESVDSGAIIITGESAKTRNARPAVMALSQSLGDFVVASAGPHLESVIAGHGAGAQTLSEQRLCRVLNIDIGGGTANYALFDAGKISGTACLNVGGRLLETDSHGRVVYAHKPGQMIVDECFGAGGTELNPGYDQQCRVAVCWPYWNLRTIGLSNVISFLFLRQYLTALVLIPDLLRILATNDNPNPALCSRAVYDAEKPCAADHDGCGVAHTYMAAEALESAAKAKGWEVKVETQGSIGLENELTAEDVASADMVILTKDIGIKFEERFAGKTIVRVNISDAEFLITNRISRLPTALFPNTREISLERALLYTASHRQTQGEPSITPANTSEQCDGYSESRPARLQSALVKIYRRLIFLINLQHQVGMALLHILHQRLTNTAPDGLRCDKHRCQKSAFHNADKTEKLTVFFPDPVLRVGKIGIPHQRNAVTPVIRFYKGMPPATVRGSRGVLNVALPESWFISRIATAANHMIIHQPTCLHKGVTDCGADKLKTTFFQCLRYGVGGARRRGNFAQRCGLCHLWLMIYKRPDKVDKRFAVLFHLQVSMPAYSEQL

SEQ ID NO: 48644 - protein, 49 aa, Homo sapiens
  misc_feature (1)...(49): Xaa = X or * as defined in Table 2
ARRNESRRGGRXHPCRPITXTGTVNQRPAGFRRFAGPFRYSGKPGRERL

SEQ ID NO: 48645 - protein, 391 aa, Homo sapiens
  DOMAIN (257)..(268): Sulfatases proteins domain identified by eMATRIX, accession number BL00523C, p-value=1.750e-13, raw score of 12.64
  DOMAIN (164)..(388): Sulfatase domain identified by PFam, accession name Sulfatase, E-value=0.0032, PFam score of -76.1
PQKPLVLISIRRRFRPAAITPERNGVSDRLELYLPKDQPEEMKADVVVANILAGPLRELAPLISVLPVSGGLLGLSGILASQAESVCEAYADSFALDPVVEKEEWCRITGHAFAVDMKPWKNVKIASIGILFAMIGVYAGLAEFGGYGTRWLAMISYFIAAVVIVYLIFDSWRHRHDPAATNMVGCYSGKPLNTQNIDSLAAEGIRFNSAYTCSPVCTPARAGLFTGIYANQSGPWTNNVAPGKNISTMGRYFKDAGYHTCYIGKWHLDGHDYFGTGECPPEWDADYWFDGANYLSELTEKEISLWAPSPIQSVKYLQANHIDETFTWAHRISNRAVDFLQQPARADEPFLMVVSYDEPHHPFTCPVEYLEKYADFYYELGEKAQDDLANI

SEQ ID NO: 48646 - protein, 258 aa, Homo sapiens
MENACVLLMGVLSTFLVSWLGKDAMAGVGLADNFNMVIMAFFAAIDLGTTVPGAFSLCKRDRRQARVATRQSLVIMTFLPVLLAPLIHHFGEQIIDFVAGDATTEVKALALTYLELTVLSYPAAAITLIGSGALRGAGNTKIPLLINGQVAMLMQAPYYFQEAQIEAAIAAMDVAPEYADIRQVESSTAVLYLFSERFMTYGKAYGLCEWFEGSRLSIAHIPVTDNDNETQYHFFRQSCQHCDRCSVHRRLPDGGVVA

SEQ ID NO: 48647 - protein, 2737 aa, Homo sapiens
  DOMAIN (1089)..(1139): Aldehyde dehydrogenases glutamic acid proteins domain identified by eMATRIX, accession number BL00687E, p-value=1.000e- 28, raw score of 25.37
  DOMAIN (789)..(1209): Aldehyde dehydrogenase family domain identified by PFam, accession name aldedh, E-value=1.4e-69, PFam score of 244.6
  misc_feature (1)...(2737): Xaa = X or * as defined in Table 2
FGRCAGVCQXRGRDGQRRDEAGDGRLRARLXALYQTITHDLRYRHKNLYRRKLASQRVTEHVNRAGLRYSYQYEKDCITITDSLAHNKVLHTQGEAGLKRVVKKKHADGSVTQSQFDAVGRLRAQTDAAGRTTEYSPDVVTGLITRITTPDGRASAFYYNHHNQLTSATGPDGLELRREYDELGRLIQETAPDGDITRYRYDNPHSDLPCATEDATGSRKTMTWSRYGQLLSFTDCSGYVTRYDHDRFGQMTAVHRGWETGHLVEGLGEAQAWQAPLWKALVEYTHQLGQPRWHRANLYQRFIETLESATTCPPGLPSRVFICGISALPPVYLQALQALGKHIEIHLLFTNPCRYYWGDIQDPAYLAKLLTRQRRHSFEDRDLPLFRDSENAGQLFNSDGEQDVGNPLLASWGKLGRDYIYLLSDLESSQELDAFVDVTPDNLSASTCQCSTLHGHWKTAPLHGVNMRQSFPVAITNARLIHLDSQYSPSTYCHSPQREPLKSYTIACVVDVTLNADNFIVRDNGPGVTPEALARIGERFYRPPGQTATGSGLGLSIVQRIAKLHGMNVEFGNAEQGGFEAKILLIAKYKPSPKKPPTTNQTNTEREYIYPKTIDGHRVVNDQVDRIAAEAFNRFAHCRQINNGRYAGKVLHQHPCRAVGNFTVSMGIFQPSCQRVDILFGNRVTILPAQQQFGIAQGGPVLPLLGLPESSCADRQFWEALTQRVDHIRRVIHRQRDLGHKGELLFVFDRQFPHIVRRFDQIHSPFRVTVLAHCPFHFRVPGVTDENRFFATATGAGDFHMHFGHQRTGGIKHRQIATFCFVTYRLRNTVCGENQDRAVRYFANLLNKDSPTLTQAIDHIAVMYHFVTDIYRCAVNGQRVFNNADSAVYPGTKTTRRTSQGKGRYHVREPGGPTMLRVAELPSEAGIPDGVFNVVTGSGAVCGAALTSHPHVAKISFTGSTATGKGIARTAADHLTRVTLELVGKNPAIVLKDADPQWVIEGLMTGSFLNQGQVCAASSRIYIEAPLFDTLVSGFEQAVKSLQVGPGMSPVAQINPLVSRAHCDKCVHSSDDAQAQQAELIRGSNGPAGEGYYVAPTLVVNPDAKLRLTREEVFGPVVNLVRVADGEEALQLANDTEYGLTASVWTQNLSQALEYSDRLQAGTVWVNSHTLIDANLPFGGMKQSGTGRDFGPDWLDGWCETKSVAVYAPLALAFRQRSSMVSAEYVPTSVGIIGHSSARATCVVPVVIQTTASVLSSDSPVFPNPIQALLHAAYANASLYALRSAAHKLLNYAQQAREYLDFRAHGLNVACEQLRQNIHQIEESLQLLQLNQAQVSGEIKHEIELALTSANHFLRQQQDALKVQLAALFQDDSEPLSEIRTRCETLLQTAQNTISRDFTLRFAELESTLCRVLTDVIRPIEQQVKMELSESGFRPGFHFPVFHGVVPHFNTRQLFSEVISRQEATDEQSTRLGVGCEMKISLVVPVFNEEEAIPIFYKTVREFEELKSYEVEIVFINDGSKDATESIINALAVSDPLVVPLSFTRNFGKEPALFAGLDHATGDAIIPIDVDLQDPIEVIPHLIEKWQAGADMVLAKRSDRSTDGRLKRKTAEWFYKLHNKISNPNGQSRFLMHSRSVLWLRRGNRGTSPWTGVFVVIENGGRAVEWLGELLIVSCRMRRKRLITAYKIMQIQHIATHPVGLISAAQSGRDPLESLTHELLLGDRVVFSAPGSPSGSNNVDHDRPAIPLPFTQSCLLKCCVRICIRLSTYQKIILRQVQKYRATVTECIPMMIRTLMVQPPSANDQQHRLREVMFYLNLSEQEKDAFCERFGVRLLTSYGMTETIVGIIGDRPGDKRRWPSIGRVGFCYEAEIRDDHNRPLPAGEIGEICIKGIPGKTIFKEYFLNPQATAKVLEADGWLHTGDTGYRDEEDFFYFVDRRCNMIKRGGENVSCVELENIIAAHPKIQDIVVVGIKDSIRDEAIKAFVVLNEVNALLDDAELAALIAEHDLVLDCTDNVAVRNQLNAGCFAAKVPLVSGAAIRMEGQITVFTYQDGEPCYRCLSRLFGENALTCVEAGVMAPLIGVIGSLQAMEAIKMLAGYGKPASGKIVMYDAMTCQFREMKLMRNPGCEQFMRMQNVRLNRRSAKRSLPVLLKLRHSGINRRIANHLLCHIQWQTKVLRFPEVQMHEILSDFARMIPAALDNVKTSLPTDFPENVVTAVESNVLRLHGRLSREYGNIYTETPVKVSGFKRVIDEQDWTITKVTHFLNNSGFTTSLELEHAAHARTSRYITDTTKERYHQCQNVNCSATFITYESVQRYIVKPGEVHVAAWIGTVHTAVFADQPFQFVVLLHFREAHYRPRRTLYGEKMRGILCTSGPDETPAVHATEAFGPVATLMPALNQRHALQLACAGGGSLAGTLVTADPQIARQFIADAARTHGRIQILNEESAKESTGHGSPLPQLVHGGPGRAGGGEELGGLRAVKHYMQRTAVQGSPTMLAAISKQWVRGAKVEEDRIHPFRKYFEELQPGDSLLTPRRTMTEADIVNFACLSGDHFYAHMDKIAAAESIFGERVVHGYFVLSAAAGLFVDAGVGPVIANYGLDSLRFIEPVKPGDTIQVRLTLVRELGLPLDDVKVRQALTYAVNKDAIIKAVYQGAGVSAKNLIPPTMWGYNDDVQDYTYDPEKAKALLKEAGLEKGFSIDLWAMPVQRPYTLLREPQCCFPAGVTEFVAPHRVIL

SEQ ID NO: 48648 - protein, 476 aa, Homo sapiens
  DOMAIN (248)..(267): Phospholipase A2 histidine proteins domain identified by eMATRIX, accession number BL00118C, p-value=5.800e-12, raw score of 13.90
  DOMAIN (231)..(267): Phospholipase A2 domain identified by PFam, accession name phoslip, E-value=1.9e-08, PFam score of 34.1
MIADPTLAEMGKNLKEAVKMLEDSQSGQDMVSILQLVQNLMHGDEDEEPQSPREALAEGLKTLMYDLKVPRWDFQTGRQLRTSPLYDRLDAQGARWMEKHGFERPKYFVPPDKDLLALEQSKTFYKPDWFDIVESEVKCFSLNDKGDITTDPTEIQTTVTEYYKHLYANKLENLEEMDKFLDTYTLPRLNQKEVESLNRPITGSEIVAIIKSLPTKKNPGPDGFTAEFYQRCCHGHDCCYTGAEEAGCSPKTERYSWQCVNQSVLCEVLKYDKGEAGLKRVVKKEHADGSVTQSQFDAVGRLRAQTDAAGRTTEYSPDVVTGLITRITTPDGRASAFYYNHHNQLTSATGPDGLELRREYDELGRLIQETAPDGDITRYRYDNPHSDLPCATEDATGSRKTMTWSRYGLFDGLHKMRVIWQIITENFTQGKQGGYALFTAAARNKFANFIAKRIANINGISGIINAADVTHPACNA

SEQ ID NO: 48649 - protein, 86 aa, Homo sapiens
  misc_feature (1)...(86): Xaa = X or * as defined in Table 2
RQKPERYLTAFISTTLPLRWMTLVRVMRPIVTCRRSRSILLRSISHLCKWRVSTKSPVILWTILSNXRLFWKSWRXNGLQSKYQDG

SEQ ID NO: 48650 - protein, 419 aa, Homo sapiens
ASTAQQHQLLSPAKEETTGWRIFHPSDPWALGRSQGGAGLIQPPEVQKGSVRYRARFALLGPAMVAHRHTGRPEIRYRYDSDGRVTEQLNPAGLSYTYQYEKDRITITDSLDRREVLHTQGEAGLKRVVKKEHADGSVTQSQFDAVGRLRAQTDAAGRTTEYSPDVVTGLITRITTPDGRASAFYYNHHNQLTSATGPDGLELRREYDELGRLIQETAPDGDITRYRYDNPHSDLPCATEDATGSRKTMTWSRYGQLLSFTDCSGYVTRYDHDRFGQMTAVHREEGLSQYRAYDSRGQLIGVKDTQGHETRFEYNIAGDLDGGIAPEGGRNGTQYDAWGRRRTTQGGDADDRSAGGTRARKGHTSFRSVGDRTVSRHGYPGRNLRRMVRSSVPLYRLTASIAPVPQEYRFPPHQSEEVY

SEQ ID NO: 48651 - protein, 867 aa, Homo sapiens
  DOMAIN (128)..(172): Quinone oxidoreductase / zeta-crystallin proteins domain identified by eMATRIX, accession number BL01162C, p-value=8.500e- 11, raw score of 22.80
  DOMAIN (25)..(358): Zinc-binding dehydrogenases domain identified by PFam, accession name adh_zinc, E-value=0.00038, PFam score of -48.1
MGQQKQRNRRWVLASRPHGAPVPENFRLEEDDVATPGEGQVLLRTVYLSLDPYMRGRMSDEPSYSPPVDIGGVMVGGTVSRVVESNHPDYQSGDWVLGYSGWQDYDISSGDDLVKLGDHPQNPSWSLGVLGMPGFTAYMGLLDIGQPKEGETLVVAAATGPVGATVVSELDTPAAVSVVDGEEMRLATPRINLSESLTGVPGLQVQNRQNYAQDLQLSIRGFGSRSTYGIRGIRLYVDGIPATMPDGQGQTSNIDLSSVQNVEVLRGPFSALYGNASGGVMNVTTQTGQQPPTIEASSYYGSFGSWRYGLKATGATGDGTQPGDVDYTVSTTRFTTHGYRDHSGAQKNLANAKLGVRIDEASKLSLIFNSVDIKADDPGGLTKAEWKANPQQAPRAEQYDTRKTIKQTQAGLRYERSLSSRDDMSVMMYAGERETTQYQSIPMAPQLNLSHAGGGIHFVVYPLKRHIVALLFRQIDKMEQQCQSPRIHAGDTAKIDAAVAKRPDPALRITPACHPSASSSVTRSLFFLFQSDFLLRNRFQLRSQAVDTFGTQQRSPLVLFGGDHTDAFSNHVVSLPIARLGVFTPLEVQTHRRTAIRVNNGDANRHNGFIAQRLFCAIWIVDRDTSPAPDRSLLKTHESAKGDSGFCPLAKGMGKMTHQSELPLAKVRQCYEPKRQWLQEMHHSVDPVPDPEPAEILAEFIRQHSAAGQLVARAVFLSPPYLVAEEELSVLLESIKQNGDYADIACLTGSKDDYYYSTQAMSENYAAMSLQVVEQDICRAIAHAVRFECQTYPRPYKVAMLMQAPYYFQEAQIEAAIAAMDVAPEYADIRQVESSTAVLYLFSERFMTYGKAYGLCEWFEVEQFQNP

SEQ ID NO: 48652 - protein, 880 aa, Homo sapiens
  DOMAIN (731)..(778): Bacterial regulatory proteins luxR family proteins. domain identified by eMATRIX, accession number BL00622, p-value=5.500e-17, raw score of 32.69
  DOMAIN (9)..(166): Domain of unknown function DUF9 domain identified by PFam, accession name DUF9, E-value=1.6e-18, PFam score of 75.0
MVRMHFRLYQNVSRENISDAMTGLYNRKILTPELEQRLQKLVQSGSSVMFIAIDMDKLKQINDTLGHQEGDLAITLLAQAIKQSIRKSDYAIRLGGDEFCINLSIRRHKLQHNWLPRVHYCWVRSDYNLYANTITVTNGGVLDVNVDQFDTEAFRTDKLELTSGNIADHNGNVVSGVFDIHSSDYVLNADLVNDRTWDTSKSNYGYGIVAMNSDGHLTINGNGDVDNGTELDNSSVDNVVAATGNYKVRIDNATGAGAIADYKDQEIIYVNDVNSNATFSAANKADLGAYTYQAEQRASILPCGIVGLELRFRGYTRVRIPAFVGAPHSSLTKCGFPRMCPYWSKVCDHHPVGIRVNLDHVDQTPKFTDVLDHVSVELGYPRLCNIHRGDRGFNLRFLEVIWRLHQHGDFVRTRIRLALKTNGVCNGATNVLLHNLQRHRRQPAGLSYTYQYEKDRITITDSLDRREVLHTQGEAGLKRVVKKEHADGSVTQSQFDAVGRLRAQTDAAGRTTEYSPDVVTGLITRITTPDGRASAFYYNHHNQLTSATGPDGLELRREYDELGRLIQETAPDGDITRYRYDNPHSDLPCATEDATGSRKTMTWSRYGQLLSFTDCSAALDRALTMSLAERISRHAEMLDVIVKNDINHWQECFISDLKQIVPRSAESQQRDKVATFPKLADRICYSGTEAPSGNIPGNFGFPPRKGAPRIVKVPQMLQFGTTVHLSLPGSVSEKERLLLKLLMQGMSVTEISQYRNRSAKTISHQKKQLFEKLGIQSDITFWRDIFFQYNPEIISGLHGARVYIDVINTGTPIPQEERAMIFEPFFQGSHQRKGAVKGSGLGLSIARDCIRRMQGELYLVDESGQDVCFRIELPSSKNTK

SEQ ID NO: 48653 - protein, 183 aa, Homo sapiens
MRKSVIAIIIIVLVVLYMSVFVVKEGERGITLRFGKVLRDDDNKQQDVRNLNQYQTRGAFAYISDQQKVYARFFWQQTGQDRYRLLLTNPLGSTELELNAQPGNVQLVDNKGQRYTADDAEEMIGKLTGMPIPLNSLRQWILGLPGDATDYKLVRRVVVAITLTSIGIKRRASSRVITPCLIT

SEQ ID NO: 48654 - protein, 33 aa, Homo sapiens
  misc_feature (1)...(33): Xaa = X or * as defined in Table 2
HLCGPRTARXARFWHLXRAYGLXSGECRRAGSV

SEQ ID NO: 48655 - protein, 57 aa, Homo sapiens
  misc_feature (1)...(57): Xaa = X or * as defined in Table 2
HLCGPRTARXARFWHLXRAYGLXSGECRRAGSVAENARSACRCRRSAHAGRFLQTAS

SEQ ID NO: 48656 - protein, 374 aa, Homo sapiens
  DOMAIN (103)..(113): Ribonuclease II family proteins domain identified by eMATRIX, accession number BL01175C, p-value=3.057e-09, raw score of 6.18
RSPLMAPLKIISNSLPPPSNPKQSWCMTRFLTGWKIPVDWQPESEAIAEQVRLLAQICQRRGEWRHNHALVFKDRPDYRFILGEKGEVLDNRRRALVALANRIVEEAMIAANICAARVLRDKLGFGIYNVHMGLDPANADAPAAMMKHPGLHVDAEQVLTLGRFLHTAKPATACREERCMSEPLIVGIRHHSPACARLVKSLIESQRPRYVLIEGPADFNDRVDELFLAHQLPVAIYSYCQYQDGAAPGRGAWTPFAEFSPEWQALQAARRIQAQTYFIDLPCWAQSEEEDDSPDTQDESQALLLRATRMDNSDTLWDHLVKDESQQTALPSALAHYFAQLRGDAFGDALNRQREAFMARWIGWAMQQNNGDVL

SEQ ID NO: 48657 - protein, 223 aa, Homo sapiens
MGCSESATGGGPTGTVKGCGGYTDRHSVERATVQAIQWLTRAPDRFSAAQFSPLLEHEKSSTQIINLLDNPLLAQLKQQLHSQTPRAEGVVKATEKGFGFLEVDAQKSYFIPPPQMKKVMHGDRIIAVIHSEKERPCCVSAENQAGPPCLHNVVKCCNNSCREGAERYQVDFVLDCVNHVPRVHLYKRLYDYWRSHVQCHASNYHNIASHSCTPRAATATEYF

SEQ ID NO: 48658 - protein, 76 aa, Homo sapiens
TIMFQDNPLLAQLKQHLHSQTPRAEGVVKATEKGFGFLEVDAQKSYFIPPPHMKKVMHGDRIIAVIPGVRVQFLKS

SEQ ID NO: 48659 - protein, 147 aa, Homo sapiens
  DOMAIN (68)..(85): FLAGELLAR MOTOR SWITCH PROTEIN FLIN SIGNATURE domain identified by eMATRIX, accession number PR00956A, p-value=2.500e- 19, raw score of 10.69
  DOMAIN (65)..(141): Surface presentation of antigens (SPOA) prot domain identified by PFam, accession name SpoA, E-value=1.9e-32, PFam score of 121.2
PDFKFSERGTAQMSDMNNPADDNNGAMDDLWAEALSEQKSTSSKSAAETVFQQFGGGDVSGTLQDIDLIMDIPVKLTVELGRTRMTIKELLRLTQGSVVALDGLAGEPLDILINGYLMPQGEVVVVADKYGVRITDIITPSERMRRL

SEQ ID NO: 48660 - protein, 1062 aa, Homo sapiens
  DOMAIN (65)..(108): Ribonuclease PH proteins domain identified by eMATRIX, accession number BL01277B, p-value=1.000e-40, raw score of 18.57
  DOMAIN (339)..(541): Elongation factor Tu family domain identified by PFam, accession name GTP_EFTU, E-value=4.5e-63, PFam score of 215.2
MRPAGRSNNQVRPVTLTRNYTKHAEGSVLVEFGDTKVLCTASIEEGVPRFLKGQGQGWITAEYGMLPRSTHTRNAREAAKGKQGGRTMEIQRLIARALRAAVDLKALGEFTITLDCDVLQADGGTRTASITGACVALVDALQKLVENGKLKTYPMKGSKTRVSKPCKHNTFHRKGKRVDQKQCQQYENELTHLPVHSNGEKRVVALSVTLINRLKGMLILDAETDFVRPGVVVRLAGPDIPADPDSAKLRALSAFITIAVVLNVSVRLNSLSVSYLLMPADAIICRPRLNILADILRRIETSLAIWYRLQKCPCENPSSPLARKSTAFLPLRIGKVVIEKLRNIAIIAHVDHGKTTLVDKLLQQSGTFDSRAETQERVMDSNDLEKERGITILAKNTAIKWNDYRINIVDTPGHADFGGEVERVMSMVDSVLLVVDAFDGPMPQTRFVFDLFVNLDATDEQLDFPIVYASALNGIAGLDPEDMAEDTDPAVQAIVDHVPAPDVDLDGPFQMQISQLDYNSYVGVIGIGRIKRGKVKPNQQVLSSMRSKPQRESREITNITTSPNDIVVNTPFHVEIGNLTGEFNICLPFSMIEPLRELLVNPPLENSRNEDQNWRDNLVRQVQHSQLELVANFADISLRLSQILKLNPGDVLPIEKPDRIIAHVDGVPVLTSQYGTLNGTAQMSDMNNPADDNNGAMDDLWAEALSEQKSTSSKSAAETVFQQFGGGDRNATLPDTLATMTPQAYTSIQYDAEKSLWHNVENRQLDAQFFHMGMGFRRRVRMFSVDPATHLAREIHFRPELFKYNDAGVDTKQLEGQSDLGFAGFRVFKAPELARRDVVSFLGASYFRAVDDTYQYGLSARGLAIDTYTDSKEEFPDFTAFWFDTVKPGATTFTVYALLDSASITGAYKFTIHCEKSQVIMDVENHLYARKDIKQLGLYRQSSGHRSAPALPKITVLVGHDSNIASLLTALDFKPYQLHDQNERTPIGGKIVFQRWHDSKANRDLMKIEYVYQSAEQLRNADALTLQAPAQRVTLELSGCPIDADGFCPMDKFDSVLNEAVK

SEQ ID NO: 48661 - protein, 113 aa, Homo sapiens
WFPNRTESVFLRMLNRYLLPPACRSTAESQPATYRTGWFARPSGQISLPQRRTIPAHPHGDHRLQPPRLWQSPCLRLSDRFPGERQSASVRRTHVCTLHALRCLGISAQPSLR

SEQ ID NO: 48662 - protein, 479 aa, Homo sapiens
  DOMAIN (411)..(439): BACTERIAL CHROMOSOMAL REPLICATION INITIATOR (DNAA) SIGNATURE domain identified by eMATRIX, accession number PR00051D, p-value= 4.500e-30, raw score of 12.27
  DOMAIN (280)..(478): Bacterial  dnaA  protein domain identified by PFam, accession name bac_dnaA, E-value=2.1e-150, PFam score of 447.4
MTGPSKRILCGMLQAGSLLCFDKLVEEDTTGFWHDDFNNATPNDICVAIRSEAADAGIAQAIMQQLEEALKQLAQGSGSSQALTQRVKRVSECRKIGSIPSGIFRGYITKQSLCIALGGSLMQAQQHAIHKSTVPEQPRPFAPVNMIASQTSEPVKKRCATLPAFTNEYEAWITKQMQKDNAFLDHADVRESTHDQANDVDKYLNNINGLLTSFCGADAPQLRFEVGTKPVTQTPQAAVTSNVAAPAQVAQTQPQRAAPSTRSGWDNVPAPAEPTYRSNVNVKHTFDNFVEGKSNQLARAAARQVADNPGGAYNPLFLYGGTGLGKTHLLHAVGNGIMARKPNAKVVYMHSERFVQDMVKALQNNAIEEFKRYYRSVDALLIDDIQFFANKERSQEEFFHTFNALLEGNQQIILTSDRYPKEINGVEDRLKSRFGWGLTVAIEPSELETRVAILMKKADENDIRLPGEVAFFIGKRLRY

SEQ ID NO: 48663 - protein, 127 aa, Homo sapiens
  DOMAIN (65)..(78): Thioredoxin family proteins domain identified by eMATRIX, accession number BL00194, p-value=3.571e-16, raw score of 12.16
  DOMAIN (42)..(121): Thioredoxin domain identified by PFam, accession name thiored, E-value=4.8e-41, PFam score of 140.4
NISLLLLYESVSGEIKSTFSWLMLHQQRNQHARLIPVELYMSDKIIHLTDDSFDTEVLKADGAILVDFWAEWCGPCKMIAPILDEIADEYQGKLTVAKLNIDQNPGTAPKYGIRGIPTLLLHKICIG

SEQ ID NO: 48664 - protein, 58 aa, Homo sapiens
RQFDHGGGLSMRKTFLTLLCVSSAIAHAADEDITFHGTLLSPPTCSISGGKTIEVEFR

SEQ ID NO: 48665 - protein, 725 aa, Homo sapiens
  DOMAIN (28)..(67): 34-dihydroxy-2-butanone 4-phosphate synthase. domain identified by eMATRIX, accession number PF00926B, p-value=3.455e- 32, raw score of 26.82
  DOMAIN (1)..(151): 3,4-dihydroxy-2-butanone 4-phosphate sy domain identified by PFam, accession name DHBP_synthase, E-value=1.8e-15, PFam score of 50.6
MVLDDEDRENEGDMIFPAETMTVEQMALTIRHGSGIVCLCITEDRRKQLDLPMMVENNTSAYGTGFTVTIEAAEGVTTGVSAADFPPANLVVSTSPGNVNFLRPLIKLLAMLSNGFFQRLDKLLIVDPAVAGYPGTHIAVEVIAIFILIINQHFELFFRLLTSATHFTQQARGILYLFFCQIFQALQLRPQGDGFIEHRIAAFGIRADANQIAVTLKTRQQLFEGAHSRVMLLTDRVPSKIRIIKPLTCRSQDLIRNELNEAAETLANFLKDDANIHAIQRAAVLLADSFKAGGKVLSCGNGGSHCDAMHFAEELTGRYRENRPGYPAIAISDVSHISCVGNDFGFNDIFSRYVEAVGREGDVLLGISTSDAKYTLNCTNSLANDLRMQLKGNTSTINGETVLSTNITGLGIRIENSADNSFAIAHAADEDITFHGTLLSPPTCSISGGKTIEVEFRDLIIDDINGNYGRKEVPYELTCDSTTRHPDWEMTLTWTGTRTSFNDAAIETDVPGFGIELQHDGQRFKLNTPLAINATDFTQKPKLEAVPSGGYVLLAGLILAMSSTLFAADNNLHFSGNLLSKSCALVVDGQYLAEVRFPTVSRQDLNVAGQSARVPVVFKLKDCKGPAGYNVKVTLTGVEDSEQPGFLALDTSSTAQGVGIGMEKTDGMQLPSTIQTSGNRCLMRRYRVLSGLQNPNRWTDQAFTLRPAQVFPCLFADRRICSNPH

SEQ ID NO: 48666 - protein, 444 aa, Homo sapiens
  DOMAIN (36)..(66): Gram-negative pili assembly chaperone proteins domain identified by eMATRIX, accession number BL00635E, p-value=5.750e- 13, raw score of 25.34
  DOMAIN (45)..(107): Gram-negative pili assembly chaperone domain identified by PFam, accession name pili_assembly, E-value=3.4e-06, PFam score of 24.3
MVEEYSGVTLDKSESRTDWLARPLTERQCEYAAADVWYLLPITASSGQAFTVNNPTPYYVIISNASAQKNGNPAAGFSPLVIEPKTTVPLNVKMDSVPVLTYVNDFGARMPLFFQCNGNSCQGSQVEFGNMIADNVDGTNYRQDAKYTLNCTNSLANDLRMQLKGNTSTINGETVLSTNITGLGIRIENSADNSLFAVGENSWTPFNINNQPQLKAVPVKASGAQLAAGDAIAHAADEDITFHGTLLSPPTCSISGGKTIEVEFRDLIIDDINGNYGRKEVPYELTCDSTTRHPDWEMTLTWTGTQTSFNDAAIETDVPGFGIELQHDGQRFKLNTPLAINATDFTQKPKLEAYRKSCALVVDGQYLAEVRFPTVSRQDLNVAGQSARVPVVFKLKDCKGPAGYNVKVTLTGVEDSEQPGFLALDTSSTAQGVGIGMEKTDGMQ

SEQ ID NO: 48667 - protein, 522 aa, Homo sapiens
MAEGQEQGRGSEEEEEGQSQERNQYKRTYIHALTLDCASIRCYFQSNTDPMCILNLKHSIACTAQVASQSTDHLIAPQMPSFKAAHDLPMGLNPTRHQRPDVWQLRRWEKEKGRRRKGAEGRKESMRNGERKRKRERDPSVTAIRDFQILRMMRCATCSVTVATQKNSSIGIRCRQTDAEQAKELFDNQVLAPGSLDKSPLDLQVWSIRLSVPSPLVGHDHLVRVRDSSVILGLRGLHHAVMIATLPESDTTMKVLLISWCKNPWINSGLLVDAPPPGSIKASQLEFANMIADNVDGTNYRQDAKYTLNCTNSLANDLRMQLKGNTSTINGETVLSTNITGLGIRIENSADNSLFAVGENSWTPFNINNQPQLKAVPVKASGAQLAAGEFNASLTMTFLTLLCVSSAIAHAADEDITFHGTLLSPPTCSISGGKTIEVEFRDLIIDDINGNYGRKEVPYELTCDSTTRHPDWEMTLTWTGTQTSFNDAAIETDVPGFGIELQHDGQRFKLNTPLAINATDLT

SEQ ID NO: 48668 - protein, 306 aa, Homo sapiens
  DOMAIN (262)..(283): RHS PROTEIN SIGNATURE domain identified by eMATRIX, accession number PR00394D, p-value=1.090e-28, raw score of 6.56
  DOMAIN (4)..(163): haloacid dehalogenase-like hydrolase domain identified by PFam, accession name Hydrolase, E-value=0.011, PFam score of -4.0
MSRIEAVFFDCDGTLVDSEVICSRAYVTMFQEFGITLDPEEVFKRFKGVKLYEIIDIVSVDMVLPRQEIAAHPDLPRQAHRLYNDKSEERIQAHSGCQATGRLANSPIIILPNAAIRQEFGITLDPEEVFTFQGVKLYEYRYFPDCVRSRNEAGILVEQILSTLFSVGEHFSLKRAPFFKVPSLRSFYAFGGLTTGVVRRNGNHGVNTPARKIHLYHCDHRGLPLALISKEGTTEWCAEYDEWGNLLNEENPHQLQQLIRLPGQQYDEESGLYYNRHRYYDPLQGRYITQDPIGLKAGMEFLSSIR

SEQ ID NO: 48669 - protein, 828 aa, Homo sapiens
  DOMAIN (634)..(655): RHS PROTEIN SIGNATURE domain identified by eMATRIX, accession number PR00394D, p-value=1.090e-28, raw score of 6.56
  DOMAIN (9)..(199): Deoxyribose-phosphate aldolase domain identified by PFam, accession name DeoC, E-value=3.4e-16, PFam score of 67.2
MTDLKASSLRALKLMDLTTLNDDDTDEKVIALCHQAKTPVGNTAAICIYPRFIPIARKTLKEQGTPEIRIATVTNFPHGNDDIDIALAETRAAIAYGADEVDVVFPYRALMAGNEQVGFDLVKPVKSMRGRVSMYYGAHSHYRIQEPLGAARPKGTSSALAAPSTSGPRCDHPRHVMDSEVLRSGFTSNSVKFSVTFVSGLDHSIRTSEVIIPNKAFVTERLINWSLTDTTTRLVIRLGVAYGSDLEKVRKVLLKAATEHPRVMHEPMPEVFFTAFGASTLDHELRLYVRELRDRSRTVDELNRTIDQLCRENDINIAFNQLEVHLHNEKGDEVTEVKRDYKGDDPTPAVGGYITANVPFPVHFANSRSANIIDRLIHYACPLYVYSQMNPFRMDHHPDVSRTYVEYLADKVADREEDAEEYLEAIMEARVTVAGMGLVMEVQDYFDGEADRLAKAWLAEYTPQIKSLKDERKEAYRQIVEMSTEPQDVDLVRPANKFEMSQGIRPRHRRYSWPLPNSPVCPGALTRTPHDVCRTDCPLRRIVSPCGNVDAGRNLVTGEEKSPWRHRRPAVAKCKPEGPYTRGAKIHLYHCTIAPAAALISTEGTTAWYAEYDEWGNLLNEENPHQLQQLIRLPGQQYDEESGLYYNRHRYYDPLQGRYITQDPIGLKGGWNFYQYPLNPISNIDPLGLETLKCIKPLHSMGGTGERSGPDIWGNPFYHQYLCVPDGKGDYTCGGQDQRGESKGDGLWGPGRIRRSRRIRHLHKMPDATLSASYQAYVRHQTNVTALVLRSSHRFRKDRHCWGFVFLQQPILRGRSADNVWSKMAETG

SEQ ID NO: 48670 - protein, 972 aa, Homo sapiens; identical to SEQ ID NO: 46308
  DOMAIN (75)..(107): Bacterial-type phytoene dehydrogenase proteins domain identified by eMATRIX, accession number BL00982A, p-value=7.923e- 15, raw score of 18.41
  DOMAIN (383)..(505): TonB dependent receptor C-terminal regi domain identified by PFam, accession name TonB_boxC, E-value=4.5e-34, PFam score of 126.6

SEQ ID NO: 48671 - protein, 738 aa, Homo sapiens
  DOMAIN (506)..(527): RHS PROTEIN SIGNATURE domain identified by eMATRIX, accession number PR00394D, p-value=1.090e-28, raw score of 6.56
  DOMAIN (495)..(738): Domain of unknown function 2 domain identified by PFam, accession name DUF2, E-value=5e-08, PFam score of 23.7
MRSDPDTSVNEIETKLSALLGSETTGEILFDLLCANGPEWNRFVTLEMKYGRIMLDTAKIIDEQDVPTHILSKLTFTLRNHPEGVVMKNFEVLQPLQNSLSGLPLWVSERILQQINQLTHYEPVIGIMGKTGAGKSSLCNALFAGEVSPVSDVAACTRDPLRFRLQIGEHFMTIVDLPGVGESGVRDTEYAALYREQLPRLDLILWLIKADDRALATDEHFYRQVIGEAYRHKMLFVISQSDKAEPTSGGNILSTEQKQNISRKICLLHELFQPVHPVCAVSVRLHPVVALLQQFRTDDERTHRYHYDSQHRLVDYTRTQYEEPLVESRYLYDPLGRRVAKRVWRRERDLTGWMSLSRKPQVTWYGWDGDRLTTIQNDRSRIQTIYQPGSFTPLIRVETATGELAKTQRRSLADALQQSGGEDGGSVVFPPVLVQMLDRLESEILADRVSEESRRWLASCGLTVEQMQNQMDPHGRDNSVVPEYDEWGNLLNEENPHQLQQLIRLPGQQYDEESGLYYNRHRYYDPLQGRYITQDPIGLKGGWNFYQYPLNPISDIDPLGLSMWEVARQMNAIASKLPEGFHIGINFSASHIISPTFVDECLNFRDSFTRRDLNLVLEVTERDLLNVDESLVQRLNILHENGFVIALDDFGTGYSGLSYLHDLHIDYIKIDHSFVGRVNADPESTRILDCVLDLARKLSISIVAEGVETKEQLDYLNQNYITFQQGYYFYKPVTYIDL

SEQ ID NO: 48672 - protein, 88 aa, Homo sapiens
  misc_feature (1)...(88): Xaa = X or * as defined in Table 2
RLAWRLAGRWWAGSWRTSTIPPAAACSRLRCSPPSKFCSAWCRWCSTRACSSCCRSTSSPMPAWRPSAGSXLSTARRRAPPSALVLRI

SEQ ID NO: 48673 - protein, 526 aa, Homo sapiens
  DOMAIN (121)..(136): ADRENODOXIN REDUCTASE FAMILY SIGNATURE domain identified by eMATRIX, accession number PR00419D, p-value=2.189e-10, raw score of 10.62
  DOMAIN (123)..(497): Pyridine nucleotide-disulphide oxidoreducta domain identified by PFam, accession name pyr_redox, E-value=2.8e-15, PFam score of 54.4
  misc_feature (1)...(526): Xaa = X or * as defined in Table 2
PSRQADKENRPHPGRGYPARMMSGLTGTITTVSTGWCTTRGHNMKSRWSKVAIFTTRWGRRVAKRVWRRERDLTGWMSLSRKPQVTWYGWDGDRLTTIQNDRTRIQTIYQPGSFTPLIRRIPVLGGGDTTMDCLRTSIRLNAASVTCAYRRDQISMPGSRKEVVNAREEGVEFQFNFQPQYIACDEDGRLTAVGLIRTAMGEPGPDGRRRPPPVAGSEFELPADVLIMAFGFQAHAMPWLQGSGIKLDKWGLIQTGDVGYLPTQTHLKKVFAGGDAVHGADLVVTAMAAGRQAARDMLTLFDTKXPGTAGTATGXPQYRTTEPASRRFISRGASRHSSEGSSVLGGGDTTMGLFADFHPPQCRQRDLPYRRDQISMPGSRKEVVNAREEGVEFQFNFQPQYIACDEDGRLTAVGLIRTAMGEPGPDGRRRPPPVAGSEFELPADVLIMAFGFQAHAMPWLQGSGIKLDKWGLIQTGDVGYLPTQTHLKKVFAGGDAVHGADLVVTAMAAGRQAARDMLTLFDTKAS

SEQ ID NO: 48674 - protein, 923 aa, Homo sapiens
  DOMAIN (707)..(728): RHS PROTEIN SIGNATURE domain identified by eMATRIX, accession number PR00394D, p-value=1.090e-28, raw score of 6.56
  DOMAIN (1)..(136): Thiolase domain identified by PFam, accession name thiolase, E-value=0.00051, PFam score of -177.7
  misc_feature (1)...(923): Xaa = X or * as defined in Table 2
MTQSNGQTLVVDTDEQPRTDASAEGLARLNPSFDSLGSVTAGNASSINDGAAAVMMMSEAKARALNLPVLARIRAFASVGVDPALMGIAPVYATRRCLERVGWQLAEVTPPEEAKEIPQVAGSLEEALNELDLDREFLKAGGVFTDEAIDAYIALRREEDDRVRLGSVASTSRRDATQMRLIRPTRVDDVVGRSSVALENQGKWAQAAALQRQRLALDPGSVWITYRLSQDLWQAGQRSQADTLMRNLAQQKSNDPEQVYAYGLYLSGHDQDRAALAHINSLPRAQWNSNIQELVNRLQSDQVLETANRLRESGKEAEAEAMLRQQPPSTRIDLTLADWAQQRGSSRVTSSSKLHGCGIGGLPCAGKTVQLYSRRWSPQRQREEMRGPGRALQSETHRRVIGHRSPEYTNLDIRIRMPQTRQVTLPDPELHPDSTLSMWPDNRIARDAHYLYRYDRHGRLTEKTDLIPEGVIRTDDERTHRYHYDSQHRLVHYTRTQYAEPLVESRYLYDPLGRRVAKRVWRRERDLTGWMSLSRKPQVTWYGWDGDRLTTIQNDRTRIQTIYQPGSFTPLIRVETATGELAKTQRRSLADTLQQSGGEDGGSVVFPPVLVQMLDRLESEILADRVSEESRRWLASCGLTVEQMQNQMDPVYTPARKIHLYHCDHRGLPLALISKEGTTEWCAEYDEWGNLLNEENPHQLQQLIRLPGQQYDEESGLYYNRHRYYDPLQGRYITQDPIGLKGGWNFYQYPLNPVQYIDSMGLASKYGHLNNGGYGARPNKPPTPDPSKLPDIAKQLRLPYPIDQASSAPNVFKTFFRALSPYDYTLYCRKWVKPNLTCTPQDDSQYPGMDTKTASDYLPQTNCRYRARLYHVLLGLFHELFASGYLRGHLTLAIAELESGDDHSAQAVHTTVSQSLEKAIGAX

SEQ ID NO: 48675 - protein, 1256 aa, Homo sapiens
  DOMAIN (128)..(149): RHS PROTEIN SIGNATURE domain identified by eMATRIX, accession number PR00394D, p-value=1.090e-28, raw score of 6.56
  DOMAIN (426)..(1118): Cadherin domain identified by PFam, accession name cadherin, E-value=6.3e-104, PFam score of 358.7
NDTDTTPALDCHFRQIPAGEDGGSVVFPPVLVQMLDRLESEILADRVSEESRRWLASCGLTVAQMQSQMDPVYTPARKIHLYHCDHRGLPLALISTEGTTAWYAEYDEWGNLLNEENPHQLQQLIRLPGQQYDEESGLYYNRHRYYDPLQGRYITQDPIGLKGGWNFYQYPLNPISNIDPLGLETLKCIKPLHSMGGTGERSGPDIWGNPFYHQYLCVPDWYKGTYILLRLRPKGNQTGGKKFKKGDTTDHRPEDPSAVVLCVRERILLLGRRLHIPLAQQLVGVKSGFLQIIQVTATAIRHVALNADFHRHSQADIQHCVFNDSGDVIATVVAEYARMLFFVNGAAMNLPVKIRRDWHYYAFAIGLIFILNGVVGLLGFEAKGWQTYAVIVPLEFVTEGPLEMYRAEVEIVDVNDHAPRFPRQQLDLEIGEAAPPGQRFPLEKAQDADVGSNSISSYRLSSNEHFALDVKKRSDGSLVPELLLEKPLDREKQSDYRLVLTAVDGGNPPRSGTAELRVSVLDVNDNAPAFQQSSYRISVLESAPAGMVLIQLNASDPDLGPSGNVTFSFSGHTPDRVRNLFSLHPTTGKLTLQGPLDFESENYYEFDVRARDGGSPAMEQHCSLRVDLLDVNDNAPHITVTSELGTLPESAEPGTVVALISVQDPDSGSNGDVSLRIPDHLPFALKSGFRNQFSLVTAGPLDREGQIQLRPHGGRYSVVLTNTPQGRVVLQPLPHLAKRIPPLTPTATLLFDRGGVHSNPTGDWPLDGITDGLSRSHLPVYNSREPRDMTARDRTADTRHTVQANAPAFNQSLYRARVREDAPPGTRVAQVLATDLDEGLNGEIVYSFGSHNRAGVRELFALDLVTGVLTIKGRLDFEDTKLHEIYIQAKDKGANPEGAHCKVLVEVVDVNDNAPEITVTSVYSPVPEDAPLGTVIALLSVTDLDAGENGLVTCEVPPGLPFSLTSSLKNYFTLKTSAALDRETMPEYNLSITARDSGIPSLSALTTVKVQVSDINDNPPQSSQSSYDVYVEENNLPGVPILNLSVWDPDAPPNARLSFFLLEPGAETGLVSRYFTINRDNGVLTTLVPLDYEDQREFQLTAHINDGATNISVNVFVTDCNDKAPKVLYPGLGRVRGDVLEVSAGTWSPRVAGPNLGQLGPKAWEPTKCCGGSRVHIAAKRNNANTQSKDILHTLVIDTRTIIQKHLFVRRDYGHMLSHMSAWCPWSSEDDNGSLELEIRIVVSSVEDRRMWRQEI

SEQ ID NO: 48676 - protein, 90 aa, Homo sapiens
FRMAIEQQGNVSLRSGRHNGDRFRTFTQRFRHQLYRRTVLRCECRFRSPDSPLYGKAHFVGHHHHGHSFVRQFHHHVQYSLIISGSSADV

SEQ ID NO: 48677 - protein, 196 aa, Homo sapiens
  DOMAIN (165)..(177): Inosine-uridine preferring nucleoside hydrolase family signat domain identified by eMATRIX, accession number BL01247C, p-value= 2.742e-13, raw score of 9.01
  DOMAIN (35)..(99): Bacterial extracellular solute-binding prot domain identified by PFam, accession name SBP_bac_5, E-value=5.8e-13, PFam score of 49.3
APEAQLAVRPCGHPGANTDPKTASPAKGFGRSKESAISIVHAAAPDEITTAWPVNVGPLNPHLYTPNQMFAQSMVYEPLVKYQADGSVIPWLAKSWTHSITSNMMYKPTQEVTDGCGFSIGHQQQFASWIAYKVAPFLGKKEESVEDLKLIMGGAMGLGNWTPAAEFNIYVDPEAAEIVFQSGIPVVMAGLDVTHE

SEQ ID NO: 48678 - protein, 60 aa, Homo sapiens
RQMASISCGGQPCMVERVTPCTILVGMRAGKACKLSRFSCNPWRAKNASSWSNLFSVSRY

SEQ ID NO: 48679 - protein, 78 aa, Homo sapiens
  misc_feature (1)...(78): Xaa = X or * as defined in Table 2
LEELGVIGAVLVGFSLXVLWAPLQLPKAGGRVKVAGIQLGEVEFWKVSKSCSSPDPPPGVMAAKISISQALQPPQSTR

SEQ ID NO: 48680 - protein, 906 aa, Homo sapiens
  DOMAIN (761)..(816): Fimbrial biogenesis outer membrane usher protein domain identified by eMATRIX, accession number BL01151, p-value=1.000e-40, raw score of 29.09
  DOMAIN (760)..(898): Fimbrial Usher proteins domain identified by PFam, accession name Usher, E-value=7.1e-84, PFam score of 292.1
MVALGCKYLRICHLNNCATGVATQDDKLRKNHYHGLPFKVTNYFEFIARETRELMAQLGVTRLVDLIGRTDLLKELDGFTAKQQKLALSKLLETAEPHPGKALYCTENNPPFDNGLLNAQLLQQAKPFVDERQSKTFWFDIRNTDRSVGASLSGYIAQTHGDQGLAADPIKAYFNGTAGQSFGVWNAGGVELYLTGDANDYVGKGMAGGLIAIRPPVGSAFRSHEASIIGNTCLYGRTGCQYNCTRLDYDSALNIRELKKVALEKGWDEYKQRWHKPAGSGSRHPVAVIGAGPAGLAAGYFLARAGHPVTLFEREANAGGVVKNIVPQFRIPAELIQHDIDFVAAHGVKFEYGCSPDLTIEQLKNQGFHYVLIATGTDKNSGVKLAGDNQNVWKSLPFLREYNKGTALKLGKHVVVVGAGNTAMDCARAALRVPGVEKATIVYRRSLQEMPAWREEYEEALHDGVEFRFLNNPERFDADGTLTLRVMSLGEPDEKGRRRPVETNETVTLLVDSLITAIGEQQDTEALNAMGVPLDKNGWPDVDHNGETRLTDVFMIGDVQRGPSSIVAAVGTARRATDAILSRENIRSHQNDKYWTTSIQRKVRAYDSGDGKVQTLGAVEHSPLYTSVDPLQSMSREEKLDILRRVDKVAREADKRVQEVTASLSGVYELILVAATDGTLAADVRPLVRLSVSVLVEEDGKRERGASGGGGRFGYEFFLADLDGEVRADAWAKEAVRMALVNLSAVAAPAGTMPVVLGAGDFFDSVSFRGVQLASDDNMLPDSLKGFAPVVRGIAKSNAQITIKQNGYTIYQTYVSPGAFEISDLYSTSSSGDLLVEIKEADGSVNSYSVPFSSVPLLQRQGRIKYAVTLAKYRTNSNEQQESKFAQATLQWGGTWGTNCMVVTIC

SEQ ID NO: 48681 - protein, 106 aa, Homo sapiens
  misc_feature (1)...(106): Xaa = X or * as defined in Table 2
PVMRQRGVFRSVILIKIRSARCCQMIQPRVISHAMYSLSPFFALRRSTKSPKRFSMNNSXASRSSGSTSRDTSAISXARRSISSRTSRLLIRSLISLISSLLVNVV

SEQ ID NO: 48682 - protein, 593 aa, Homo sapiens
  DOMAIN (455)..(501): Respiratory-chain NADH dehydrogenase 20 Kd subunit proteins domain identified by eMATRIX, accession number BL01150B, p-value= 9.250e-39, raw score of 17.16
  DOMAIN (390)..(497): NADH ubiquinone oxidoreductase, 20 Kd sub domain identified by PFam, accession name oxidored_q6, E-value=5.4e-44, PFam score of 159.6
MIRVACVGITVMDRIYYVEGLPTESGKYVARNYTEVGGGPAATAAVAAARLGAQVDFIGRVGDDDTGNSLLAELESWGVNTRYTKRYNQAKSSQSAIMVDTKGERIIINYPSPDLLPDAEWLEEIDFSQWDVVLADVRWHDGAKKAFTWPVRRRLIRVELQALTTSDFERILTEPNASIPCSTSLMATEGVNIEFTDSGIKRIAEAAWQVNESTENIGARRLHTVLERLMEEISYDASDLSGQNITIDADYILSNLANDYGDAVKGSDKPDRIGPLRGMQKGVITQQEMKRALIITVVLICLSGLALVAVACHTLADFVGFLILGGLSIMPLSPTPWQSSLCEDPCLPNVSQPITLDEQTQKMKRHLLQDIRRSAYVYRVDCGGCNACEIEIFAAITPVFDAERFGIKVVSSPRHADILLFTGAVTRAMRMPALRAYESAPDHKICVSYGACGVGGGIFHDLYSVWGGSDTIVPIDVWIPGCPPTPAATIHGFAVALGLLQQKIHAVDYRDPTGVTMQPLWPQIPPSQRIAIEREARRLAGYRQGREICDRLLRHLSDDPTGNRVNTWLRDADDPRLNSIVQQLFRVLRGLHD

SEQ ID NO: 48683 - protein, 76 aa, Homo sapiens
CRIFARKSFARSDFGSSKKASFGESSTILPSSIKITRFATLRAKPISWVTTIMVIPSFASSTITSSTSLIISGSPG

SEQ ID NO: 48684 - protein, 141 aa, Homo sapiens
  misc_feature (1)...(141): Xaa = X or * as defined in Table 2
ALTAASRSECAVIMMTGRTSCCDIVEKWIPARCCQMIQPRVISHAMYSLSPFFALRRSTKSPKRFSMNNSXASRSSGSTSRDTSAISXARRSISSRTSRLLIGWRSLWYTILINSIPPTNRAKSMKPEPSPNACSKVKRCC

SEQ ID NO: 48685 - protein, 235 aa, Homo sapiens; identical to SEQ ID NO: 48055
  DOMAIN (112)..(138): Elongation factor 1 gamma chain profile domain identified by eMATRIX, accession number BL50040B, p-value=6.850e-10, raw score of 13.65
  DOMAIN (66)..(150): Glutathione S-transferases domain identified by PFam, accession name GST, E-value=1.3e-20, PFam score of 71.1

SEQ ID NO: 48686 - protein, 812 aa, Homo sapiens
  DOMAIN (606)..(661): ELEMENT INSERTION TRANSPOSABLE SEQUENCE TRANSPOSASE FOR domain identified by eMATRIX, accession number PD02662D, p-value= 1.000e-40, raw score of 21.71
  DOMAIN (396)..(579): Fimbrial Usher proteins domain identified by PFam, accession name Usher, E-value=1.2e-83, PFam score of 291.3
SHSRGSPGKAVDFTLVSHAAWFGLPHFSTPAFNGQAMMLIAPVAVILVAENLGHLKAVAGMTGRNMDPYMGRAFVGDGLATMLSGSVGGSGVTTYAENIGVMAVTKVYSTLVFVAAAVIAMLLGFSPKFGALIHTIPAAVIGGASIVVFGLIAVAGARIWVQNRVDLSQNGCNPAYAEHHQHPGYSDKLKTRVSFSCLRIISTNLRRECRAQFRFHVDASARHGFRLWQIQGVAQPVFIITIREVEAAMRATAFGTEVGRNSRCIRRFHQVIQFQALNALGVELAGIDSRDPRLKVLEEMKRTFHWGRQTISKHIKIWLGLMLGRAMTPLMLDATSGKLTVWDGAHAGAAMGILAVTADQNSAELAYYKSGSFRIEDVLWPSAVTDDNIKRNAFAADGSVNSYSVPFSSVPLLQRQGRIKYAVTLAKYRTNSNEQQESKFAQATLQWGGPWGTTWYGGGQYAEYYRAAMFGLGFNLGDFGAISFDATQAKSTLADQSEHKGQSYRFLYAKTLNHLGTNFQLMGYRYSTSGFYTLSDTMYKHMDGYEFNDGDDEDTPMWSRYYNLLYTKRGKLQSLISKTRLLSENRRKGRVVQAETLEAAGHVLLLTSLPEDEYSAEQVADCYRLRWQIELAFKRLKSLLHLDALRAKEPELAKAWIFANLLAAFLIDDIIQPSLDFPPRKDPLCAEMDEQWGYVGAKSRQRWLFYAYDSLRKTVVAHVFGERTMATLGRLMSLLSPFDVVIWMTDGWPLYESRLKGKLHVISKRYTQRIERHNLNLRQHLARLGRKSLSFSKSVELHDKVIGHYLNIKHYQ

SEQ ID NO: 48687 - protein, 143 aa, Homo sapiens
PLLAAVLSLRSWVLSVTRRATSPLLNFSSQAAASAIPAIQVSEMTHSTAAPQAWRSFSVSSVPFLVCSEYISGWKIWGILCCATESIAKTSNISSCRNIPLSDVVRFISTRVETFMSLSSLESLICRIPLLNPVRTRKSLIWP

SEQ ID NO: 48688 - protein, 42 aa, Homo sapiens
  misc_feature (1)...(42): Xaa = X or * as defined in Table 2
AGYAAPGRTDRRSSPSGXGYRYSGCYQICRQPGRLGSRKSPV

SEQ ID NO: 48689 - protein, 293 aa, Homo sapiens
  DOMAIN (117)..(288): tRNA synthetases class I (W and Y) domain identified by PFam, accession name tRNA-synt_1b, E-value=3.8e-08, PFam score of 13.8
  misc_feature (1)...(293): Xaa = X or * as defined in Table 2
MTPSRFAKKNGSLVKRCPMGIDAEVTMIKPIAARPKVSHSKVRSYMIRLSVSFSREPITQPFSAVEIQTRIRYGVSGFFLRRVDTEHHPDRHAARALQYHITGSNRCDAINAVQFDTAGGECTNRRMAEDHGRNVAVIQMLIRLVIKQAFREVPSELWTNRKQACPFLDFDCGENSAIAANNYDWFGNMNVLTFLRDIGKHFSVNQMINKEAVKQRLNREDQGISFTEFSYNLLQGYDFACLNKQYGVVLQIGGSDQWGNITSGIDLNPSSASESGVWPDRSADHXSRWHQIW

SEQ ID NO: 48690 - protein, 1090 aa, Homo sapiens; identical to SEQ ID NO: 48053
  DOMAIN (549)..(604): Fimbrial biogenesis outer membrane usher protein domain identified by eMATRIX, accession number BL01151, p-value=1.000e-40, raw score of 29.09
  DOMAIN (441)..(658): Fimbrial Usher proteins domain identified by PFam, accession name Usher, E-value=1.5e-130, PFam score of 447.1

SEQ ID NO: 48691 - protein, 124 aa, Homo sapiens
  misc_feature (1)...(124): Xaa = X or * as defined in Table 2
MKTCWQILEIESTTQIDIIRQAYLARLPLCHPETDPQGFKALRQAYEEALRLAVNPVEEADDEEKDAAAEHEILRAFRTFTGFRKXSFSAFRLAEIYSAIKYLEHGGCRSITLAAVCNRHRSAI

SEQ ID NO: 48692 - protein, 403 aa, Homo sapiens
  misc_feature (1)...(403): Xaa = X or * as defined in Table 2
LRRSCNAVYCWXCVATCPSGEEDGIVLIDQDKCRGWRMCITGCPYKKIYFNWKSGKSEKCIFCYPRIEAGQPTVCSETCVGRIRYLGVLLYDADAIERAASTENEKDLYQRQLDVFLDPNDPKVIEQAIKDGIPLSVIEAAQQSPVYKMAMEWKLALPLHPEYRTLPMVWYVPPLSPIQSAADAGELGSNGILPDVESLRIPVQYLANLLTAGDTKPVLRALKRMLAMRHYQRAETVDGKVDTRALEEVGLTEAQAQEMYRYLAIANYEDRFVVPSSHRELAREAFPEKNGCGFTFGDGCHGSDTKFNLFNSRRIDAIDHQQEMFEAIAASKNLPKEDAHALGIFLRDLTTMDPLDAQAQYSELFDRGRATSLLLFEHVHGESRDRGQAMVDLLAQYEQHGLQ

SEQ ID NO: 48693 - protein, 286 aa, Homo sapiens
  misc_feature (1)...(286): Xaa = X or * as defined in Table 2
WPLRRSPYSIINGSGKSAASGSVMQVAQFNSHYQYDPKFERGMYLYEHRRCFNNIIDYCNSLCYHAWLVAHKDDIERNYRGPLVQVVGWCDAIFGAEELGISRAQFDQFLRMMQGGAQFGGGYQQQTGGGGRPGGHFFEKRRLLRMVDRLNARFTGGVLVSFKGPLLEGFGPWQGLSPWVIGPDLGLPGCLGAWGAVSVCHCPWVCKTGSPFRWVPHRRFHPPPGXKFPENWMGFCSSRTCSGLFSHPHSPTMAFKNFELGHGTPPRGTRNRPTMSSNTYRPHRFQ

SEQ ID NO: 48694 - protein, 118 aa, Homo sapiens
  misc_feature (1)...(118): Xaa = X or * as defined in Table 2
CWRPLPAEKRWWYLAANWWRLAARFVFPMLCVRQXPSSMIWTTPDADIAIGTWRSCCAVLRGRKMPVSSITMRRRCYXCWRPLPAEKRWWYLAANWWRLAARFVFPMLCVRQAAPYTK

SEQ ID NO: 48695 - protein, 41 aa, Homo sapiens
  misc_feature (1)...(41): Xaa = X or * as defined in Table 2
ATYENMLANPRNXKHDANRHYPPGLSCSLTVVSSRNRSARV

SEQ ID NO: 48696 - protein, 41 aa, Homo sapiens; identical to SEQ ID NO: 48695
  misc_feature (1)...(41): Xaa = X or * as defined in Table 2

SEQ ID NO: 48697 - protein, 578 aa, Homo sapiens
  DOMAIN (289)..(301): 4FE-4S FERREDOXIN SIGNATURE domain identified by eMATRIX, accession number PR00353B, p-value=9.500e-10, raw score of 12.30
  DOMAIN (275)..(331): 4Fe-4S binding domain identified by PFam, accession name fer4, E-value=0.021, PFam score of 13.5
MKPNGGSRHNPLEAETIAAWLVAHKDDIERHYGEPLYKVVGVVTPFSAQVNAIKMSLRNVEINGKDEQGLLTVGTVHSLQGAERAIVLFSPVYSKHEDGRFLDSNSTILNVAVSRAKDSFLVFGDMDLSRCTRIFASENDRFISHITISRSWCEHMMISEDPGWIRKINGKLQPRMGNRAMLLGKIFANPHLPGIDDYYEPFDFDYQNLHTAPEGSKSQPIARPRSLITGERMAKIEKGPNWEDDLGGEFDKLAKDKYFDNIQKAMYSQFENTFMMYLPRLCEHCLNPACVATCPSGAIYKREEDGIVLIDQDKCRGWRMCITGCPYKKIYFNWKSGKSEKCIFCYPRIEAGQPTVCSETCVGRIRYLGVLLYDADAIERRLYWQSSQCEDNTSLREALTLYKYDSAGSRMFEELAAGSDRFYATLPWQPLTVQSECPVTLKDAYLARLPLCHPETDPQGFKALRQAYEEALRLAVNPVEEADDEEKDAAAEHEILRAFRTLLDSESDRFQPSAWQKFIQQLNTWNMEDVDQLRLALCCIAIEARYLSLDCASLRADRLNWHSFNDSEEWIRKKEGFS

SEQ ID NO: 48698 - protein, 207 aa, Homo sapiens
  misc_feature (1)...(207): Xaa = X or * as defined in Table 2
RQKRLIFCCVKGKNWPPXWRWLNEKLPCSLMLLPTLPPSVLGIRLQNQLQRQFVRQGGVWMPGDEVKKVTCKNGVVNEIWTRNHADIPLRPRFAVLASGSFFSGGLVAERNGIREPILGLDVLQTATRGEWYKGDFFAPQPWQQFGVTTDETYARHRQGKPLKTCLPSVRCWADLIPSPRDAAAVFVPSVLYMPLNRLPNAQEANNE

SEQ ID NO: 48699 - protein, 1766 aa, Homo sapiens
  DOMAIN (655)..(683): Zinc-containing alcohol dehydrogenases proteins domain identified by eMATRIX, accession number BL00059B, p-value=2.286e- 22, raw score of 16.08
  DOMAIN (613)..(945): Zinc-binding dehydrogenases domain identified by PFam, accession name adh_zinc, E-value=4e-68, PFam score of 239.7
MAWLLIIYILPLVGIIAYLAVGELHLGKRRAEAHLRLWPSTAKWLNDLKACKHIFAEENSSVAAPLFKLCIASSGDSLEVKGNQLQLMTESDDVMQALIRDIQLARHNIEMVFYIWQPGGMGGPVRIPRLSWCYVRHQMKRQPGFSRQSAGGKTGGLRDLDPRRYLSLLLGSLIIHIKPRNFWFYLLHTETQITSHGSTHLYADPATLQHFRFCRIIRRAGTFTICPRDQAFAFDFQQNQHDLNLTWQIKDGYYLYRKQIRITPEHAKIADVQLPQRPGMKMSFTQKQDLPASADASRHHQPGNAGARFLSKTLYGALEHNFTDAWSGFVRGYGYDNRTNYDAYYSPGSPLLDTRKLYSQSWDAGLRYNGELIKSQLITSYSHSKDYNYDPHYGRYDSSATLDEMKQYTVQWANNVIVGHGSIGAGVDWQKQTTTPGTGYVEDGYDQRNTGIYLTGLQQVGDFTFECAARSDDNSQFGRHGTWQTSAGWEFIEGYRFIASYGTSYKAPNLGQLYGFYGNPNLDPEKSKQLEGAFECLTAGVNWRISGYRNDVSDLIDYDDHTLEYLQLRTHPGRVSTVKVFYCRNFEKNCADLTNIIRKGGTMKAAVVTKDHHVDVTYKTLRSLKHGEALLKMQCCGVCHTDLHVKNGDFGDKTGVILGHEGIGVVAEVGPGVTSLKPGDRASVAWFYEGCGHCEYCNSGNETLCRSVKNAGYSVDGGMAEECIVVADYAVKVPDGLDSAAASSITCAGVTTYKAVKLSKIRPGQWIAIYGLGGLGNLALQYAKNVFNAKVIAIDVNDEQLKLATEMGADLAINSHTEDAAKIVQEKTGGAHAAVVTALMLSVQAVVLWLSVTAGVYEPGYPRLVLDCIEVVGLILCNMMSIPRRRSVMANHRGGSGNFAEDRERASEAGKKGGQHSVGNFKNDPQRASEAARQKAITAGYPVVDTDDKCVRRYATNRKHLSKHHFNPALFGPMLPYPGFLNSHFQLTCLQYKNDYPDDYNEKAEQELTANEIFMQYVLPNKLLWYIAIANVFVYLLRYGILDWSPTYLKEVKHFALDKSSWAYFLYEYAGIPGTLLLPWQPWGNRRFLYDTGDHRDYRLLDEPGSNPTVDMICMIVIGFLINGPVMLIGLHALELAPKKAAGTAAGFTGLFGYLGRSVAPARFVGYTWTSSAGMAALWSIYNVPLVTIIIMGFFFPRIPALAAKVAMGIGIISYITINYLVKFDFHFLYVLACTFCINVVVMLVIGFIKPRATPFTFKDAFAVDMKPWKNVKIASIGILFAMIGVYAGLAEFGGYGTRCGKPRNTQNIDNLAAEGIRLIPPTPFTGCTPERAGLLPVSSLTVPPLDNNFAQQKHPHMGPYLRRPTDHPALENVNFALKPGQMLGICGPTGSGKSTLLSLIQRHFDVSEGDIRFHDIPLTKLQLDSWRSAWRYVSQTPFLFSDTVANNIALGCPNATQQEIEHVARLASVHDDILRLPQVTDTEVGERGVMPSGGQKQRISIARALLVNAEILILDDALSAVDGRTEHQILHNLRQWGQGRTVIISAHRLSALTEASEIIVMQHGHIAQLAIMMCWTTKRLFRMAIEQQGNVSLRSGRHNGDRFRTFTQRFRHQLYRRTVLRCECRFRSPDSPLYGKAHFVGHHHHGHSFVRQFHHHVQYSLIISGSSADVVRRKLIGVSRKPDTLQQFQGFFTSRRFIAFKHFHLRQGQVFDNRQMREQLEMLEYHPDAGTQLCQIGFLVVNHDTIDGDFTLLHRFEAVDGFNQR

SEQ ID NO: 48700 - protein, 59 aa, Homo sapiens
TGIRNCAPLSLTWKSKTANRKVRCGTSAIRWLTVRKPQTVKIIWWSRLPVQKPCWAILA

SEQ ID NO: 48701 - protein, 331 aa, Homo sapiens
  DOMAIN (241)..(282): glpT family of transporters proteins domain identified by eMATRIX, accession number BL00942G, p-value=9.000e-40, raw score of 18.21
RCEVACPSDVKIGDIIQRARAKYDTTRPSLRNFVLSHTDLMGSVSTPFAPIVNTATSLKPVRQLLDAALKIDHRRTLPKYSFGTFRRWYRSVAAQQAQYKDQVAFFHGCFVKNNHPQLAEQELPAKQIFMQYVLPNKLLWYIAIANVFVYLLRYGILDWSPTYLKEVKHFALDKSSWAYFLYEYAGIPGTLLCGWMSDKVFRGNRGATGVFFMTLVTIATIVYWMNPAGNPTVDMICMIVIGFLIYGPVMLIGLHALELAPKKAAGTAAGFTGLFGYLGGSVAASAIVGYTVDFFGWDVGFMLSHELWESEFTKLKYEYNNSCPASVSGWL

SEQ ID NO: 48702 - protein, 436 aa, Homo sapiens
  DOMAIN (46)..(63): Electron transfer flavoprotein beta-subunit proteins domain identified by eMATRIX, accession number BL01065B, p-value=6.657e- 15, raw score of 11.95
  DOMAIN (13)..(282): Electron transfer flavoprotein beta subunit domain identified by PFam, accession name ETF_beta, E-value=1.4e-06, PFam score of - 22.1
MNDVSFMISGDAMKIITCYKCVPDEQDIAVNNADGSLDFSKADAKISQYDLNAIEAACQLKQQAAEAQVTALSVGVISSSDSTQGCQHPIFGIFLHEVAMMSHLPVAKKHFVEFRYDLHGELAVTENQSRDKFYRQAEGEDLPGYVSNDLPAIAGIAVAPFQVGNLDADRRSNVHCRVSFRIRTRSERSSLPELPALLSGAANESDEAPTPAEEPHQPFLDFAEQILPQSVSRAAITAAYRRPETEAVSMLLEQARLPQPVAEQAHKLAYQLADKLRNQKNASGRAGMVQGLLQEFSLSSQEGVALMCLAEALLRIPDKATRDALIRDKISNGNWQSHIGRSPSLFVNAATWGLLFTGKLVSTHNEASLSRSLNRIIGKSGEPLIRKGVDMAMRLMEIKYLILRHGFGEMLRKLVTDICEFMTITAHLMRKYDTMV

SEQ ID NO: 48703 - protein, 88 aa, Homo sapiens
  misc_feature (1)...(88): Xaa = X or * as defined in Table 2
PRQCGFMKKRLENGDDYFAVNPRGRCLHCCWMTVLCXRKRSDYAVSCRQRPRPPVLAPVNSISRSVSPYTPEEYKPTVRAQLEKNCNM

SEQ ID NO: 48704 - protein, 42 aa, Homo sapiens
NHRMAELHRHRAAKGFTPLFRPDTPEEYKRQFARSWRRSCNM

SEQ ID NO: 48705 - protein, 1269 aa, Homo sapiens
  DOMAIN (708)..(748): Gamma-glutamyltranspeptidase proteins domain identified by eMATRIX, accession number BL00462D, p-value=5.781e-33, raw score of 23.07
  DOMAIN (427)..(865): Gamma-glutamyltranspeptidase domain identified by PFam, accession name G_glu_transpept, E-value=1.2e-48, PFam score of 175.0
MTYRNNHQTGVAFLFQTKFCIEDGGVKTFDGYRVQTQSRHAEQEVTDVEINLFCHPLCIIMQIFTVHISEELATFIVRGFRFRRGKAAIGIFLVNNQLQPDIVHRGFCTEHHDVRGIKHFTLVEHVITGSGFGNTRFTFFRAGNNKMPRLGVGAGWAVLQGVPVRFGVWPLPEYPAYACGKFNGAIRAGDAAQLAAYAQAFIQLHGPIDAGDGVNRADHRAGDFFEIVFQNLFAIADVDLAINHAVNAQLRLRNPLFVFAIFCFDVILDGVAVKAIRQGDPFNPLAQFIFLMLLWGVALIVRRMPGRFSALMLIVLSLTVSCRYIWWRYTSTLNWDDPVSLVCGLILLFAETYAWIVLVLGYFQVVWPLNRQPVPLPKDMSLWPSVDIFVPTYNEDLNVVKNTIYASLGIDWPKDKLNIWILDDGGREEFRQFAQNVGVKYIARTTHEHAKAGNINNALKYAKGEFVSIFDCDHVPTRSFLQMTMGWFLKRKEGGGKRKQKKRQLGPGTRANASESALRRVLHPRIQLVEGRPNIALEERPERHTATCKSRNDAKRPDDFIRHDCGQIAQEMQKNGGLITKEDLAAYKAVERTPISGDYRGYQVYSMPPPSSGGIHIVQILNILENFDMKKYGFGSADAMQIMAEAEKYAYADRSEYLGDPDFVKVPWQALTNKAYAKSIADQIDINKAKPSSEIRPGKLAPYESNQTTHYSVVDKDGNAVAVTYTLNTTFGTGIVAGESGILLNNQMDDFSAKPGVPNVYGLVGGDANAARAEQTPAVVDVADHCGERRPGPALDDTFARRRNGARPDRLNAANNRRSDQNLRHWAKFGIEKANHAFVTGKQIRHVLSREMVNGEEIARHVDHLTQNTVARHVYAVVVTRGEVSGHKRTVAEQVRHQIVACQQGFEAVVVAFGLQDFIFFDFTQLADNAIGRHDQYIRIGIDWAYFVTQRTDKEFVKGAVAGGVRLLRLFHVDLVVFNEQIDNQFCQPSCPLACAPTRQASKPLRLDKITSFSHPEIGTVVRFLPDKTYAILTFSHTFLRHKYPCRRNQRFAIKQQWSLSYPPIDQMLKHRYANTEVKVTHSTLNKRNCKQHNKEPRMEMLEEHRCFEGWQQRWRHDSSTLNCPMTFSIFLPPPRDHTPPPVLYWLSGLTCNDENFTTKAGAQRVAAELGIVLVMPDTSPRGEKVANDDGYDLGQGAGFYLNATQPPWATHYRMYDYLRDELPALVQSQFNVSDRCAISGHSMGGHGALIMALKNPGKYTSVSALRQL

SEQ ID NO: 48706 - protein, 731 aa, Homo sapiens
  DOMAIN (620)..(635): GLYCOSYL HYDROLASE FAMILY 1 SIGNATURE domain identified by eMATRIX, accession number PR00131A, p-value=1.563e-11, raw score of 12.98
  DOMAIN (531)..(719): Glycosyl hydrolase family 1 domain identified by PFam, accession name Glyco_hydro_1, E-value=1.3e-43, PFam score of 155.2
MDKGIDALFHRDRVNNAFALDTLQTFFNDALAFSATLGCFWMILAWIFIPLEHPRWQRIRAEHKNLYPHINASRPRPLDPVRYLIQTCWLLIGASRKETPKPRRRAFSGLQNIRGRYHQWMNELPERVSHKTQHLDEKKELGHLSAGARRLILGIIVTFSLILALICVTQPFNPLAQFIFLMLLWGVALIVRRMPGRFSALMLIVLSLTVSCRYIWWRYTSTLNWDDPVSLVCGLILLFAETYAWIVLVLGYFQVVWPLNRQPVPLPKDMSLWPSVDIFVPTYNEDLNVVKNTIYASLGIDWPKDKLNIWILDDGGREEFRQFAQNVGVKYIARTTHEHAKAGNINNALKYAKGEFVSIFDCDHVPTRSFLQMTMGWFLKEKQLAMMQTPHHFFSPDPFERNLGRFRKTPNEGTLFYGLRQSWEFNARGLELVKEGRAQACVSAGNTGALMGLAKLLLKPLEGQNHRMLLRWEAKLAALVRLQENTAQPVPFAPNNARPLTLEDDRLSCTVRGYNFAITFSKMSGKPTSWQLVASALATKIAHEVNPQNQVGCMLAGGNFYPYSCKPEDVWAALEKDRENLFFIDVQARGTYPAYSARVFREKGVTINKAPGDDEILKNTVDFVSFSYYASRCASAEMNANNSSAANVVKSLRNPYLQVSDWGWGIDPLGLRITMNMMYDRYQKPLFLVENGLGAKDEFAANGEINDDYRISYLREHIRCNGRSDCRQAFR

SEQ ID NO: 48707 - protein, 189 aa, Homo sapiens
  misc_feature (1)...(189): Xaa = X or * as defined in Table 2
SCRSAPRNRHQIPGTYRSRLPRHTTPPGYDHNRKNPNLYISTRQKRDAFFAVQYHSLLYYRQTLLPNDHNQSVDRXFVFRLXNQNGYNSGRHLYWRYHSYNAWLXLCHRHPVYYRLYYIFLQPVQMQMPQCPSPLMPECSFSFSFLILINASNIQRESPVENRKVFNLRLLKIYYRLIIFLKCGNLLNL

SEQ ID NO: 48708 - protein, 702 aa, Homo sapiens
  DOMAIN (41)..(60): ECOLI/SALMONELLA-TYPE PORIN SIGNATURE domain identified by eMATRIX, accession number PR00183B, p-value=1.581e-23, raw score of 10.98
  DOMAIN (17)..(104): General diffusion Gram-negative porins domain identified by PFam, accession name Gram-ve_porins, E-value=2.3e-45, PFam score of 150.3
MGIVASASVQAAEIYNKDGNKLDVYGKVKAMHYMSDNASKDGDQSYIRFGFKGETQINDQLTGYGRWEAEFAAWTDMFPEFGGDSSAQTDNFMTKRASGLATYRKTTSSAYRWPELNLQYHRCTSAARAMLLSGRPVMQINERTAVRRQMTVYLRVERIHEIDPLVSLSHSMSVIPIDVERPIAAAPCTPGLWRTKTPLRVPSTYPLRLPGRARVVCHRTFRLHLCKDWVFMFSGLLIILVPLIVGYLIPLRQQAALKVINQLLSWMVYLILFFMGISLAFLDNPRPYLADSVPDRQLLAPVNSISRYKTIEWLNYIATELHKGFTPLFRPDTPEEYKPTVRAHSEKKLQYVNEALKDEHWICGQRFTIADAYLFTVLRWAYAVKLNLEGLEHIAAFMQRMAERPEVQDALSAEGLKGSRHLSAGARRLILGIIVTFSLILALICVTQPFNPLAQFIFLMLLWGVALIVRRMPGRFSALMLIVLSLTVSCRYIWWRYTSTLNWDDPVSLVCGLILLFAETYAWIVLVLGYFQVVWPLNRQPVPLPKDMSLWPSVDIFVPTYNEDLNVTPDELKQVLDVAAALKALRAENISTKVFNSGLGISVFRDNSTRTRFSYASALNLLGLAQQDLDEGKSQIAHGETVRETANMISFCADAIGIRDDMYLGAGNAYMREVGAALDDGYKQGVLAQRPGFREPGMAELT

SEQ ID NO: 48709 - protein, 173 aa, Homo sapiens
ASRIALVAPSLSSRRNSMFFSTSVRPFSSADCSASTPLAAGRLPSALRSKEEIGVRMPPALPLHTVRARIICGFRLVSETGSGSSSSDLTSASGASQWGNSSRSHWLKRWCASCSSAPEISNWQLSPASVSVPISARALLALPLRSVRRLCHSICDGILIFPACCSSLPPKAV

SEQ ID NO: 48710 - protein, 77 aa, Homo sapiens
MMGFDGTVQYMASLGAPMPMLAAMYCGSYGSARRDINRAWLFHPSAGGAVYFLHAGYGGDWSPLLGYDRRCGWAKYD

SEQ ID NO: 48711 - protein, 653 aa, Homo sapiens
MDNPTGDQHLFSKRQTPQRKNLHRFGKLSCGTSTHIYGLVNNPFGIKITTLKIISVNNWCNWQRKLPSTSLFHSSPNPPNSSLHATTITPQFLKVPIVARPVGGSYEIWPVRGSTVSGNYQARYVYVKVVRGVWSRLGHKTKVCGDNDGSMCTSRAIPNTGYPTDNRRIPLTVPHGTPHRAKHRSPQRTAMPTGDPGDPAWPTAPRHPHGQRASTTPTDTQGHDNTRPTRPARRDTPAPTRQHPSTTPILSFVKPGGFRTSLLLSTVAWSPPPSHHGEAPRLGPAKERVSAEPGDPRFGLQSPQFMLNPANLPQNVGAVHRGSPALYRIHSPAPRYRKRWPMAAHIAYVTRVRAHPRYTCYQCAIRPIIAHIVPLPLIRSSAPSSSYCRYRAWSHVCVQVTRLRTQCSSPVYWSFHTRVFFVFKTSLSRNKHITVNSGSAPLHSMRLTCSTVYNCLGISVMPANEAGCCGAVDYHLNAQEKGLARARNNIDAWWPAIEAGAEAILQTASGCGAFVKEYGQMLKNDALYADKARQVSELAVDLVELLREEPLEKLAIRGDKKLAFHCPCTLQHAQKLNGEVEKVLLRLGFTLTDVPDSHLCCGQEEAQKNNWSVSIAVADDGGHLLALSRMDDCAPIAAYISPGESAYRRAGAS

SEQ ID NO: 48712 - protein, 121 aa, Homo sapiens
  misc_feature (1)...(121): Xaa = X or * as defined in Table 2
FSAIKSSPKAQALWHVLHYXAVNXTNIFKTEKPIFNRGKRFRPTPTRQLRECWIVWGSASCQLTKQAVVARWTIILMRRRKGWHGRAIILMPGGPRLKQVPRQFCKPPAAAARLSKSMGRC

SEQ ID NO: 48713 - protein, 276 aa, Homo sapiens
MPRAALQDAPRAVHGDKYAGQEEAQKNNWSVSIAVADDGGHLLALSRMDDCAPIAAYISQEKARTAALGRRETKGYDNDMIQSMLDRIELTVFVDNAPAIKVYKKYGFEIEGTGKKYALRNGEYVDAYYMARVNKIRLHGHVILITNKPTLTGSLEKVREQVQAAHALGLTAVISSSIESSLGLTQLARIAAWLTPDTIPGLDTLDLMQAQQAMCLLICAEMYQVSRLQHICELFIITQLQSMPSRELASMNLDIVDLLKKAKVFKTGDLIMGMHD

SEQ ID NO: 48714 - protein, 441 aa, Homo sapiens
MMQKPATVDEEESPRETHRYSVRRRGELIVEAGGRAENTVVTGAGWLKVATGGIAKCTQYGNNGTLSVSDGAIATDIVQSEGGAISLSTLATVNGRHPEGEFSVDKGYACGLLLENGGNLRVLEGHRAEKIILDQEGGLLVNGTTSAVVVDEGGELLVYPGGEASNCEINQGGVFMLAGKASDTLLAGGTMNNLGGEDSDTIVENGSIYRLGTDGLQLYSSGKTQNLSVNVGGRAEVHAGEVTGDIHVEITDASRQTLCNALKLQPDEGGSSRVIPTCKASRLRIDANFKRFVDEEVLPGTGLDAAAFWRNFDEIVHDLAPENRQLLAERDRIQAALDEWHRSNPGPVKDKAAYKSFLRELGYLVPQPERVTVETTGIDSEITSQAGPQLVVPAMNARYALNAANARWGSLYDALYGSDIIPQEGAMVSGYDPQREAMECP

SEQ ID NO: 48715 - protein, 1641 aa, Homo sapiens
  DOMAIN (607)..(627): w LOW TRANSPOSASE SAPA 12K domain identified by eMATRIX, accession number DM00475B, p-value=1.300e-15, raw score of 12.12
  DOMAIN (1416)..(1620): RNA polymerase alpha subunit domain identified by PFam, accession name RNA_pol_A, E-value=6.3e-133, PFam score of 374.2
  misc_feature (1)...(1641): Xaa = X or * as defined in Table 2
XHRRMTRDNPSIPRFIHRREVVFIGQENGGIQNARFIAALFFQHGVNLCQRVGGLLKGIGVEVFRYTSVVERVVVDYYIRPAGFSIDTNDRGSVTDDFAPDGQLAKAIPGFKPREPQRQMAVAVTQAIEKGQPLVVEAGTGTGKTYAYLAPALRAKKKVIISTGSKALQDQLYSRDLPTVSKALKYTGNVALLKGRSNYLCLERLEQQALAGGDLPVQILSDVILLRSWSNQTVDGDISTCVSVAEDSQAWPLVTSTNDNCLGSDCPMYKDCFVVKARKKAMDADVVVVNHHLFLADMVVKESGFGELIPEADVMIFDEAHQLPDIASQYFGQSLSSRQLLDLAKDITIAYRTELKDTQQLQKCADRLAQSAQDFRLQLGEPGYRGNLRELLANPQIQRAFLLLDDTLELCYDVAKLSLGRSALLDAAFERATLYRTRLKRLKEINQPGYSYWYECTSRHFTLALTPLSVADKFKELMAQKPGSWIFTSATLSVNDDLHHFTSRLGIEQADSCSIGNSYVFRLVIGEQMIDVLGPEKRRRRTTQEKIAIVQQSFEPGMTVSLVARQHGVAASQLFLWRKQYQEGSLTAVAAGEQVVPASELAAAMKQIKELQRLLGKKTMENELLKEAVEYGRAKKWIAHAPLLPGDGERTDESRHFCSMCGPKFCSMKISQEVRDYAATQTIEMGMADMSENFRARGGEIYLRLYPVVDSVQWIERLLDAGVRTLQLRIKDRRDEEVEADVVAAIALGRRYNARLFINDYWRLAIKHQAYGVHLGQEDLQATDLNAIRAAGLRLGVSTHDDMEIDVALAARPSYIALGHVFPTQTKQMPSAPQGWNSWHGMLSDWRIIPPWRLAPPNPARRYRSGRAAKLLDSQEKSGTAALERRETKGYEEMVNNGRTAFVTAPLLTSLEGGVPVVVDGQIIGAVGVSGLTGAQDAQSRLRIDANFKRFVDEEVLPGTGLDAAAFWRNFDEIVHDLAPENRQLLAERDRIQAALDEWHRSNPGPVKDKAAYKSFLRELGYLVPQPERVTVETTGIDSEITSQAGPQLVVPAMNARYALNAANARWGSLYDALYGSDIIPQEGAMVSGYDPQRGEQVIAWVRRFLDESLPLENGSYQDVVAFKLQIDANGRIGKNDPAHINDVIVEAAISTILDCENSGRAVNPEIKSVVPHLLGLIKGLFKRNGEKRSPIVGKLITIAINITCRSFQNCSGFATMIRSWSFGEVKKPETINYRTFKPERDGLFCARIFGPVKDYECLCGKYKRLKHRGVICEKCGVEVTQTKVRRERMGHIELASPTAHIWFLKSLPSRIGLLLDMPLRDIERVLYFESYVVIEGGMTNLERQQILTEEQYLDALEEFDGGGTIQALLKSMDLEQECEQLREELNETNSETKRKKLTKRIKLLEAFVQSGNKPEWMILTVLPVLPPDLRPLVPLDGGRFATSDLNDLYRRVINRNNRLKRLLDLAAPDIIVRNEKRMLQEAVDALLDNGRRGRAITGSNKRPLKSLADMIKGKQGRFRQNLLGPYLRLHQCGLPKKMALELFKPFIYGKLELRGLATTIKAAKKMAFEPVMIEGKAIQLHPLVCAAYNADFDGDQMAVHVPLTLEAQLEARALMMSTNTTWGPELDPDFKPTNQPTNYP

SEQ ID NO: 48716 - protein, 1190 aa, Homo sapiens
  DOMAIN (869)..(907): ELEMENT TRANSPOSABLE INSERTION PROTEIN TRANSPOSITION DNA domain identified by eMATRIX, accession number PD02455A, p-value= 1.500e-27, raw score of 25.65
  DOMAIN (1066)..(1190): Bacterial flagellin N-terminus domain identified by PFam, accession name Flagellin_N, E-value=7.3e-16, PFam score of 66.1
MARKRKSRNNSKIGHGAISRIGRPNNPFEPCRNRYAQKYLTLALMGGAAFFVLKGCSDSSDVDNDGDGTFYATVQDCIDDGNNADICARGWNNAKTAFYADVPKNMTQQNCQSKYENCYYDNVEQSWIPVVSGFLLSRVIRKDRDEPFVYNSGGSSFASRPVWVPSSIVIMSYGLASYVIAVAFLERDRIQAALDEWHRSNPGPVKDKAAYKSFLRELGYLVPQPERVTVETTGIDSEITSQAGPQLVVPAMNARYALNAANARWGSLYDALYGSDIIPQEGAMVSGYDPQRGEQVIAWVRRFLDESLPLENGSYQDVVAFKVVDKQLRIQLKNGKETTLRTPAQFVGYRGDAAAPTCILVKNNGLHIGVQIDANGRIVKQDPGHINDGIVETAISTILDCEDSVAAVDAEDKILLYRNLLGLMQGTLQEKMEKNGRQIVRKLNDDRHYTAADGSEISLHGRSLLFIRNVGHLMTIPVIWDSEGNEIPEGILDGVMTGAIALYDLKVQKNSRTGSVYIVKPKMHGPQEVAFANKLFTRIETMLGIRDLFLFQPLPKQHCLPADLGSNCGNLSNMFRLHCQNQIVISCHLSSELTSGMSFKRYAMISGNICRCRICRVFYQTMNTCRFDFYARQTFTQQALANGRTANVAGHAPRKSSVPAEKSHGSNEPAARNIGNRLLTRFADFAGDVRFLRSERRDADIDLRAFNDCGDVVITVIFLAVINPSAISIVVLPLSRITHSPEFRSEALKLAERIGVTAAARELSLYESQLYNWRSKQQNQQTSSERELEMSTEIARRDILREAPEMKYVFIEKHQAEFSIKAMCRVLRVARSGWYTWCQRRTRISTRQQFRQHCDSVVLAAFTRSKQRYGAPRLTDELRAQGYPFNVKTVAASLRRQGLRAKASRKFSPVSYRAHGLPVSENLLEQDFYASGPNQKWAGDITYLRTDEGWLYLAVAPSLEKFESSWDLARAFQPTGKSHPYTGNPREGPTKARKVTKGWEDRHFLLFFRADINGNRIFVAALLNGEFTVAGGDRRFRIVSGGARGQGLRLRQMGDADGVFPGDGVTRSGGTELRAKDDAAGQSIANRFTSNIKGLTQAARNANDGISVAQTTEGALSEINNNLQRVRELTVQATTGKTEAEAGGKCRSKCASIVLYKALFNSDKCSSAVHSRRSSIDLVHGRRQSRWLSL

SEQ ID NO: 48717 - protein, 504 aa, Homo sapiens
CFALVWGPRQIEAYRQNCWVEGFHFKRVSPLGQEEAQKNNWSVSIAVADDGGHLLALSRMDDCAPIAAYISQEKARTAALGRRETKGYEEMVNNGRTAFVTAPLLTSLEGGVPVVVDGQIIGAVGVSGLTGAQDAQSRLRIDANFKRFVDEEVLPGTGLDAAAFWRNFDEIVHDLAPENRQLLAERDRIQAALDEWHRSNPGPVKDKAAYKSFLRELGYLVPQPERVTVETTGIDSEITSQAGPQLVVPAMNARYALNAANARWGSLYDALYGSDIIPQEGAMVSGYDPQRGEQVIAWVRRFLDESLPLENGSYQDVVAFKVVDKQLRIQLKNGKETTLRTPAQFVGYRGDAAAPTCILRLSVAAITCSSSCLTNTDGEEFLCFNGKFQRQLREHVFAETVNNHRDGVFFADPALQAVKQLIFTNTAYTWRVADNNVQQEQPAQAENCPGEITTATVAKISECDLTSDDWNNEDHKRLMSWLHCLVPHHAKWLQRWQWQSAKVV

SEQ ID NO: 48718 - protein, 75 aa, Homo sapiens
  DOMAIN (33)..(66): Glycosyl transferase domain identified by eMATRIX, accession number PF00953C, p-value=6.420e-09, raw score of 19.70
  DOMAIN (22)..(75): Sodium:dicarboxylate symporter family domain identified by PFam, accession name SDF, E-value=2.6e-14, PFam score of 57.4
KDRKMTTQRSPGLFRRLAHGSLVKQILVGLVLGILLAWISKPAAEAVGLLGTLFVGALKAVAPILVLMLVMASIA

SEQ ID NO: 48719 - protein, 741 aa, Homo sapiens
  DOMAIN (46)..(73): PEP-utilizing enzymes phosphorylation site proteins proteins domain identified by eMATRIX, accession number BL00370D, p-value= 4.764e-13, raw score of 22.48
  DOMAIN (24)..(65): PEP-utilizing enzymes domain identified by PFam, accession name PEP-utilizers, E-value=4.3e-12, PFam score of 44.0
MMRTSGGTRDNESSSDDERERENRLSDEKSNEYANLVGGERYEPDEENPMLGFRGAGRYVSDSFLRLCSSLEIVKARETVALIQGLKHDLLADDTALRALIPQRLIAFDDAVRSTLKEEEKLVNSSDWGYDAQAFARWRPEYGYFAKQAGFTVKTSASLAALWQVVNQIGGKERYFFGNILWQTRALMDRAIGHKLAKGRPEREYLQTGDAVDSWKVIVVEPEKQLTLLFGMKAPGLGRLCFSLEDKGDYRTIDVRAFWHPHGNRAEREKPRFQPYSRRKSFIGQNMLLPMSIMPPVFRRVICPLGVARLGKFRDPVYLVCVFTRQIFRYYTSGDEFLQINTTGGEDIDDIDDIKLFVYEESYGISKESHWREAINAKAMGAMTLNWQEKRWQRFFNSEEPGNIEPVYMLEKVENQNHAKWEVHNFTMGYQRQVTEDTYEYLLLNVVGVPVPDNIHPMTKDEAGVWSWRTPILKGNLYEYFFNVDGVRSIDTGTAMTNPQRQVNSSMILVPGSYLDTRSVAHGDLIAITYHSNALQSERQMYVWTPPGYTGMGEPLPVLYFYHGFGDTGRSAIDQGRIPQIMDNLLAEGKIKPMLVVIPDTETDAKGIIPEDFVPQERRKVFYPLNAKAADRELMNDIIPLISKRFNVRKDADGRALAGLSQGGYQALVSGMNHLESFGWLATFSGVTTTTVPDEGVAARLNDPAAINQQLRNFTVVVGDKDVVTGKDIAGLKTELEREKN

SEQ ID NO: 48720 - protein, 155 aa, Homo sapiens
NLGVMERNERNITMNIKIAALALAIASGISAQWAIAADMPASPAPTIPVKQYVTQVNADNSVTFRYFAPGAKNVSVVVGVPVPDNIHPMTKDEAGVWSWRTPILKGNLYEYFFNVDGVRSIDTGTAMTNPQRQVNSSMILVPGSYLDTRSVAHGD

SEQ ID NO: 48721 - protein, 102 aa, Homo sapiens
RMYWIINDNIEFWPEHRKLISVHNADFNVVLTTPASRCLSLLLEAFPDVVAQQDFFTRVESWNILVNLGRTTVWMTYSWAFLGCCVCVVVVILKVTVSRFSG

SEQ ID NO: 48722 - protein, 228 aa, Homo sapiens
ELSCCVLFAPGGAKLVGCALGLSRSSTWREADQEGSQHRDEYSREVGGRYPSRWKVAESKRLRSDSLQAPLPQHLIGEDPRAWKSSQPLVAALRLPEMELPGGGCDNLKTCHTSHGSVMAETAVINHKKRKNSPRIVQSNDLTEAAYSLSRDQKRMLYLFVDQIRKSDGTLQEHDGICEIHVAKYAEIFGLTSAEARYERIIFRVTSSSSPADLVLHPLTSEASFANF

SEQ ID NO: 48723 - protein, 244 aa, Homo sapiens
MSSAAVTNNVLTPLPIVSQPCTKNCDAGPLDKRFELLNMLYFMYLPNRISFMRILLSLTLKINVLAVHSHHFMMYHTAQWRCPILRAYPGVSNIIHAAHQNDVNKLLFLGSSCIYPKLAKQPMAESELLQGTLEPTNEPYAIAKIAGIKLCESYNRQYGRDYRSVMPTNLYGPHDNFHPSNSHVIPALLRRFHEATAQNAPDVVVWGSGTPMREFLHVDDMAAASIHVMELAHEVWLENTQPML

SEQ ID NO: 48724 - protein, 260 aa, Homo sapiens
VTRCLSNLLETEIQFASIGATTKEDAAKTLEPLSAKYKNIAGVEEKLTYTDTYAQENVTIDMEKVDFKALQVFLGINVSAEDAKKGITMAQMELALCKFQLHVSGNKYTILLILTSINPGKSRKRECPVLRESNSTSERIDQVYLAAAKVGGIVANNTYPADFIYQNMMIESNIIHAAHQNDVNKLLFLGSSCIYPKLAKQPMAESELLQGTLEPTNEPYAIAKIAGIKLCESYNRQYGRDYRSVMPTNLYGPHDNFHPS

SEQ ID NO: 48725 - protein, 111 aa, Homo sapiens
ISCAGFWLLLSSRIKVTRPNNSRCLMRRVMRLIRPIRLNGKRPGPYPQRKTCSAAHSKKPDSSSSRLMIMTAINAAVAFQTISHTTGISPGWTTPVTNASTARRICSITAA

SEQ ID NO: 48726 - protein, 63 aa, Homo sapiens
GTTVECRYRSSVWFGAGSAGQQPSTACGHARIRQRNFKGAVAAHGGLRGPGDWCRRSGVFRSG

SEQ ID NO: 48727 - protein, 576 aa, Homo sapiens
  DOMAIN (249)..(274): ARSENICAL PUMP MEMBRANE PROTEIN SIGNATURE domain identified by eMATRIX, accession number PR00758A, p-value=3.571e-25, raw score of 10.62
  DOMAIN (153)..(292): Arsenical pump membrane protein domain identified by PFam, accession name ArsB, E-value=1e-92, PFam score of 321.4
IANSKFTPITFLCTYTFVKSYMFLTYPLRRETLPATIRSAICHFCYPSNCSKFLLIPPVWASFYCSANWESLCVCDLCTALDQSQPKISRHLALLRESGLLLDRKQGKWVHYRLSPHIPAWAAKIIDEAWRCEQEKVQAIVRNLARQNCSGDSAIFVLTIVLVIWQPKGLGIGWSATLGAVLALVTGVVHPGDIPVVWNIVWNATAAFIAVIIISLLLDESGFFEWAALHVSRWGNGRGRLLFTWIVLLGAAVAALFGNDGAALILTTIVIAMLLALGVSKGTTLAFVMAAGRQLEQRGDVELVLRTRDELNLLDSRAVHDFFASERIDQVYLAAAKVGGIVANNTYPADFIYQNMMIESNIIHAAHQNDVNKLLFLGSSCIYPKLAKQPMAESELLQGTLEPTNEPYAIAKIAGIKLCESYNRQYGRDYRSVMPTNLYGPHDNFHPSNSHVIPALLRRFHEATAQNAPDVVVWGSGTPMREFLHVDDMAAASIHVMELAHEVWLENTQPMLSHINVGTGVDCTIRELAQTIGKVVDTAKRFIANTIAMHQPDRRRDCPFPRVKRRVDGQLIRRGW

SEQ ID NO: 48728 - protein, 251 aa, Homo sapiens
RLFGGNYGWHFAPERRFTRIDRLPPYVFNITAELKMAARRRGEDIIDFSMGNPDGATPPHIVEKLCTVAQRPDTHGYSTSRGIPRLRRAISRWYQDRYDVEIDPESEAIVTIGSKEGLAHLMLATLDHGDTVLVPNPSYPIHIYGAVIAGAQVRSVPLVEGVDFFNELEVDVPASLSAMIFLLLPQLCFLAKATNPVINPLIPYYSPADLFHSFGTPACRSAKERDKPQYNNNWRLQHPTFSIGQIITAEN

SEQ ID NO: 48729 - protein, 106 aa, Homo sapiens
  DOMAIN (27)..(43): Orotidine 5'-phosphate decarboxylase proteins domain identified by eMATRIX, accession number BL00156, p-value=4.750e-16, raw score of 10.51
  DOMAIN (1)..(91): Orotidine 5'-phosphate decarboxylases domain identified by PFam, accession name OMPdecase, E-value=4.8e-32, PFam score of 113.8
  misc_feature (1)...(106): Xaa = X or * as defined in Table 2
DPRDCRLKVGKEMFTLFGPQFVRELQQRGFDIFLDLKFHDIPNTAAHAVAAAADLGVWMVNVHASGGARMMTAAREALVPFRPDAPLLIAVPVXRSIKASDLVVPL

SEQ ID NO: 48730 - protein, 55 aa, Homo sapiens
PCQWLLQLACPPFLWPLSTWVTPTSGCCWSLVCHHPLLIPFLVPTSLHIAPLFSF

SEQ ID NO: 48731 - protein, 98 aa, Homo sapiens
  misc_feature (1)...(98): Xaa = X or * as defined in Table 2
TDIITRQNGTGANIDAIEIIATKASTGLFVYQPRFARCPRVMSSGYHTATRGSSGTRTVRARVCHTAAGVYGSSKQTQFXNRFCQRKCRRYPDGCRRA

SEQ ID NO: 48732 - protein, 354 aa, Homo sapiens
  DOMAIN (106)..(130): PHOSPHOMANNOSE ISOMERASE TYPE I SIGNATURE domain identified by eMATRIX, accession number PR00714D, p-value=1.220e-25, raw score of 14.87
  DOMAIN (240)..(306): Orotidine 5'-phosphate decarboxylases domain identified by PFam, accession name OMPdecase, E-value=1.7e-15, PFam score of 56.6
MGRENAYARSVSRRYSHLPTERIDRGVYDLSVRKTVGVKFDVLSHIVDGQRLIIVFGNKAQHLANIKLRMARNIGMKVHPNKHNSEIGFAKENAAGIPMDAAERNYKDPNHKPELVFALTPFLAMNAFREFSEIVSLLQPVHIRRFAKNQARTPTAWATFTASAVDIIAVSVSIDVFFSPLARRSRKDRADRTTSNDFLKDYQVLRFRKKNSVFQRSPYRKFFYLFRATSGAHHQEGLVMTLTASSSSRAVTNSPVVVALDYHNRDDALAFVDKIDPRDCRLKVGKEMFTLFGPQFVRELQQRGFDDSRDPRTAGIINVWRTADDDVFTQTDFLTFNLTTLEIPGTGVHRTLCV

SEQ ID NO: 48733 - protein, 332 aa, Homo sapiens
  DOMAIN (71)..(97): RIBOSOMAL PROTEIN L6 SIGNATURE domain identified by eMATRIX, accession number PR00059A, p-value=3.045e-27, raw score of 11.29
  DOMAIN (11)..(107): Ribosomal protein L6 domain identified by PFam, accession name Ribosomal_L6, E-value=2.9e-41, PFam score of 145.6
MSRVAKAPVVVPAGVDVKINGQVITIKGKNGELTRTLNDAVEVKHADNTLTFGPRDGYADGWAQAGTARALLNSMVIGVTEGFTKKLQLVGVGYRAAVKGNVINLSLAILQTSTQGSEVCGPYLGIQRIAPTSQFPKPSATTEDAASKIALLSVELSSALDSIDVNKTTTDVSILNRSIITPGNNVLVNNTGGDLNIISSDSILNGATKLVSGTTTLKLSENTIWNMKDDSVVTHLTNSDSIINLSYDDGQTFTQGKTLTVKGNYVGNNGQLNIRTVLGDDKSATDRLIVEGNTSGSTTVYVKNAGGSGAATLNGIELITVNGDESPADAFR

SEQ ID NO: 48734 - protein, 334 aa, Homo sapiens
  DOMAIN (157)..(177): METHYLTRANSFERASE METHIONINE 5-METHYLTET domain identified by eMATRIX, accession number PD02509A, p-value=3.160e-22, raw score of 13.03
MLRVYHSNRLDVLEALMEFIVERERLDDPFEPEMILVQSTGMAQWLQMTLSQKFGIAANIDFPLPASFIWDMFVRVLPEIPKESAFNKQSMSWKLMTLLPQLLEREDFTLLRHYLTDDSDKRKLFQLSSKAADLFDHVSGASVSSKVEQLRAQLNERILVLDGGMGTMIQSYRLNEADFRGERFADWPCDLKGNNDLLVLSKPEVIAAIHNAYFEAGADIIETNTFNSTTIAMADYQMESLSAEINFAAAKLARACADEWTARTPEKPRYVAGVLGPTNRTASISPDVNDPAFRNITFDGLVAAYRESTKALVAGIVLMPAIPALWEAEPGGCA

SEQ ID NO: 48735 - protein, 79 aa, Homo sapiens
PGYLPHPDFLYWFVSRSALTDAVDPRYRRYQSVCADLPRVRRYLCGECAEHRGTDCGALRVQQLRILQQPYAVWSGTTG

SEQ ID NO: 48736 - protein, 297 aa, Homo sapiens
GPHPPAPGGPACHYDVHQPYLRQRTEDRRTRHYLAQSFAQYSLRQWAFHFLLDNITPDIQQIVIAHTRRTGGFTITASEAAIEMLLCFKRDFVALQHLFNQIDAPARAVQFIAQKLIGWACCEAARKNQLPHNTTKRSLLMSILYEERLDGALPDVDRTSVLMALREHVPGLEILPTDEEIIPYQCDGLSAYRTRPLLVVLPKQMEQVTAILAVCHRLRVPVMVFPGLRLSREAFLTTAEFGTQELRRPAQLRLQVYRLLSTAGRHHPAQNSPIRVLEVDIDLLGGTQELWGWKETH

SEQ ID NO: 48737 - protein, 257 aa, Homo sapiens
  DOMAIN (125)..(179): PAS domain identified by PFam, accession name PAS, E-value= 2.5e-07, PFam score of 32.3
  misc_feature (1)...(257): Xaa = X or * as defined in Table 2
ICSRCKSTRTSPTRCRKAIKVILVCFVIRELLVVAPELTIIGLPEGNWITVSKGMLAKSPVDSNSTQLKEAEEERLKAAQYGLQLVESQNELQNQLDKCRNEMMTMTEMQLRNKKRRRELGNLIKRFRSGAESLPDAVVLTTEEGGIFWCNGLAQQILGLRWPEDNGQNILNLLRYPEVYAISENAXFFSPAQSGAQHRAASGNSRHALYPQTVADGGAXCHANASTGRGAAXLFCQREPXVTYAIDRVTGLPGDDE

SEQ ID NO: 48738 - protein, 656 aa, Homo sapiens
  DOMAIN (106)..(146): ATP synthase gamma subunit proteins domain identified by eMATRIX, accession number BL00153B, p-value=4.857e-19, raw score of 29.84
  DOMAIN (57)..(235): ATP synthase domain identified by PFam, accession name ATP- synt, E-value=1.4e-78, PFam score of 274.5
RLAACLMAGRKALRRSSWPAQKRYVIRSQASKTRKRSLKRWRWSPLPKCVNRRIAWRPARPYAETMRKVIGHLAHGNLEYKHPYLEDRDVKRVGYLVVSTDRGLSGGLNITLFKKLLAEMKTWTDKGVQCDLAMIGSKGVSFFNSVGGNVVAQVTGMGDNPSLSELIGPVKVMLQAYDEGRLDKLYIVSNKFINTMSQVSTISQLLPLPASDDDDLKHKSWDYLYEPDPKALLEQCSCMLRSPAWGITSTDTTRARTDLACPIWLLLDPYPKLMGNAPKALASVDKRGVPVNTILVSALVTALCVLINYLAPESAFGLLMALVVSALVINWAMISLAHMKFRRAKQEQGVVTRFPALLYPLGNWICLLFMAAVLVIMLMTPGMAISVYLIPPLQTNTFNSTTIAMADYQMESLSAEINFAAAKLARACADEWTARTPEKPRYVAGVLGPTNRTASISPDVNDPAFRNITFDGLVAAYRESTKALVEGGADLILIETVFDTLNAKAAVFAVKTEFEALGVELPIMISGTITDASGRTLSGQTTEAFYNSLRHAEALTFGLNCALGPDELRQYVQELSRIAECYVTAHPNAGLPNAFGEYDLDADTMAKQIREWAQAGFLNIVRGCCGTTPQHIAEMSPGRKRLTPRRIELGTLDAAG

SEQ ID NO: 48739 - protein, 61 aa, Homo sapiens
GGQLSSWAMDFCHLPAFWNSMTWHLQRLWGACGYFWHAQWERLLTTFEGNEWILIFIGGIL

SEQ ID NO: 48740 - protein, 75 aa, Homo sapiens
  DOMAIN (14)..(42): !!!! PROTEIN ALU SUBFAMILY WARNING ENTRY NUCLEAR PHOSPHO domain identified by eMATRIX, accession number PD02454B, p-value= 3.089e-22, raw score of 11.61
SQHFGRPRWANHLSSGVQDQPGQHGKTLPLLKIQKLAGHGGACLEENCLNLGGRGYSEPRLHHCTPAWATEQDSA

SEQ ID NO: 48741 - protein, 124 aa, Homo sapiens
MPYRGSSRVACQEGKLSGSGVVAPDERLPFAQTAVMGVQHSVAMFGATVLMPILMGLDPNLSILMSGIGTLLFFFITGGRVPSYLGSSAAFVGVVIAATGFNGQGINPNISIALGGIIACGLDE

SEQ ID NO: 48742 - protein, 63 aa, Homo sapiens
RKLRYLAVWVYKEARRRWEGRGRFAPRTLTKVLHDYLMGPLPQSRVCSAVFGTQSNFLNPDRC

SEQ ID NO: 48743 - protein, 49 aa, Homo sapiens
  DOMAIN (16)..(38): TRANSFORMING PROTEIN P21 RAS SIGNATURE domain identified by eMATRIX, accession number PR00449A, p-value=7.000e-15, raw score of 13.20
SEPSRVRMDEDALTTLKILIIGESGAGKSSLLLSFTDNTFDPELLLASL

SEQ ID NO: 48744 - protein, 93 aa, Homo sapiens
DARIPRKPRNALCSRFAQDLWLEQNIKDSFQKVTLSRYGKYGHKNLQLRKGCKSVDECKGHQGGYNGLNQCLKITTSKIFQCNKYVKVMHKFS

SEQ ID NO: 48745 - protein, 632 aa, Homo sapiens
  DOMAIN (18)..(57): PROTEIN ZINC FINGER ZINC-FINGER METAL-BINDING NU domain identified by eMATRIX, accession number PD01066, p-value=6.182e-36, raw score of 19.43
  DOMAIN (157)..(627): Zinc finger, C2H2 type domain identified by PFam, accession name zf-C2H2, E-value=2.5e-124, PFam score of 426.4
QNILLGPKTLTSLGPLQFRDVAIEFSLEEWHCLDTAQRNLYRNVMLENYRNLGFLGIVVSKPDLIAHLEQGKKPLTMKRHEMVANPSVICSHFAQDLWPEQNIKDSFQKVILRRYEKRGHGNLQLIKRCESVDECKVHTGGYNGLNQCSTTTQSKVFQCDKYGKVFHKFSNSNRHNIRHTEKKPFKCIECGKAFNQFSTLITHKKIHTGEKPYICEECGKAFKYSSALNTHKRIHTGEKPYKCDKCDKAFIASSTLSKHEIIHTGKKPYKCEECGKAFNQSSTLTKHKKIHTGEKPYKCEECGKAFNQSSTLTKHKKIHTGEKPYVCEECGKAFKYSRILTTHKRIHTGEKPYKCNKCGKAFIASSTLSRHEFIHMGKKHYKCEECGKAFIWSSVLTRHKRVHTGEKPYKCEECGKAFKYSSTLSSHKRSHTGEKPYKCEECGKAFVASSTLSKHEIIHTGKKPYKCEECGKAFNQSSSLTKHKKIHTGEKPYKCEECGKAFNQSSSLTKHKKIHTGEKPYKCEECGKAFNQSSTLIKHKKIHTREKPYKCEECGKAFHLSTHLTTHKILHTGEKPYRCRECGKAFNHSATLSSHKKIHSGEKPYECDKCGKAFISPSSLSRHEIIHTGEKP

SEQ ID NO: 48746 - protein, 80 aa, Homo sapiens
  misc_feature (1)...(80): Xaa = X or * as defined in Table 2
LFRREGSYDRYLLMDDYCRRKDDSYFDRYRDSFDGRGPPGPESQSRAKGKVAETVYSYYXXNTLQKREETNNQYPHLKKG

SEQ ID NO: 48747 - protein, 198 aa, Homo sapiens
PFTEISFDGRGPPGPESQSRAKERLKREERRREELYRQYFEEIQRRFDAERPVDCSVIVVNKQTKDYAESVGRKVRDLGMVVDLIFLNTEVSLSQALEDVSRGGSPFAIVITQQHQIHRSCTVNIMFGTPQEHRNMPQADAMVLVARNYERYKNECREKEREEIARQAAKMADEAILQERERGGPEEGVRGGHPPAIP

SEQ ID NO: 48748 - protein, 75 aa, Homo sapiens
  DOMAIN (24)..(36): ABC transporters family proteins domain identified by eMATRIX, accession number BL00211A, p-value=3.647e-10, raw score of 12.23
TKEKKQETFENISVKFGGGNRYGLIGANGSGKSTFMKILGGDLEPTLGNVSLDPNERIGKLRQDQFAFEEFTELE

SEQ ID NO: 48749 - protein, 130 aa, Homo sapiens
  DOMAIN (44)..(56): ABC transporters family proteins domain identified by eMATRIX, accession number BL00211A, p-value=3.647e-10, raw score of 12.23
CAVCHISFQDTPVLVSSNVTMQFGSKPLFENISVKFGGGNRYGLIGANGSGKSTFMKILGGDLEPTLGNGSLDPNERIGKLRQDQFAFEEFTVLDTVIMGHKELWEVKQERDRIYALPEMSEEDGYKVAD

SEQ ID NO: 48750 - protein, 159 aa, Homo sapiens
IASTLKSASLSDIEMRGFTFDQKRQILHLQLRAANFASFDKLRSVLATDNVVHQDALQKEAVVFLFSVGYYVLIWQPLSERIEQQETILQQLVAMNTRLKNAAPDIIAARKSATTTPAQVSRVISDSASAHSVVIRRIADRGENIQVWIEPVVFNDLLK

SEQ ID NO: 48751 - protein, 77 aa, Homo sapiens
PDKAFTPHPQQCQLPDATLARLIRPQIPAPSVGRIRRLRRIRNGRIRRLRRIRNGADCLMRRLRVLSGLTAVKCSTP

SEQ ID NO: 48752 - protein, 1008 aa, Homo sapiens
  DOMAIN (653)..(699): DEAD-box subfamily ATP-dependent helicases proteins domain identified by eMATRIX, accession number BL00039D, p-value=7.750e- 36, raw score of 21.67
  DOMAIN (534)..(628): DEAD/DEAH box helicase domain identified by PFam, accession name DEAD, E-value=1.6e-27, PFam score of 89.9
  misc_feature (1)...(1008): Xaa = X or * as defined in Table 2
SVPTIIFFFLPVLRFWRPGIQQAKKCHLFATGTQSRRNTLRQRTAKGIPQQRMTAKREEISIGILHVTPQQRRECRGDNRFTARFRRTPWRLLGHCVSAAVTGVLPAVAGSPLAYSDTDEFYPVAGGTMSQHLPLVAAQPGIWMAEKLSELPSAWSVAHYVELTGEVDSPLLARAVVAGLAQADTLRMRFTEDNGEVWQWVDDALTFELPEIIDLRTNIDPHGTAQALMQADLPQDLRVDSGEPLVFHQTTLGFILSQSEKNELSLTASWMPLEFDPTDNDDYAMQQLDKRDSTAMAGVAWYHHERWVNRESLCSCGRSGXQQRLGGGAIGIPQNADRSSVADTSLGVLYYDENFSDYYYGISESESRRSGLASYSAQDAWVPYVSLTAKYPIGEHVVLMASAGYSELPEEITDSPMIDRNESFTFVTGTHIGAFFEYYGVMHGIGGVFTPCERAVRMHQHRRDLCRTPATFFEGFNDHFAGLIFIFAVNLLCGHLSRAGDGTVKIIGVGGAPGGEIQHGLCVIRCNSATAIIIVATPGRLLDHLQKGTVSLDALNTLVMDEADRMLDMGFSDAIDDVIRFAPASRQTLLFSATWPEAIAAISGRVQRDPLAIEIDSTDALPPIEQQFYETSSKGKIPLLQRTLVRFANGSARVLVATDVAARGLDIKSLELVVNFELAWDPEVHVHRIGRTARAGNSGLAISFCAPEEAQRANIISDMLQIKLNWQTPPANSSIATLEAEMATLCIDGGKKAKMRPGDVLGALTGDIGLDGADIGKIAVHPAHVYVAVRQAVAHKAWKQLQGGKIKGKTCRRCYPLAAPYVRHCSLVGRAASHQALWHVAGFGLYALFRRTGGCRLRCRYSGGLRLIRPTVAAGICRPDKTRKRRIRHRAPFPDAARAPYPAYRSQYNQFFFTNSDFSFIGPKPSMLQSMLCAPCNQADVFHFGANVSASKSYLFTFRSLMMVTLSPCSQQIAVSIFNDQLVAFLCRFCVVPLRRHIHGQMYMPLSS

SEQ ID NO: 48753 - protein, 121 aa, Homo sapiens
  misc_feature (1)...(121): Xaa = X or * as defined in Table 2
RLIGLRMVREFVGLIRRASVASGSWHCCRMRRKRLIRPKPSILQSMLWSPSTRRMFFTLVPIFSIEELPFTFRSLMMVTLSPSASRLPLASLTISSSLSCAGSASFHSXAHSGQMYMPLSS

SEQ ID NO: 48754 - protein, 296 aa, Homo sapiens
MASLIMMSLPAMRTLAWAMAVSGNCIPEGQFSALSCADFGISPKLIGIEQFRAQRTLIIGNRVGTVTGQREFEIYTDERRPDKTRERRIRQSALLPDAGVNALSGLRRVREFVGLIRRASVASGSRYHCRMRRKRLIRPTEGAGIRRPDKTRKRRIRQSAPMPELPGPPVIETSTRNFKENWEENFCYLEFTIAKLGTTRKRIQENCKGQPLGPAGVQVSLRNTGTEAKIQSTVTQPGGKPKVDKTTKMGKKQSRKTGNSKKQSTSPPPKEHSSSPATEQSWMEDDFDKLRKEGFR

SEQ ID NO: 48755 - protein, 82 aa, Homo sapiens
AEAVRRVVNRGFVSRHTDRQDEHLYVPPLHQSAPRLSPVDGNVTLPALALPRCVQQLLLVCLRWQSSGRPVPAIRKRHARQV

SEQ ID NO: 48756 - protein, 475 aa, Homo sapiens
MALKKYRHMADDTPLLAELSAIASTLKSASLSDIEMRGFTFDQKRQILHLQLRAANFASFDKLRSVLATDYVVQQDALQKEGDAVSGGQWRERQLSRGEHWLAQHLAGRSPREKGMLLAAVVFLFSVGYYVLIWQPLSERIEQQETILQQLVAMNTRLKNAAPDIIAARKSATTTPAQVSRVISDSASAHSVVIRRIADRGENIQVWIEPVVFNDLLKWLNALDEKYALRVTQIDVSAAEKPGMVNVQRLEFGRGCTNAACSECVACLQRIRSPAITSLGVKRLDDFHHVLPCQILLHAGQEISFSGLTAHTAEFTVGEALESDHYSHCDVQIISHVCSPNHVRHGVLYEHMRNRFILIPKGVSADPELRIKVVTAVIEQHMSLNQAAAHFMLAGSGSVARWLKVYEERGEAGLRALKIGTKRNIAISVDPEKAASALELSKDRRIEDLERQVRFLETRLMYLKKLKALAHPTKK

SEQ ID NO: 48757 - protein, 30 aa, Homo sapiens
  misc_feature (1)...(30): Xaa = X or * as defined in Table 2
FVGRIRRLRRIRRYXFTPLTDXLSCAHQVP

SEQ ID NO: 48758 - protein, 178 aa, Homo sapiens
  DOMAIN (76)..(146): HAMP domain identified by PFam, accession name DUF5, E-value= 3.5e-17, PFam score of 70.5
THWMKNIAHVWYVPEAVKTRYAHLNANWLEMNNRLSKGDLPWYQANINNYVNQIDLFVLALQHYAERKMLLVVAISLAGGIGIFTLVFFTLRRIRHQVVAPLNQLVTASQRIEHGQFDSPPLDTNLPNELGLLAKTFNQMSSELHKLYRSEDNGMYICPEVPTNGTTQNLHRKATSYR

SEQ ID NO: 48759 - protein, 157 aa, Homo sapiens
  misc_feature (1)...(157): Xaa = X or * as defined in Table 2
RPSIFACVSPXRINHSRIMPQTNAKNAKPNPAQVMRGVISRRRRAMLFSNSAITRTPTTSFTMAITSASSSPPAVKVSICPHGINTPTNICNTTSCFRLIPHFMTPKPLPLYSESGPSCSSCSASARSNGSLPISIKVANAQAQSASTSGMLWLSGQ

SEQ ID NO: 48760 - protein, 138 aa, Homo sapiens
  misc_feature (1)...(138): Xaa = X or * as defined in Table 2
EWHYLSADRRQCAFQGVSRKTATVCHHPVDYYAGSLYRLYFTDRLRARLAGHAAESGTPASHAVFQLVLEXLXSPLFSPVSTSGGRTANSTVLIMKSCMSGAVERQPTNWQAILMFLIFVVFTLGITYWASNAYVLAG

SEQ ID NO: 48761 - protein, 145 aa, Homo sapiens
MSLSSSKVMNDQGPVWKPLKLQQAGGPANTVLQLPGQGCRPWRERIPSEAAAPTHGAKLRTTRAWNWRPWFLMLEQKTPYFSYINDQKCKQFKFPSGNIKCCPTLFIPIHGSVRGLRLNAHPVAKLSFHSGTKKKKKVCFVTSSL

SEQ ID NO: 48762 - protein, 369 aa, Homo sapiens
  DOMAIN (165)..(212): CYCLIN CELL CYCLE DIVISION PROTE domain identified by eMATRIX, accession number PD02331A, p-value=4.233e-10, raw score of 19.76
  DOMAIN (156)..(256): Cyclin domain identified by PFam, accession name cyclin, E- value=3.8e-12, PFam score of 46.1
MASGAQLPPQPSSSEVSAVQSPGGRPGAGLEETALGVPLPPSPGEAPLPRSNRSRCPGTRQPGAASLHAASAAVPVRPRRGTAPAGKTADAVPAAAPEQAPRPAPQSRKPRNLEGDLDERRLLCHLQLAQDREARLWRGGKPQDEICDAFEEVVLWLLRLQNTFYFSQSTFNLALTIFGRLLISVKVKEKYLHCATITSLRLAAKVNEEEEFIPQVKDFTKHYGSDYSPNELLRMELAILDRLHWDLYIGTPLDFLTIFHALVVLSWPHVLELLPQRNPSLHVASLTRQLQHCMAGHQLLQFKGSTLALVIITLELERLMPGWCAPISDLLKKAQVGDMQYSCCKELVMQQLRSLQSSSCTDNFVSPAN

SEQ ID NO: 48763 - protein, 51 aa, Homo sapiens; identical to SEQ ID NO: 31663

SEQ ID NO: 48764 - protein, 141 aa, Homo sapiens
AAVGWRRFDAWRTGALGLALLLLLGLGLGLEAAASPLSTPTSAQAAGTNEILPEGDATTMGPPVTLESVTSLRNATTMGPPVTLESVPSVGNATSSSARDQSGSPTAYGVIAAAAVLSASLVTATLLLLSWLRAQERLRPL

SEQ ID NO: 48765 - protein, 149 aa, Homo sapiens
  DOMAIN (78)..(100): LOW DENSITY LIPOPROTEIN (LDL) RECEPTOR SIGNATURE domain identified by eMATRIX, accession number PR00261A, p-value=4.462e- 19, raw score of 11.02
  DOMAIN (65)..(104): Low-density lipoprotein receptor domain identified by PFam, accession name ldl_recept_a, E-value=2.7e-13, PFam score of 57.6
IYPRGRVRPGQEGLSNKQPPVWFLYPGTSPVSCGSQPVTTVLLEKGPASSFPGFICIHLAGPSSGSCPPTKFQCRTSGLCVPLTWRCDRDLDCSDGSDEEECTVLSASLVTATLLLLSWLRAQERLRPLGLLVAMKESLLLSEQKNSLP

SEQ ID NO: 48766 - protein, 177 aa, Homo sapiens
  DOMAIN (59)..(102): KINASE ACETYLGLUTAMATE NAG DEHYD domain identified by eMATRIX, accession number PD02329A, p-value=8.364e-32, raw score of 23.04
AEYISAVLWCFLAHGEGFADRATAARRGKTFVIMLGGEAIEHENFSSIVNDIGLLHSLGIRLVVVYGARPQIDANLAAHHHEPLYHKNIRVTDAKTLELVKQAAGTLQLDITARLSMSLNNTPLQGAHINVVSGNFIIAQPLGVDDGVDYCHSGRIRRIDEDAIHRQRAQGVQCAQQ

SEQ ID NO: 48767 - protein, 84 aa, Homo sapiens
YRVVQCAGCTAEDCHIRRSEGGIAWGDMRNCLNQLITEPSVASAMFEYRFGGNGELSVRPLEAINLIRNLLKVDSLPRILLDGC

SEQ ID NO: 48768 - protein, 15 aa, Homo sapiens
PAVSGLSRQVRERWS

SEQ ID NO: 48769 - protein, 195 aa, Homo sapiens
  DOMAIN (43)..(63): ATP SYNTHASE DELTA SUBUNIT SIGNATURE domain identified by eMATRIX, accession number PR00125A, p-value=8.364e-15, raw score of 16.03
  DOMAIN (43)..(116): ATP synthase delta (OSCP) subunit domain identified by PFam, accession name OSCP, E-value=2.8e-24, PFam score of 85.6
MLRLGKSGSLQGYGTWRVGATQDDPAFVPRDAYGAPPVQVYGIEGRYATALYSAASKQNKLEQVEKELLRVAQILKEPKVAASVLNPYVKRSIKVKSLNDITAKERFSPLTTNLIMRPALQKVASYTQSQLLQTCDCQWTNRLCGSLMLLMLPRSFRVKLSKLPVDQAHTILGNDEALHMSPYEVTRENLEIYVQ

SEQ ID NO: 48770 - protein, 236 aa, Homo sapiens
  DOMAIN (205)..(224): ATP SYNTHASE DELTA SUBUNIT SIGNATURE domain identified by eMATRIX, accession number PR00125E, p-value=9.250e-16, raw score of 13.56
  DOMAIN (48)..(235): ATP synthase delta (OSCP) subunit domain identified by PFam, accession name OSCP, E-value=2.9e-08, PFam score of 31.6
  misc_feature (1)...(236): Xaa = X or * as defined in Table 2
LQPPGRRWAAPAVSGLSRQVRCFSTSVVRPFAKLVGPSVQVSVIEGRYATALYYAASRQNKLEQVEKGLLRVAQILEGTPKWAASVLESPMLKAFPLKVKKPKMTITAKVGGSLPLTYQTLINFALLENGSDXGNYPRESFSGLFLTMDGVFHSRERVPCTVTSGIFLXEGRPQFSEFKNCSSRGFLRSRAKFLKLGAKTDPSILGGMIVRIGEKYVDMSVKTKIQKLGRAMREIV

SEQ ID NO: 48771 - protein, 165 aa, Homo sapiens
  DOMAIN (91)..(104): LDL-receptor class A (LDLRA) domain proteins domain identified by eMATRIX, accession number BL01209, p-value=8.313e-16, raw score of 9.31
  DOMAIN (69)..(154): Low-density lipoprotein receptor domain identified by PFam, accession name ldl_recept_a, E-value=2.8e-21, PFam score of 84.1
MTPLDSRLQAAPCCRRRPPPGRKVPPSSLQRRFLYRATTMSEFLLALLTLSGLLPIARVLTVGADRDQQLCDPGEFLCHDHVTCVSQSWLCDGDPDCPDDSDESLDTCPEEVEIKCPLNHIACLGTNKCVHLSQLCNGVLDCPDGYDEGVHCQGESICGTMHLKY

SEQ ID NO: 48772 - protein, 341 aa, Homo sapiens
MITLEKIVRGKRTAVSEPLFPNYLFVEFDPEVIHTTTINATRGVSHFVRFGASPAIVPSAVIHQLSVYKPKDIVDPATPYPGDKVIITEGAFEGFQAIFTEPDAFIAFVFVLLCQNTAFARASSNGDLPTKADLQAQLDSLNKQKDLSAQDKLVQQDLTDTLATLDKIDRIKEETVQLRQKVAEAPEKMRQATAALTALSDVDNDEETRKILSTLSLRHSETRVAQALDDLQNAQNDLASYNSQLVSLQTQPERVQNAMYNASQQLQQIRSRLDGTDVGETALRPSQKVLMQAQQALLNAEIRKTPLRRSFAHWRFYGICAVHANKRIQILQRLAIFFLCQ

SEQ ID NO: 48773 - protein, 117 aa, Homo sapiens
  misc_feature (1)...(117): Xaa = X or * as defined in Table 2
RPGMWSTRSPNSTAWPLSLEPDPGMASACTTMHTTTIAEPDPGMSGWPDGRMETSSPTIMDIVVIXCAIAAEAIVLVSLLFVMLRYMYRHMGTYHTNEAKGTGVADSADACPAGDPA

SEQ ID NO: 48774 - protein, 137 aa, Homo sapiens
  misc_feature (1)...(137): Xaa = X or * as defined in Table 2
RPGMWSTRSPNSTAWPLSLEPDPGMASASTTMHTTTIAEPDPGVSGLPDGRMETPTPHPXLTMVVIAGVIACLWPFVLSLPSSFVMVALTLLTGHKGARTTPNEAKGTEFAESADAALQGDPALQDAGDSSRKEYFI

SEQ ID NO: 48775 - protein, 252 aa, Homo sapiens
  misc_feature (1)...(252): Xaa = X or * as defined in Table 2
QAFELHCPCRPKFSTLPSPAWPPRHTDLRKRGRRTAQXYAGNESHPPSLPRYLRRSRHSRMQAPSSTCSYSHTSLQCSPAPQNHAQHPXPALEELACGSPSVSSPYLVLSSCQEQPHHCCPPSTPRPSWCPSSGDAICYSPGQCPRSRGPLPEDSSDSPPAEQVLPPSSGSHNTLYLRCKRFSAFILNCEPPSKCXKPGHRCRSXAGILTLLPPGERGPGDGPCSTGRQSASKTPPPPSHPHTGHSLWSEEK

SEQ ID NO: 48776 - protein, 209 aa, Homo sapiens
  misc_feature (1)...(209): Xaa = X or * as defined in Table 2
KARLTWQQTREESLCRETPPYKTIRSRETYSLPREQHGKDLPPXFNYLPPSPSHNTICPGXQDQGRFTQPLYLRCKRFSAFILNCEPPSKCXKPGHRCRSXAGILTLLPPGGEAQHFKVKHPSIPLREGGEVGIKPKKTSPGTELLMQPCHQPSPRTCQPAPRKSNRPLGCLSPLMKHSTLGYLLWLQKAIWLKGFGTSGWXMXGRFHL

SEQ ID NO: 48777 - protein, 32 aa, Homo sapiens
  misc_feature (1)...(32): Xaa = X or * as defined in Table 2
TANAALHQPSPRTCQPAPRKSNRPQAAXALNC

SEQ ID NO: 48778 - protein, 676 aa, Homo sapiens
MVKGEGEKPVVKGEGEKPVSHGSRQEKRVCAGKLPLIKPSDLMRLIHYHENSMEKTCPHDSITSHQVPPTTHNSFLAFTRPWIPSNNASFRPFKPLDCLQIKYWKLQRSDSLSSQPTLLQATWKEGVGEPSLFLLLSLAGLRTSLPLQTQVFHITKPSLATQAHRFEKKRPKDRTIICRQREPSPIPAPIPAPLPALRMQAPSSTCSYSHTSLQCSPAPQNHLNILSLPWKSWPVAPVSLLSISRPKLLPGAATSLLSSLHTPALLVPSSGDAICYSPGQVPAQGDLSQEDSSDSPPAEQVLPPSSGSHNTLYLGCKRFSAFILNCEPPSKLLKARPQVSELSWNPDFVASWRRGPEMVPAPLEGNQPARRHLHPVILTRGTHCGQKRNERTVTRGQTKVLFQDAVLICNFPTSLGHTSFIPRVSGDSRKQAFPGGPRASASPVLQDGARTAPARGGAAFHWGLCCGPALPLPSIIVCLAFQSKTSKYSFTEGGEVGIKPKKTSPGTELLMQPCTSPALGLVSRHPENPTGLRLLKPINEAQYTRPLTTPLTMCLLMQAALRTLLGEAGPAKFSDHPRECWLSLPTGIHPVASCPCAHGKSKPRFSSRGLPLASPTKSFAVRPLLRQSWKMEKQEKNGEGEWKRWTQKCRICGWSWGWALVNKKQIWLKGFGTSGW

SEQ ID NO: 48779 - protein, 143 aa, Homo sapiens
  misc_feature (1)...(143): Xaa = X or * as defined in Table 2
DLFLYLSWQHCHPYSHCHPNQKPGRFLMKLSSETVTIELKNGTTRSHGTIHQVWDVQMNTHLKAVKMTLKNREPVQLETLSIRGNNIRYFILPDSVYPLDTLLVDVDPKVKSKKREAVAGRGRRRGRGTRDVARGRXRGNNIR

SEQ ID NO: 48780 - protein, 103 aa, Homo sapiens
  DOMAIN (2)..(21): Eukaryotic  RNA-binding region RNP-1 proteins domain identified by eMATRIX, accession number BL00030A, p-value=2.125e- 12, raw score of 14.39
  DOMAIN (2)..(72): RNA recognition motif. domain identified by PFam, accession name rrm, E-value=4e-21, PFam score of 83.6
KIFVGGLNPEATEEKIREYFGEFGEIEAIELPMDPKLNKRRGFVFITFKEEEPVKKVLEKKFHTVSGSKCEIKVAQPKEVYQQQVRGSASCCRSAAWTCGPWL

SEQ ID NO: 48781 - protein, 33 aa, Homo sapiens
  misc_feature (1)...(33): Xaa = X or * as defined in Table 2
RRRPSSSWALPPSRGPSSTXAERGAQHQQPVPA

SEQ ID NO: 48782 - protein, 100 aa, Homo sapiens
  misc_feature (1)...(100): Xaa = X or * as defined in Table 2
FFTLCLQWGLFSCESPICSGVGRYWAXVCLCFLQIEAIELPMDPKLNKRRGFVFITFKEEEPVKKVLEKKFHTVSGSKVRCSQLCLASCAAGELALRGMG

SEQ ID NO: 48783 - protein, 41 aa, Homo sapiens
  DOMAIN (20)..(36): Aminotransferases class-III pyridoxal-pho domain identified by PFam, accession name aminotran_3, E-value=0.059, PFam score of 7.3
  misc_feature (1)...(41): Xaa = X or * as defined in Table 2
XSSCRLFFPEDPVKNVRAQGQYMYDEQGAEYIDCISNVAHX

SEQ ID NO: 48784 - protein, 336 aa, Homo sapiens
  DOMAIN (75)..(94): Eukaryotic  RNA-binding region RNP-1 proteins domain identified by eMATRIX, accession number BL00030A, p-value=1.563e- 12, raw score of 14.39
  DOMAIN (75)..(230): RNA recognition motif. domain identified by PFam, accession name rrm, E-value=1.1e-44, PFam score of 161.9
APRPSMSEAGEEQPMETTGATENGHEAVPEASRGRGWTGAAAGLEARPPRPRAGIRTAPRDQINASKNEEDAGKMFVGGLSWDTSKKDLKDYFTKFGEVVDCTIKMDPNTGRSRGFGFILFKDAASVEKVLDQKEHRLDGRVIDPKKAMAMKKDPVKKIFVGGLNPESPTEEKIREYFGEFGEIEAIELPMDPKLNKRRGFVFITFKEEEPVKKVLEKKFHTVSGSKCEIKVAQPKEVYQQQQYGSGGRGNRNRGNRGSGGGGGGGGQSQSWNQGYGNYWNQGYGYQQGYGPGYGGYDYSPYGYYGYGPGYDYSQGSTNYGKSQRRGGHQNNYKPY

SEQ ID NO: 48785 - protein, 126 aa, Homo sapiens
  DOMAIN (31)..(50): Aminotransferases class-III pyridoxal-phosphate attachment si domain identified by eMATRIX, accession number BL00600G, p-value= 2.125e-12, raw score of 12.43
  DOMAIN (1)..(115): Aminotransferases class-III pyridoxal-pho domain identified by PFam, accession name aminotran_3, E-value=1.9e-26, PFam score of 77.6
MGKSIGNGHPVACVAATQPVARAFEATGVEYFNTFGGSPVSCAVGLAVLNVLEKEQLQDHATSVGSFLMQLLGQQKIKHPIVGDVRGVGLFIGVDLIKDEATRTPATEEACLLGIKAEGELRFAEH

SEQ ID NO: 48786 - protein, 390 aa, Homo sapiens
  DOMAIN (165)..(184): Eukaryotic  RNA-binding region RNP-1 proteins domain identified by eMATRIX, accession number BL00030A, p-value=1.563e- 12, raw score of 14.39
  DOMAIN (169)..(332): RNA recognition motif. domain identified by PFam, accession name rrm, E-value=7.6e-31, PFam score of 115.9
  misc_feature (1)...(390): Xaa = X or * as defined in Table 2
SLIKLNSPPPRGGGTARYGAWLLVGGFPCGGGQGGGDTVGAAPWADWGEASAAASFDVLAEACARLSSLRVGDEAGSRGVIWRARSPPRLGLALSEAGEEQPMETTGASENGHEAVPEASRGRGCWTPLRRGLEARPRRPRAGIRTAPRDQRINASKNEEDAGKMFVGGLSWDTSKKDLKDYFTKFGEVVDCTIKMDPNTGRSRGFGFILFKDASSVXKVLDQKEHRLDGRVIDPKKAMAMKKAPVKKIFVGGLNPESPTEEKIRESFGEFGEIEAIELPMDPKLNKRRGFVFITFKEEEPVKKVLEKKFHTVSGSKCEIKVAQPKEVYQQQQYGSGGRGNRNRGNRGQGGGGGGGXGQGSTNYGKTQRRGGHQNNYKPILEAGRQERPT

SEQ ID NO: 48787 - protein, 260 aa, Homo sapiens
PLFVVFPLSPDIAGRPGGVVGGGPGGGPAWAAPAMNGLSLSELCCLFCCPPCPGRIAAKLAFLPPEATYSLVPEPEPGPGGAGAAPLGTLRASSGAPGRWKLHLTERADFQYSQRELDTIEVFPTKSARGNRVSCMYVRCVPGARQGHQAQGGHPQLAWVGRLGDSNNPAPGGCLLGKSWGTGAALACGYIHLLARYTVLFSHGNAVDLGQMSSFYIGLGSRLHCNIFSYDYSGYGASSGRPSERNLYADIDAAWQALRT

SEQ ID NO: 48788 - protein, 344 aa, Homo sapiens
  DOMAIN (307)..(325): GPR6 ORPHAN RECEPTOR SIGNATURE domain identified by eMATRIX, accession number PR00649C, p-value=5.990e-09, raw score of 6.77
  misc_feature (1)...(344): Xaa = X or * as defined in Table 2
PAMNGLSLSELCCLFCCPPCPGRIAAKLAFLPPEATYSLVPEPEPGPGGAGAAPLGTLRASSGAPGRWKLHLTERADFQYSQRERSTIEVFPTKSARGNRVSCMYVRCVPGARYTVLFSHGNAVDLGQMSSFYIGLGSRLHCNIFTYDSSGYGASSGRPSERNLYADIDATWQALRTRXGRPLVGRVRARWRPRLTLLRRRQVRHQPGQHPSCTGRSIGHGAHRGTWPRATSVPRWCCTRRSTSGMRVAFPDTQERPTASTPFPYIRERCPRLTSPRAHHPTGTKDEVIDFLEAGWRSTRRCHQGGGAAVGGGGPGHNDIELYSQYLERLASLSFSQELPSQRA

SEQ ID NO: 48789 - protein, 108 aa, Homo sapiens
CQSQSGGHGPGFGIKDDKDKKKKYEPPVPTRVGKKKKKTKGPDAASKLPLVTPHTQCRLKLLKLERIKDYLLMEEEFIRNQEQMKPLEEKQETRICWNLAARSCSTTR

SEQ ID NO: 48790 - protein, 482 aa, Homo sapiens
  DOMAIN (200)..(221): AAA-protein family proteins domain identified by eMATRIX, accession number BL00674A, p-value=2.636e-17, raw score of 16.91
  DOMAIN (251)..(459): ATPases associated with various cellular act domain identified by PFam, accession name AAA, E-value=1e-09, PFam score of 45.7
  misc_feature (1)...(482): Xaa = X or * as defined in Table 2
ARASGSGSSSGQGKMGQSQRGGHGSGGGKKDDKDKKKKYEPPVPTRVGKKKKKTKGPDAASKLPLVTPHTQCRLKLLKLERIKDYLLMEEEFIRNQEQMKPLEEKQEEERSKVDDLKGGPRLSVGNLGKRFIDDNHAIVSTPVGSEHYVSILSFVDKDLLEPGCSVLLNHKVHAVIGVLMGDTDPLVTVMKVEKAPQETYADIGGLDNQIQEIKESVELPLTHPEYYEEMGIKPPKGVILLVPPGTGKTFLPKAVANQTSATFLRGGGSELIQKNLGDGPKTLSRELFRVSEELAPSLRFIDRILPPLGTKRYDSNSGGEREFQRTMLELLNQLDGFDSRGDVKVIMPTNRIETLDPALIRPRPAFDRKYEFPLCPDEKTKKRIFQISHKSRMTLADVGTPWTTLIMAKDDLSGAXPSKAICTEAGLMALRENRRMKVPNEDFKKSKENVLYKKQEGTPEGVVSLMNPWLVIRKMVGRFLNP

SEQ ID NO: 48791 - protein, 91 aa, Homo sapiens
WQDLICRMAASVKEQSTKPIPLPQSTPGESHSLSTSGKSEVRDLFVAERQFAKEQHTDGTLKEVGEDYQIAIPDSHLPVSEERWALDALRN

SEQ ID NO: 48792 - protein, 280 aa, Homo sapiens
GLLKQLLVQQLGLTEKSVQEDWQHFPRYRTASQGPQTDSVIQNSENIKAYHSGEGHMPFRTGTGDIATCYSPRTSTESFAPRDSVGLAPQDSQASNILVMDHMIMTPEMPTMEPEGGLDDSGEHFFDAREAHSDENPSEGNYLILDGYDPVQESSTDEEVASSLTLQPMTGIPAVESTHQQQHSPQNTHSDGAISPFTPEFLVQQRWGAMEYSCFEIQSPSSCADSQSQIMEYIHKIEADLEHLKVPHTSTSIGLGCKKHLAEGKNRVMKMLMSINLFRF

SEQ ID NO: 48793 - protein, 848 aa, Homo sapiens
  DOMAIN (85)..(270): RhoGEF domain identified by PFam, accession name RhoGEF, E- value=6.1e-18, PFam score of 73.0
  misc_feature (1)...(848): Xaa = X or * as defined in Table 2
VRFRNLIRIYCNIKICAVSHCPPKVFKLNSLFFLHRFDSVAFGESQSEDEQFENDLETDPPNWQQLVSREVLLGLKPCEIKRQEVINELFYTERAHVRTLKVLDQVFYQRVSREGILSPSELRKIFSNLEDILQLHIGLNEQMKAVRKRNETSVIDQIGEDLLTWFSGPGEEKLKHAAATFCSNQPFALEMIKSRQKKDSRFQTFVQDAESNPLCRRLQLKDIIPTQMQRLTKYPLLLDNIAKYTEWPTEREKVKKAADHCRQILNFVNQAVKEAENKQRLEEDYQRRLDTSSLKLSEYPNVERLRNMDLTKRKMIHEGPLVWKVNRDKTIDLYTLLLEDILVLLQKQDDRLVLRCHSKILASTADSKHTFSPVIKLSTVLVRQVATDNKALFVISMSDNGAQIYELVAQTVSEKTVWQDLICRMAASVKEQSTKPIPLPQSTPGEGDNDEEDPSKLKEEQHGISVTGLQSPDRDLGLESTLISSKPQSHSLSTSGKSEVRDLFVAERQFAKEQHTDGTLKEVGEDYQIAIPDSHLPVSKERRALDALRNLGLLKQLLVHQLGLTEKSALENWQHFPRYRTAFQGPQTDSVIQNSENIKAYHSGEGHMPFRTGTGDIATCYSPRTSTESFAPRDSVGLAPQDSQASNILVMDHMIMTPEMPTMEPEGGLDDSGEHFFDAREAHSDENPSEGDGAVNKEEKDVNLRISGNYLILDGYDPVQESSTDEEVASSLSLQPPMTGIPAVESPTQQATFSLRNTHSDGAISPFTPDFLVQQRWGAMEYFLFLRIQSPSSCGRISQEARSWGVTFHXGXEADLEHLKKVEESXHPFFSQRPGLDQPLTDKHSDKS

SEQ ID NO: 48794 - protein, 97 aa, Homo sapiens
  misc_feature (1)...(97): Xaa = X or * as defined in Table 2
ILQLHSSGPCLLWLXLSFRSLSTTAVCQCCRPAADFHPSGSSRVSAVLLIQHRRPLPLPIGLKACYFSALSLQTSLTCLGLVVLLDFPKEAASLDKV

SEQ ID NO: 48795 - protein, 152 aa, Homo sapiens
MKMSERAASLSTMVPLPRSAYWQHITRQHSTGQLYRLQGKRGATCVQGVGQAWEYWGGGSAQLAAAACQLVSALPPKTPVKSQVVEPNQCLHSNGLPKTLPLSGDAEFWHTDHAGELPDITMDFVNCHGAGGSVAVRTTTGHSHRHLGFDES

SEQ ID NO: 48796 - protein, 87 aa, Homo sapiens
PWKLELCPRCRVKGGAGWPLVGANLGRYLNLDFPWFEAGVVDFCCWNTPWRSTEGLFTWNLIPGIAQVLPTYVLTLSTATTLVRTLL

SEQ ID NO: 48797 - protein, 473 aa, Homo sapiens
  DOMAIN (304)..(411): PTB domain (IRS-1 type) domain identified by PFam, accession name IRS, E-value=1.1e-05, PFam score of 22.9
  misc_feature (1)...(473): Xaa = X or * as defined in Table 2
GSGADASGFISDAGLIFKKASSKGPKRLEKFSDERAAYFRCYHKLFLLFSSLCYGTYHVVVLPTLKPREDEDWISLCLRHCLMQKDTHSMLGECGERREGKKQKTGALGSSLSLEDAKHLLPFIPALPFSWNALPQDLCNVFKLLWDYRIRVDPSPIAGTLIRRDTDPQGESHVKTGRHWSDTIKSQRCQGLRQPPDRPIPILLMVKGQHVWPSQLDKAQIQEVTELNNVKNVARLPKSTKKHAIGIYFNDDTSKTFACESDLEADEWCKVLQMECVGTRINDISLGEPDLLATGVEREQSERFNVYLMTSPXLRMLHGECALQVTYEYICLWGRPRTPQEFKLISWPLSALRRYGRGTPWFNYQAGRMCQTGEGLFIFQTRDGEAIYQKVHSAALAIAEQHERLLQSVKNSMLQMKMSERAASLSTMVPLPRSAYWQHITRQHSTGQLYRLQDVSSPLKLHRTETFPSLQDS

SEQ ID NO: 48798 - protein, 199 aa, Homo sapiens
MTVDYCKLNQVVTPIAAAVPDVVSLLEQINTSPDITLVHYIDDIMLNGSSEQEVTNTLDLLVRHLCATGWEINPTKIQGSSTSVKFLGVQWCGDCRDVPSKVKDKLLHLAPPTTKKEAQHLTGLFGFRRKYIPYLGVLLCPIYQVTRKAASFQWRPEQEKALQQVQAAMQAALPLGPYDPAGPMVLEIAVADTEAVWGH

SEQ ID NO: 48799 - protein, 121 aa, Homo sapiens
  misc_feature (1)...(121): Xaa = X or * as defined in Table 2
EDSKSKTISHPWRDCGDYCHHQGLERCRGGDSHHTPVQLSXLACAEDNKSWRMTGIIVSLTKCXLQMQLLYQMWFHCLSKLTHLLGISTLQLCVTILFREILITFPLHKISHWSITLMTLR

SEQ ID NO: 48800 - protein, 33 aa, Homo sapiens
  misc_feature (1)...(33): Xaa = X or * as defined in Table 2
QWVIISLTKWXLQLQLLYQMWFHCLSKLTRLLP

SEQ ID NO: 48801 - protein, 620 aa, Homo sapiens; identical to SEQ ID NO: 44433
  DOMAIN (458)..(503): kw TRANSCRIPTASE REVERSE II ORF2 domain identified by eMATRIX, accession number DM01354N, p-value=1.000e-40, raw score of 13.17

SEQ ID NO: 48802 - protein, 1203 aa, Homo sapiens; identical to SEQ ID NO: 34339
  DOMAIN (121)..(166): kw TRANSCRIPTASE REVERSE II ORF2 domain identified by eMATRIX, accession number DM01354N, p-value=1.000e-40, raw score of 13.17
  DOMAIN (211)..(387): Reverse transcriptase domain identified by PFam, accession name rvt, E-value=3.5e-23, PFam score of 90.5
  misc_feature (1)...(1203): Xaa = X or * as defined in Table 2

SEQ ID NO: 48803 - protein, 507 aa, Homo sapiens; identical to SEQ ID NO: 32534
  DOMAIN (308)..(353): kw TRANSCRIPTASE REVERSE II ORF2 domain identified by eMATRIX, accession number DM01354N, p-value=1.000e-40, raw score of 13.17

SEQ ID NO: 48804 - protein, 754 aa, Homo sapiens; identical to SEQ ID NO: 32653
  DOMAIN (208)..(254): kw TRANSCRIPTASE REVERSE II ORF2 domain identified by eMATRIX, accession number DM01354O, p-value=1.000e-40, raw score of 8.73
  DOMAIN (241)..(418): Reverse transcriptase domain identified by PFam, accession name rvt, E-value=6.7e-11, PFam score of 49.6

SEQ ID NO: 48805 - protein, 571 aa, Homo sapiens; identical to SEQ ID NO: 39478
  DOMAIN (368)..(393): 7 kw REVERSE TRANSCRIPTASE RNA POLYMERASE domain identified by eMATRIX, accession number DM00895E, p-value=7.195e-12, raw score of 15.72
  DOMAIN (341)..(571): Reverse transcriptase domain identified by PFam, accession name rvt, E-value=5.9e-51, PFam score of 182.7

SEQ ID NO: 48806 - protein, 568 aa, Homo sapiens
  DOMAIN (354)..(379): 7 kw REVERSE TRANSCRIPTASE RNA POLYMERASE domain identified by eMATRIX, accession number DM00895E, p-value=9.889e-11, raw score of 15.72
  DOMAIN (325)..(568): Reverse transcriptase domain identified by PFam, accession name rvt, E-value=5.4e-66, PFam score of 232.7
MQKKHDKIRNSFMIKTLKKLRTEGIYLNTIKATYKKPITNIILNGENQKAFALRSGTSAIKLELRIKNPTQSRPTTWKLNNLLLNDYWVHNEMKAEIKMFFETNENKDTTYQNLWDAFKAVCRGKLIALNAHKRKQERSKIDTLTSQLKELEKQEQTHSKASRRQEITKIRAELKETETQKTLQKINESRSWFFERINKIDRPLARLIKKKREKNQIDTIKNDKGDITTDPSEIQTTIREYYKHLYANKLENLEEMDKFLDTYTLPRLNQEEVESLNRPITGAEIVAIINSLPTKRSPGPDGFTAEFYQRYKEELVPFLLKLFQSIEKEGILPNSFYEASIILIPKPGRDTTKKENFRPISLMNIEVKILNKILANRIQQHIKKLIHHDQVGFIPGMQGWFNICKSVNVIQHINRAKDKNHMIISIDAEKAFDKIQQPFMLKTLNKLGIDGMYFKIIRAIYDKPTANIILNGQKLEAFPLKTGTRQGCPLSPLLFNIVLEVLTRAIRQEKEINGIQLGKEEVKLSLFADDMIVYLENPIVSAQNLLKLISNFSKVSGYKINVQKSQAF

SEQ ID NO: 48807 - protein, 1206 aa, Homo sapiens
  DOMAIN (154)..(195): kw TRANSCRIPTASE REVERSE II ORF2 domain identified by eMATRIX, accession number DM01354I, p-value=1.000e-40, raw score of 15.55
  DOMAIN (400)..(675): Reverse transcriptase domain identified by PFam, accession name rvt, E-value=8.7e-88, PFam score of 305.1
MVKGSIQQEELTILNIYAPNTGAPRFIKQVLSHLQRDLDSHTLIMGDFNTPLSTLDRSTRQKVNKDTQELNSALHQADLIDIYRTLHPKSTEYTFFSAPHHTYSKIDHIVGSKALLSKCKRTEIITNYLSDHSAIKLELRIKNLTQSRSTTWKLNNLLLNDYWVHNEMKAEIKMFFETNENKDTTYQNLWDAFKAVCRGKFIALNAYKRKQERSKIDTLTSQLKELEKQEQTHSKASRRQEITKIRAELKEIETQKTLQKINESRSWFFERINKIDRPLARLIKKKREKNQIDKIKNDKGDITTDPTEIQTTIREYYKHLYTNKLENLEEMDTFLDTYTLPRLNQEEVESLNRPITGSEIVAIINSLPTKKSPGPDGFTAEFYQRYKEELVPFLLKLFQSIEKEGILPNSFYEASIILIPKPGRDTTKKENFRPISLMNIDAKILNKILANRIQQHIKKLIHHDQVGFIPGMQGWFNIRKSINVIQHINRAKDKNHMIISIDAEKAFDKIQQPFMLKTLNKLGIDGMYFKIIRAIYDKPTANIILNGQKLEAFPLKTGTRQGCPLSPLLFNIVLEVLARAIRQEKEIKGIQLGKEEVKLSLFADDMIVYLENPIVSAQNLLKLISNFSKVSGYKINVQKSQAFLYTNNRQTESQIMGELPFTIASKRIKYLGIQLTRDVKDLFKENYKPLLKEIKEETNKWKNIPCSWVGRINIVKMAILPKVIYRFNAIPIKLPMTFFTELEKTTLKFIWNQKRARIAKSILSQKNKAGGITLPDFKLYYKATVTKTAWYWYKNRDIDQWNRTEPSEIMPHIYNYLIFDKPEKNKQWGKDSLFNKWCWENWLAICRKLKLDPFLTPYTKINSRWIKDLNVKPKTIKTLEENLGITIQDIGVGKDFMSKTPKAMATKDKIDKWDLIKLKSFCTAKETTIRVNRQPTTWEKIFATYSSDKGLISRIYNELKQIYKKKTNNPIKKWAKDMNRHFSKEDIYAAKKHMKKCSSSLAIREMQIKTTMRYHLTPVRMAIIKKSGNNRVNKEKKEIQLWLALMEKICVQKPILYAGDHYSGREAEDQSFRPVEKVEHQCDTRRKTAFEKSITDVFLRGYYNAMALTTLYFVTGRQLEKNILKFIWNQKRALVAKAILGKKNKVGGITLPDFKLYYKFSMALVQKQAHRPTEQVREPRNKDAYLQPSDFRQGLRKQAMGKGLIQ

SEQ ID NO: 48808 - protein, 1029 aa, Homo sapiens; identical to SEQ ID NO: 37415
  DOMAIN (514)..(539): 7 kw REVERSE TRANSCRIPTASE RNA POLYMERASE domain identified by eMATRIX, accession number DM00895E, p-value=4.103e-10, raw score of 15.72
  DOMAIN (485)..(760): Reverse transcriptase domain identified by PFam, accession name rvt, E-value=1.1e-82, PFam score of 288.2

SEQ ID NO: 48809 - protein, 24 aa, Homo sapiens
  misc_feature (1)...(24): Xaa = X or * as defined in Table 2
SPVEKELKLWKNRHKLLSCXWLTC

SEQ ID NO: 48810 - protein, 75 aa, Homo sapiens
  misc_feature (1)...(75): Xaa = X or * as defined in Table 2
IVNKVVLPQGGPASPSLKGFWVYKLAQVWKLIEGPXFPIFIIQISLLSIXPRSFLFVXIKXECSRLPISFTSSGR

SEQ ID NO: 48811 - protein, 1056 aa, Homo sapiens; identical to SEQ ID NO: 34350
  DOMAIN (316)..(361): kw TRANSCRIPTASE REVERSE II ORF2 domain identified by eMATRIX, accession number DM01354N, p-value=1.000e-40, raw score of 13.17
  DOMAIN (400)..(675): Reverse transcriptase domain identified by PFam, accession name rvt, E-value=2.4e-85, PFam score of 297.0
  misc_feature (1)...(1056): Xaa = X or * as defined in Table 2

SEQ ID NO: 48812 - protein, 741 aa, Homo sapiens
  DOMAIN (121)..(166): kw TRANSCRIPTASE REVERSE II ORF2 domain identified by eMATRIX, accession number DM01354N, p-value=1.000e-40, raw score of 13.17
  DOMAIN (211)..(387): Reverse transcriptase domain identified by PFam, accession name rvt, E-value=3.5e-23, PFam score of 90.5
  misc_feature (1)...(741): Xaa = X or * as defined in Table 2
QGRPTFRFRKYREHHKDTPREEQLQDTXSSDSPKLKXRKKCXGQPERKVKLPTKGSPSDXKRISRQKTLQARRQSWFFEKINKIDRPQARLIKKKREKNQIDTIKNDKGDITTDPTEIQITIREYYKHLYANKLENLEEMDKFLDTYTLPRLNQEEVESVNRPITGSEIEAITNSLPTKKSPGPDGFTAEFYQRYKEELVPFLLKLFQPIEKEGILPNSFYEASIILIPKPGRDTTKKGNFRPISLMNIDAKILNKILANQIQQHIKKLIHHDQVGFIPGMQGWLEVLARAIRQEKEIKGIQLGKEEVKLSLFADDMIVYLENPTVSAQNLLKLISNFSKVSGYKINVQKSQAFLYTNNRQTESQIMSELPFTIASKRIKYLGIQLTRDVKDLFKENYKPLLNEIKEDTNKWKNIPCSWIGRINIVKMAILPKVIYTFNAIPIKLPMTFFTELEKTTLKFIWKQKRSHIAKSILSQKNKAGDITLPDFKLHYKATVTKTAWYWYQNRDIDQWNTTEPSEIMLHIYNHLIFDKPDKNKQWGNDSLFNKWCWENWLAICRKLKLDPFLTSYTKINSRWIKDLNVRPKTIKTLEENLGNTIQDIGMGKDFMSKTPKAVATKAKIDKWDVIKLKSFCTAKETTIRVNRQPTEWEKIFATYSSDKGLISRIYNELKQIYKKKTNNPIKKWAKDMNRHFSKEDIYAAKRHMKKCSSSLAIREMQIKTTMRYHLTPIRMVIIKKSGNN

SEQ ID NO: 48813 - protein, 1085 aa, Homo sapiens; identical to SEQ ID NO: 45261
  DOMAIN (154)..(195): kw TRANSCRIPTASE REVERSE II ORF2 domain identified by eMATRIX, accession number DM01354I, p-value=1.000e-40, raw score of 15.55
  DOMAIN (400)..(675): Reverse transcriptase domain identified by PFam, accession name rvt, E-value=3.6e-89, PFam score of 309.6

SEQ ID NO: 48814 - protein, 1046 aa, Homo sapiens; identical to SEQ ID NO: 47545
  DOMAIN (272)..(317): kw TRANSCRIPTASE REVERSE II ORF2 domain identified by eMATRIX, accession number DM01354N, p-value=1.000e-40, raw score of 13.17
  DOMAIN (356)..(631): Reverse transcriptase domain identified by PFam, accession name rvt, E-value=5.8e-89, PFam score of 309.0

SEQ ID NO: 48815 - protein, 1070 aa, Homo sapiens; identical to SEQ ID NO: 36416
  DOMAIN (154)..(195): kw TRANSCRIPTASE REVERSE II ORF2 domain identified by eMATRIX, accession number DM01354I, p-value=1.000e-40, raw score of 15.55
  DOMAIN (400)..(594): Reverse transcriptase domain identified by PFam, accession name rvt, E-value=8.6e-35, PFam score of 129.0

SEQ ID NO: 48816 - protein, 1115 aa, Homo sapiens; identical to SEQ ID NO: 36436
  DOMAIN (154)..(195): kw TRANSCRIPTASE REVERSE II ORF2 domain identified by eMATRIX, accession number DM01354I, p-value=1.000e-40, raw score of 15.55
  DOMAIN (400)..(675): Reverse transcriptase domain identified by PFam, accession name rvt, E-value=2.8e-87, PFam score of 303.4

SEQ ID NO: 48817 - protein, 1043 aa, Homo sapiens; identical to SEQ ID NO: 45120
  DOMAIN (272)..(317): kw TRANSCRIPTASE REVERSE II ORF2 domain identified by eMATRIX, accession number DM01354N, p-value=1.000e-40, raw score of 13.17
  DOMAIN (356)..(631): Reverse transcriptase domain identified by PFam, accession name rvt, E-value=7.2e-87, PFam score of 302.0
  misc_feature (1)...(1043): Xaa = X or * as defined in Table 2

SEQ ID NO: 48818 - protein, 1108 aa, Homo sapiens; identical to SEQ ID NO: 40447
  DOMAIN (272)..(317): kw TRANSCRIPTASE REVERSE II ORF2 domain identified by eMATRIX, accession number DM01354N, p-value=1.000e-40, raw score of 13.17
  DOMAIN (356)..(631): Reverse transcriptase domain identified by PFam, accession name rvt, E-value=2.6e-81, PFam score of 283.5

SEQ ID NO: 48819 - protein, 1048 aa, Homo sapiens; identical to SEQ ID NO: 47549
  DOMAIN (110)..(151): kw TRANSCRIPTASE REVERSE II ORF2 domain identified by eMATRIX, accession number DM01354I, p-value=1.000e-40, raw score of 15.55
  DOMAIN (356)..(631): Reverse transcriptase domain identified by PFam, accession name rvt, E-value=2.7e-88, PFam score of 306.8

SEQ ID NO: 48820 - protein, 182 aa, Homo sapiens; identical to SEQ ID NO: 34237

SEQ ID NO: 48821 - protein, 1076 aa, Homo sapiens; identical to SEQ ID NO: 45268
  DOMAIN (110)..(151): kw TRANSCRIPTASE REVERSE II ORF2 domain identified by eMATRIX, accession number DM01354I, p-value=1.000e-40, raw score of 15.55
  DOMAIN (356)..(631): Reverse transcriptase domain identified by PFam, accession name rvt, E-value=8.3e-88, PFam score of 305.1

SEQ ID NO: 48822 - protein, 1117 aa, Homo sapiens; identical to SEQ ID NO: 45269
  DOMAIN (154)..(195): kw TRANSCRIPTASE REVERSE II ORF2 domain identified by eMATRIX, accession number DM01354I, p-value=1.000e-40, raw score of 15.55
  DOMAIN (400)..(675): Reverse transcriptase domain identified by PFam, accession name rvt, E-value=5.1e-89, PFam score of 309.1

SEQ ID NO: 48823 - protein, 655 aa, Homo sapiens
  DOMAIN (272)..(317): kw TRANSCRIPTASE REVERSE II ORF2 domain identified by eMATRIX, accession number DM01354N, p-value=1.000e-40, raw score of 13.17
  DOMAIN (356)..(545): Reverse transcriptase domain identified by PFam, accession name rvt, E-value=0.0031, PFam score of -23.6
MGDFNTPLSTSDRSTRQKVNKDTQEMNSALHQADLIDIYRTRHPKSTEYTFLSAPHHTYSKTDHILGSKALLSKCKRTEMITNYLSDHSAIKLELRIKKLTQNCSTTWKLNNLLLNDYWVHNEMKAERKMFFETIENKDTTYQNLWDAFKAVCRGKFIALNAHKRKQERSKIDTLTSQLKELEKQEKTHSKTIRRQEITKIRAELKEIETQKTLQKINESRSWFFERINKIDRTLARLIKKKREKNQIDRIKNDKGDITTDPTQIQTTIREYYKHLYANKPENLEEMDKFLDTYTLPRLNQEEVESLNRPISGSEIVAIINSLPIKKSPGPDGFTAEFYQSYKKELVPLLLKLFQSIEKEGILPNSFYEASIILLPKRGRDTTKKENFRPISLMNIDAKILNKILAKRIQQHIKKLIHHDQVGFIPGMQGIKYLGIQLTRDMKDLLKENYKQLLNEIKEDTNKWKNIPCSWVGRINIVKMAILPKELEKTTLKFIWNQKRACIAKSILSQKKKAGGITLPDFKLYYKATVTKTARLYTKHGTSICCGSFGELLPMQKAKRELAHHMAKAGARVKGQLGHVTQHQLGSIEWFNKYSLSTYYTVDTKPQFSHPTKDNKTGLTCRNRTTVGVDLQAKGNLVVKHLSSLQHCYEFICHI

SEQ ID NO: 48824 - protein, 1033 aa, Homo sapiens; identical to SEQ ID NO: 44316
  DOMAIN (272)..(317): kw TRANSCRIPTASE REVERSE II ORF2 domain identified by eMATRIX, accession number DM01354N, p-value=1.000e-40, raw score of 13.17
  DOMAIN (356)..(631): Reverse transcriptase domain identified by PFam, accession name rvt, E-value=4e-87, PFam score of 302.9
  misc_feature (1)...(1033): Xaa = X or * as defined in Table 2

SEQ ID NO: 48825 - protein, 1084 aa, Homo sapiens; identical to SEQ ID NO: 44902
  DOMAIN (110)..(151): kw TRANSCRIPTASE REVERSE II ORF2 domain identified by eMATRIX, accession number DM01354I, p-value=1.000e-40, raw score of 15.55
  DOMAIN (356)..(631): Reverse transcriptase domain identified by PFam, accession name rvt, E-value=2.3e-81, PFam score of 283.7

SEQ ID NO: 48826 - protein, 1031 aa, Homo sapiens; identical to SEQ ID NO: 45111
  DOMAIN (110)..(151): kw TRANSCRIPTASE REVERSE II ORF2 domain identified by eMATRIX, accession number DM01354I, p-value=1.000e-40, raw score of 15.55
  DOMAIN (356)..(631): Reverse transcriptase domain identified by PFam, accession name rvt, E-value=6.5e-79, PFam score of 275.6

SEQ ID NO: 48827 - protein, 892 aa, Homo sapiens
  DOMAIN (414)..(439): 7 kw REVERSE TRANSCRIPTASE RNA POLYMERASE domain identified by eMATRIX, accession number DM00895E, p-value=4.103e-10, raw score of 15.72
  DOMAIN (385)..(660): Reverse transcriptase domain identified by PFam, accession name rvt, E-value=1.1e-82, PFam score of 288.2
PNLRLIGVPETNGENGTKLENTLQDIIQENFPNLARQANVQNQEIQRTPQRYSSRRATPRHIIVRFTKVEMKEKMLRAAREKAPHHTYSKIDHILGSKALLSKCKRTEIITNYLSDHSAIKLELRIKNLTQNRSTTWKLNNLLLNDYCVHNEMKAEIKMFFETNENKDTTYQNLWDAFKAVCRGKLIALNAHKRKQERSKIDTLTSQLKELEKQEQTHSKASRRQEITKIRAELKEIETQKTLQKINESRSWFFERINKIYRPLARLIKKKREKNQIDAIKNDKGDITTDPTEIQITIREYYKHLYANKLENLEEMDKFLNTYTLPRLNQEEVESLNRPITGSEIVAIINSLPTKKSPGPDGFSAEFYQRYKEELVPFLLKLFQSIEKEGILPNSFYEASIILIPKPGRDTTKKENFRPISLMNIDAKILNKILAKRIQQHIKKLIHHDQVGFIPGMQGWFNICKSINVIQHINRAKDKNHMIISIDAEKAFDKIQQPFLLKTLNKLGIDGSYFKIIRAIYDKPTANIILNGQKLEAFPLKTGTRQRCPLSPLLFNIVLEVLARAIRQEKEIKGIQLGKEEVKLSLFADDMIVYLENPTVSAQNLLKLISNFSKVSGYKINVQKSQEFLYTNNIQTESQIMSELPFTIASKRIKYLGIQLTRDVKNLFKENYKPLLNEIKEDTNKWKNIPCSWVGRINIVKMAILPKVIYRFNAIPIKLPMPFFTELEKATLKFIWNQKRARIAKSILSQKNKAGGITLPDFKLYYKATVTKTAWLQHAVPANDGTTRSPSIDSIQKDPSEFAWRDPELPEVIHILQHQFPSVQANAAAYLQHLWFGDNNVKMKVCRLWGIKLLVYLLGHRVLEVQKNACDALRNLFFGKSTGENKITMKDV

SEQ ID NO: 48828 - protein, 826 aa, Homo sapiens
  DOMAIN (149)..(194): kw TRANSCRIPTASE REVERSE II ORF2 domain identified by eMATRIX, accession number DM01354N, p-value=1.000e-40, raw score of 13.17
  DOMAIN (233)..(421): Reverse transcriptase domain identified by PFam, accession name rvt, E-value=1.1e-12, PFam score of 55.5
MKAEIKMLFETKENKDTTYQNLWDALKAVCRGKFIALNAHKRKQERSKIDTLTSQLKELEKQEQTLSKASRRQEITKIRAELKEIETQKTLQKINESRSWFFERINKIDRPLARLIKKKREKNQIDAIKNDKGDITTDPTEIQTTIREYYKHLYANKLENLEEMDKFLDTYTLPRLNQEEVESLNRPITGAEIVAIINSLPTKKSPGPDGFTAEFYQRYKEELVPFLLKLFQSIEKEGILPNSFYEASIILIPKPGRDTTKKENFRPISLMNIDAKILNKILANRIQQHIKKLIHHDQVGFIPGMQGWFNIRKSINVIQHINRAKDKNHMIISIDAEKAFDKIQQPFMLKTLKKLEIKYLGIQLTKDVKDFFKENYKPLLKEIKEDTNKWKNIPCSWVGRINIVKMAILPKELEKTTLKFIWNQKRACIAKAILSQKNKAGGITLPDFKLYYKATVTKTAWYWYQNRDIDQWNRTETSEITPHIYNYPIFDKPEKNKQWGKDSLFNKWCWENWLALCRKLKLDPFLTPYTKINSRWIKDLNVRPKTIKTLEENLGITIRDIGMGKDFMSKTSTAMATKAKIDKWDLIKLKSFCTAKETTIRVNRQPTKWEKIFATYSSDKGLISRIYNELKQIYKKKTNNPIKKWAKDMNRHFSKEDIYAAKKHMKKCSSSLAIREMQIKTTMRYHLTPVRMAIIKKSGNNRTPTRPIQTSHLSAACLKLNATAAETSISSRIAPRVASLLLTRLYLCSRVEAPGRAFSGQASDTWLYPPSTSQKKYPVPLVPEVGDGALPPTKIQHCGDPSKQEGSLDVGGEKTKAKPNRSLLLF

SEQ ID NO: 48829 - protein, 1135 aa, Homo sapiens
  DOMAIN (154)..(195): kw TRANSCRIPTASE REVERSE II ORF2 domain identified by eMATRIX, accession number DM01354I, p-value=1.000e-40, raw score of 15.55
  DOMAIN (400)..(675): Reverse transcriptase domain identified by PFam, accession name rvt, E-value=2.8e-88, PFam score of 306.7
  misc_feature (1)...(1135): Xaa = X or * as defined in Table 2
MVKGSIQQEELTILNIYAPNTGAPRFIKQVLSDLQRDLDSHTLIMGDFNTPLSTLDRSTRQKVNKDTQELNSALHQADLIDIYRTLHPKSTEYTFFSAPHHTYSKIDHIVGSKALLSKCKRTEIITNYLSDHSAIKLELRIKNLTQSRSTTWKLNNLLLNDYWVHNEMKAEIKMFFETNENKDTTYQNLWDAFKAVCRGKFIALNVYKRKQERSKIDTLTSQLKELEKQEQTHSKASRRQEITKIRAELKEIETQKTLQKINESRSWFFERINKIDRPLARLIKKKREKNQIDTIKNDKGDITTDPTEIQTTIREYYKHLYANKLENLEEMDTFLDTYTLPRLNQEEVESLNRPITGSEIVAIINSLLTKKSPGPDGFTAEFYQRYKEELVPFLLKLFQSIEKEGILPNSFYEASIILIPKPGRDTTKKENFRPISLMNIDAKILNKILANRIQQHIKKLIHHDQVGFIPGMQGWFNIRKSINVIQHINRAKDKSHMIISIDAEKAFDKIQQPFMLKTLNKLGIDGTYFKIIRAIYDKPTANIILNGQKLEAFPLKTGTRQGCPLSPLLFNIVLEVLARAIRQEKEIKGIQLGKEEVKLSLFADDMIVYLENPIVSAQNLLKLISNFSKVSGYKINVQKSQAFLYTNNRQTESQIMGELPFIIASKRIKYLGIQLTRDVKDLFKENYKPLLKEIKEETNKWKNIPCSWVGRINIVKMAILPKVIYRFNAIPIKLPMTFFTELEKTTLKFIWNQKRARIAKSILSQKNKAGGITLPDFKLYYKATVTKTAWYWYQNRDIDQWNRTEPSEITPHIYNYLIFDKPEKNKQWGKDSLFNKWCWENWLAICRKLKLDPFLTPYTKINSRWIKDLNVRPKTIKTLEENLGITIQDIGVGKDFMSKTPKTMATKAKIDKWDLIKLKSFCTAKETTIRVNRQRTTWEKIFATYSSDKGLISRIYNELKQIYKKKTNNPIKKWVKDMNRHFSKEDIYAAKKHMKKCSSSLAIREMQIKTTMRYHLTPVRMAIIKKSGNNRCWRGCGEIGTLLHCWWDCKLVQPLWKSVWRFLRDLELEIPFDPDIPLLAAGPGSAGLRLSMVGASPPSVTTGPGHLLLMHDYLDNWTAERTESISMLLDHRLCX

SEQ ID NO: 48830 - protein, 989 aa, Homo sapiens
  DOMAIN (132)..(173): kw TRANSCRIPTASE REVERSE II ORF2 domain identified by eMATRIX, accession number DM01354I, p-value=1.000e-40, raw score of 15.55
  DOMAIN (382)..(656): Reverse transcriptase domain identified by PFam, accession name rvt, E-value=1.1e-81, PFam score of 284.8
APRFIKQVLSDLQRDLDSHTIIMGDFNTPLSTLDRSTRQKVHKDTQELNSALHQADLIDIYRTLHPKSTEYTCFSAPHHTYSKIDHIVGSKALLSKCKRSEIITNCLSDHSAIKLELRIKKLTQNRSTTWKLNNLLLNDYWVHNEMKAEIRMFFETNENKDTTYQNLWDTFKAVCRGKFIALNAHKRKQERSKIDTLTSQLKELEKQEQTHSKASRRQEITKIRAELKEIETQKTLQKINESRSWFFERINKIDRPLARLIKKKREKNQIDAIKNDKGDITTDPTEIQTTIREYYKHLYVNKLENLEEMNKFLDTCTLPRLNQEEVESLNRPITGAEIVAIINSLPTKKNPGPDGLTAEFYQRYKEELVPFLLKLFQSIEKEGILPNSFYEASIILIPKPGRDTTKKENFRPISLTNIDAKILNKILANRIQQHIKKLIHHDQVGFIPGMESWFNIRKSINVIQHINRAKDKNHMIISIDAEKAFDKIQQPFMLKTLNKLGIDGTYFKIIRAIYDKPTANIILNGQKLEAFPLKTGTRQGCPLSLLLFNIVLEVLARAIRQEKEIKGIQLGEEVTLSLFADDMIVYLENPIVSAQNLLKLISTFSKVSGYKINVQKSQAFLYTNNRQTESQIMSELPFTIASKRIKYLGILLTRDVKDLFKENYKPLLKEIKEDTNKWKNIPCSWVGRINIVKMAILPKVIYRFNAISIKLPMTLFTELEKTTLKFIWKQKRARIAKSILSQKKCAGGITLPDFKLYCKATVTKTAWYWYQNRDIDQWNRTDPSEITPHTYNYLIFDKPEKNKQWGKDSLFNKWCWENWLAICRKLKLDPFLTPYTKINSRWIKDLNIRPKTIKTLEENLGITIQDIGMGKDFMSKTPKAMATKAKIDKWDLIKLKSFCTAKETTIRVNRQPTTWEKIFATYSSDKGLISRIYNELKQIYKKKTNNPIKKWAKDMNRHFSKEDIYAAKKHMKKMVMYRWVFGVDVLSVC

SEQ ID NO: 48831 - protein, 118 aa, Homo sapiens
  misc_feature (1)...(118): Xaa = X or * as defined in Table 2
AIASESASPKAWQLPCGAAQQFAALPGLGNYKFPLTLITGYGSNKSPPXGYLVFQTYSSLPLLRLPPGHFGFLLPLSQRLRRELQCWLGXLTQTIKMKSVYHSTTEVRKSMHGIQEIH

SEQ ID NO: 48832 - protein, 765 aa, Homo sapiens
  DOMAIN (123)..(164): kw TRANSCRIPTASE REVERSE II ORF2 domain identified by eMATRIX, accession number DM01354I, p-value=1.000e-40, raw score of 15.55
  DOMAIN (369)..(644): Reverse transcriptase domain identified by PFam, accession name rvt, E-value=4.2e-89, PFam score of 309.4
  misc_feature (1)...(765): Xaa = X or * as defined in Table 2
MSSEWEWLRCSEVKGQRDVRPGCLGWDFRVYIVEDTQDEDRTWSVKEACELVLRVQEMIITRVVDAAPHHTYSKIDHIVGSKALLSKCKRTEIITNCLSDHSAIKLELRIKNLTQSRSTTWKLNNLLLNDYWVHNEMKAEIKMFFETNENKDTTYQNLWDAFKAVCRGKFIALNAYKRKQERSKIDTLTSQLKELEKQEQTHSKASRRQEITKIRAELKEIETQKTLQKINESRSWFFERINKIDRPLARLIKKKREKNQIDAIKNDKGDITTDPTEIQTTIREYYKQLYANKLENLEEMDTFLDTYTLPRLNQEEVESLNRPITGSEIVAIINSLPTKKSPGPDGFTAEFYQRYKEELVPFLLKLFQSIEKEGILPNSFYEASIILIPKPGRDTTKKENFRPISLMNIDAKILNKILANRIQQHIKKLIHHDQVGFIPGMQGWFNIRKSINVIQHINRAKDKNHMIISIDAEKAFDKIQQPFMLKTLNKLGIDGTYVKIIRAIYDKPTANIILNGQKLEAFPLKTGTRQGCPLSPLLFNIVLEVLARAIRQEKEIKGIQLGKEEVKLSLFADDMIVYLENPIVSAQNLLKLISNFSKVSGYKINVQKSQAFLYTNNRQTESQIMGELPFTIASKRIKYLGIQLTRDVKDLFKENYKPLLKEIKEDTNKWKNIPCSWVGRINIVKMAILPKVIYRFNAIPIKLPMTFFTELEKTTLKFIWNQKRARIAKSILSQKNKAGGITLPDFKLYYKATVTKTACSWDLQX

SEQ ID NO: 48833 - protein, 1270 aa, Homo sapiens; identical to SEQ ID NO: 44884
  DOMAIN (154)..(195): kw TRANSCRIPTASE REVERSE II ORF2 domain identified by eMATRIX, accession number DM01354I, p-value=1.000e-40, raw score of 15.55
  DOMAIN (400)..(675): Reverse transcriptase domain identified by PFam, accession name rvt, E-value=1.1e-87, PFam score of 304.7

SEQ ID NO: 48834 - protein, 1368 aa, Homo sapiens
  DOMAIN (110)..(151): kw TRANSCRIPTASE REVERSE II ORF2 domain identified by eMATRIX, accession number DM01354I, p-value=1.000e-40, raw score of 15.55
  DOMAIN (356)..(1366): Reverse transcriptase domain identified by PFam, accession name rvt, E-value=1e-143, PFam score of 490.9
MGDFNTPLSTLDRSTRQKVNKDTQELNSALHQADLIDIYRTLHPKSTEYTFFSAPHHTYSKIDHIVGSKALLSKCKRTEIITNYLSDHSAIKLEIRIKNLTQSHSTTWKLNNLLLNDYWVHNEMKAEIKMFFETNENKDTTYQNLWDAFKAVCRGKFIALNAYKRKQERSKIDSLTSQLKELEKQEQTHSKASRRQEITKIRAELKEIETQKTLQKINESRSWFFERINKIDRPLARLIKKKREKNQIDTIKNDKGDITTDPTEIQTTIREYYKHLYANKLENLEEMDTFLDTYTLPRLNQEEVESLNRPITGSEIVAIINSLPTKKSPGPDGFTAEFYQRYKEELVPFLLKLFQSIGKEGILPNSFYEASIILTPKPGRDTTKKENFRPISLMNIDAKILNKILANRIQQHIKKLIHHDQVGFIPGMQGWFNIRKSINVIQHINRAKDKNHMIISIDAEKAFDKIQQPFMLKTLNKLGIDGTYFKIIRAIYDKPTANIILNGQKLEAFPLKTGTRQGCPLSPLLFNIVLEVLARAIRQEKEIKGIQLGKEEVKLSLFADDMIVYLENPIVSAQNLLKLISNFSKVSGYKINVQKSQAFLYTNNRQTESQIMGELPFTIASKRIKYLGIQLTRDVKDLFKENYKPLLKEIKEDTNKWKNIPCSWVGRINIVKMAILPKVIYRFNAIPIKLPMTFFTELEKTTLKFIWNQKRARIAKSILSQKNKAGGITLPDFKLYYKATVTKTAWYWYQNRDIDQWNRTEPSEIMPHIYNYLIFDKPEKNKQWGKDSLFNKWCWENWLAICRKLKLDPFLTPYTKINSRWIKDLNVRPKTIKTLEENLGITIQDIGVGKDFMSKTPKAMATKAKIDKWDLIKLKSFCTAKETTIRVNRQPTTWEKIFATYSSDKGLISRIYNELKQIYKKKTNNPIKKWAKDMNRHFSKEDIYAAKKHMKKCSSSLAIREMQIKTTMRYHLTPVRMAIIKKSGNNRSWYFEKINKIDRLLARLIKKKREKNQIDAIKNDKGDITTDPTEIQTTTREYYKHLYANKLENLEEMDKFLDTYNLPRLKQEEVESLNRPIRGSEIVAIINSLPTKKSPGPDGFTAEFYHRYKEELVPLLLKLFQSIEKEVILPNSFYEASIILIPKPDRDTAKKENFRPISLMNIDAKILNKILANRIQQHIKKLIHHDQVGFIPGMQGWFNIRKSVNVIQHINRTKDKNHMIISIDAEKSFDKIQQHFMLKTLNKLGIDGSYLKIIRATYDKPTANIILNGQKLEAFPLKTGTRHGCPLSPLLFNIVLEVLARAIRQEKEIKGIQLGKEEVKLSLFIDDMIVYLENPIISAQNLLKLISNFSSLRIQNQCTKITSILVHQ

SEQ ID NO: 48835 - protein, 1024 aa, Homo sapiens
  DOMAIN (251)..(296): kw TRANSCRIPTASE REVERSE II ORF2 domain identified by eMATRIX, accession number DM01354N, p-value=1.000e-40, raw score of 13.17
  DOMAIN (335)..(610): Reverse transcriptase domain identified by PFam, accession name rvt, E-value=1.4e-88, PFam score of 307.7
MEDTAYQLVHQYPTRMQARRCRIALSQWSSSHPLPAKRDAPVTSGAHPRRRLSSRRYPPRQSRQARLPTWWPAVSEAAVPQPLLSCYSAPSAMFPVSPGARWGTTTGWKFFETNENKDTTYQNLWDAFKAVCRGKFIPLNAHKRKQERSKIDTLTSQLKELEKQEQTHSKASRRQEITKIRAELKEIETQKTLQKINESRSWFFERINKIDRPLARLIKKKREKNQIDTIKNDKGDITTNPTEIQTTIREYYKHLYAKKLENLEEMDTFLDTYTLPRLNQEEVESLNRPITGAEIVAIFNSLPTKKSPGPDGFTAEFYQRYKEELVPFLLKIFQSIEKEGILPNSFYEASIILIPKPGRDTTKKENFRPISLMNIDAKILNKILANRIQQHIKKLIHHDQVGFIPGMQGWFNIRKSINVIQHINRAKDKNHMIISIDAEKAFDKIQQPFMLKTLNKLGIDGTYFKIIRAIYDKPTANIILNGQKLEAFPLKTGTRQGCPLSPLLFNIVLEVLARAIRQEKEIKGIQLGKEEVKLSLFADDMIVYLENPIISAQNLLKLISNFSKVSGYKINVQKSQAFLYTNNRQTESQIMSELPFTIASKRIKYLGIQLTRDVKDLFKENYKPLLKEIKEDTNKWKNIPCSWVGRINIVKMAILPKVIYRFNAIPIKLPMTFFTELEKTTLKFIWNQKRARIAKSILSQKNKAGGITLPDFKLYYKATVTKTAWYWYQNRDIDQWNRTEPSEITPHTYNYLIFDKPEKNKQWGKDSLFNKWCWENWLAICRKLKLDPFLTPYTKINSRWIKDLNVRPKTIKTLEENLGSTIQDIGVGKDFMSKTPKAMATKAKIDKWDLIKLKSFCTAKETTIRVNRQPTTWEKIFATYSSDKRLISRIYNELKQIYKKKTNNPIKKWAKDMNRHFSKEDIYAAKKHMKKCSSSLAIREMQIKTTMRYHLTPVRMAIIKKSGNNRMAAGAPTNPVSHDGLKEVTSMMEQRTHFSTFADIAKLAATASALESCNVQSRAPLGTD

SEQ ID NO: 48836 - protein, 1064 aa, Homo sapiens; identical to SEQ ID NO: 45116
  DOMAIN (344)..(390): kw TRANSCRIPTASE REVERSE II ORF2 domain identified by eMATRIX, accession number DM01354O, p-value=1.000e-40, raw score of 8.73
  DOMAIN (379)..(651): Reverse transcriptase domain identified by PFam, accession name rvt, E-value=4.2e-80, PFam score of 279.6

SEQ ID NO: 48837 - protein, 661 aa, Homo sapiens; identical to SEQ ID NO: 34819
  DOMAIN (235)..(260): 7 kw REVERSE TRANSCRIPTASE RNA POLYMERASE domain identified by eMATRIX, accession number DM00895E, p-value=3.333e-11, raw score of 15.72
  DOMAIN (206)..(481): Reverse transcriptase domain identified by PFam, accession name rvt, E-value=4.6e-82, PFam score of 286.0

SEQ ID NO: 48838 - protein, 1052 aa, Homo sapiens; identical to SEQ ID NO: 34359
  DOMAIN (383)..(408): 7 kw REVERSE TRANSCRIPTASE RNA POLYMERASE domain identified by eMATRIX, accession number DM00895E, p-value=3.333e-11, raw score of 15.72
  DOMAIN (354)..(629): Reverse transcriptase domain identified by PFam, accession name rvt, E-value=4.9e-88, PFam score of 305.9

SEQ ID NO: 48839 - protein, 1156 aa, Homo sapiens
  DOMAIN (514)..(539): 7 kw REVERSE TRANSCRIPTASE RNA POLYMERASE domain identified by eMATRIX, accession number DM00895E, p-value=3.333e-11, raw score of 15.72
  DOMAIN (485)..(760): Reverse transcriptase domain identified by PFam, accession name rvt, E-value=2.8e-87, PFam score of 303.4
MASVSSATFSGHGARSLLQFLRLVGQLKRVPRTGWVYRNVQRPESVSDHMYRMAVMAMVIKDDRLNKDRCVRLALVHDMAECIVGDIAPADNIPKEEKHRREEGNKCHKQKAMGKHLKEPHVLGQETKGLESTDVLLPLPAAGQDLGREKKIREEAMKQITQLLPEDLRKELYELWEDLEFESPSCLDSLSLCCSLKPQSESSPVLPEGCETLIQRLCAVGTGVTAALATRLCRASGLPAPHQWASELQRSRKKEEEEGKTSKDFQCFKKMLDFVVRHYQAFSKFGFQITTAKRKQERSKIDTLTSQLKELEKQEQTHSKASRRQEITKIRAELKEIETQKTLQKINESRSWFFERINKIDRPLARLIKRKREKNQIDTIKNDKGDITTDPTEIQTTIREYYKHLYANKLENLEEMDTFLDTYTLPRLNQEEVESLNRPITGSEIVAIINSLPTKKSPGPDGFTAEFYQRYKEELVPFLLKLFQSIEKEGILPNSFYEASIILIPKPGRDTTKKENFRPISLMNIDAKILNKILANRIQQHIKKLIHHDQVGFIPGMQGWFNIRKSINVIQHINRAKDKNHMIISIDAEKAFDKIQQPFMLKTLNKLGIDGTYFKIIRAIYDKPTANIILNGQKLEAFPLKTGTRQGCPLSPLLFNIVLEVLARAIRQEKEIKGIQLGKEEVKLSLFADDMIVYLENLIVSAQNLLKLISNFSKVSGYKIDVQKSQAFLYTNNRQTESQIMGELPFTIASKRIKYLGIQLTRDVKDLFKENYKPLLKEIKEDTNKWKNIPCSWVGRINIVKMAILPKVIYRFNAIPIKLPMTFFTELEKTTLKFIWNQKRARIAKSILSQKNKAGGITLPDFKLYYKATVTKTAWYWYQNRDIDQWNRTEPSEIMPHIYNYLIFDKPEKNKQWGKDSLFNKWCWENWLAICRKLKLDPFLTPYTKINSRWIKDLNVRPKTIKTLEENLGITIQDIGVGKDFMSKTPKAMATKAKIDKWDLIKLKSFCTAKETTMRVNRQPTTWEKIFTTYSSDKGLISRIYNELKQIYKKKTNNPIKKWAKDMNRHFSKEDIYAAKKHMKKCSSSLAIREMQIKTTMRYHLTPVTVQVPGTVEFPGQIAQSIPDLFRSFASSVLKVPCITGGPLIGPREDQRAGIL

SEQ ID NO: 48840 - protein, 778 aa, Homo sapiens; identical to SEQ ID NO: 32655
  DOMAIN (218)..(264): kw TRANSCRIPTASE REVERSE II ORF2 domain identified by eMATRIX, accession number DM01354O, p-value=1.000e-40, raw score of 8.73
  DOMAIN (251)..(476): Reverse transcriptase domain identified by PFam, accession name rvt, E-value=4.4e-42, PFam score of 153.2

SEQ ID NO: 48841 - protein, 1284 aa, Homo sapiens; identical to SEQ ID NO: 36442
  DOMAIN (627)..(652): 7 kw REVERSE TRANSCRIPTASE RNA POLYMERASE domain identified by eMATRIX, accession number DM00895E, p-value=3.333e-11, raw score of 15.72
  DOMAIN (598)..(873): Reverse transcriptase domain identified by PFam, accession name rvt, E-value=1.6e-88, PFam score of 307.5

SEQ ID NO: 48842 - protein, 1019 aa, Homo sapiens; identical to SEQ ID NO: 38238
  DOMAIN (336)..(377): kw TRANSCRIPTASE REVERSE II ORF2 domain identified by eMATRIX, accession number DM01354I, p-value=1.000e-40, raw score of 15.55
  DOMAIN (582)..(857): Reverse transcriptase domain identified by PFam, accession name rvt, E-value=2.2e-88, PFam score of 307.0

SEQ ID NO: 48843 - protein, 268 aa, Homo sapiens
SGIYMIGFEQVLKAQPPLSSPNGPMNKVATVVGMEVMHGLSNMDFHSRRLTWLRPLPGFTGPGYQGVKVEVAPLTITPSDPLAKFLLLISATSTSLEVTVPEGEMLPPRDTTKIATFGTQTGFLALQLADGLLWDLVIIPGKGKPSRDLVESPSPYSTYEGIDGWPDEPAPTATKPPVMPAPALPPDTRSGSKAPTVPTPYPQMEHHQVQLASNNSNTEALGHLSPQSSWVQTPGQNSGPAIPNHLGKDMISPPQMAPAGVKWESQKY

SEQ ID NO: 48844 - protein, 944 aa, Homo sapiens; identical to SEQ ID NO: 32660
  DOMAIN (81)..(122): kw TRANSCRIPTASE REVERSE II ORF2 domain identified by eMATRIX, accession number DM01354I, p-value=1.000e-40, raw score of 15.55
  DOMAIN (327)..(577): Reverse transcriptase domain identified by PFam, accession name rvt, E-value=3.3e-77, PFam score of 269.9

SEQ ID NO: 48845 - protein, 1908 aa, Homo sapiens
  DOMAIN (102)..(143): kw TRANSCRIPTASE REVERSE II ORF2 domain identified by eMATRIX, accession number DM01354I, p-value=1.000e-40, raw score of 15.55
  DOMAIN (348)..(1297): Reverse transcriptase domain identified by PFam, accession name rvt, E-value=3.9e-169, PFam score of 575.3
  misc_feature (1)...(1908): Xaa = X or * as defined in Table 2
MQKKHDKIRNSFMIKTLKKLRTEGIYLNTIKATYKKPITNIILNGENQKAFALRSGTRFWILALCQMSRLRKLTNYLSDHSAIKLELRIKNPTQSRPTTWKLNNLLLNDYWVHNEMKAEIKMFFETNENKDTTYQNLWDAFKAVCRGKLIALNAHKRKQERSKIDTLTSQLKELEKQEQTHSKASRRQEITKIRAELKETETQKTLQKINESRSWFFERINKIDRPLARLIKKKREKNQIDTIKNDKGDITTDPTEIQTTIREYYKHLYTNKLENLEEMDKFLDTYTLPRLNQEEVESLNRPITGAEIVAIINSLPTKRSPGPDGFTAEFYQRYKEELVPFLLKLFQSIEKEGILPNSFYEASIILIPKPGRDTTKKENFRPISLMNIEVKILNKILANRIQQHIKKLIHHDQVGFIPGMQGWFNICKSVNVIQHINRAKDKNHMIISIDAEKAFDKIQQPFMLKTLNKLGIDGMYFKIIRAIYDKPTANIILNGQKLEAFPLKTGTRQGCPLSPLLFNIVLEVLTRAIRQEKEINGIQLGKEEVKLSLFADDMIVYLENPIVSAQNLLKLISNFSKVSGYKINVQKSQAFLYTNNRQTESQIMSELPFTIASKRIKYLGIQLTRDVKDLFKENYKPLLKEIKEDANKWKNIPCSWVGRINIVKMTILPKVVRRFQYAPPLVPTXFMIKTLKKLRTEGIYLNTIKATYKKPITNIILNGENQKAFALRSGTRFWILALCQMSRLRKLTNYLSDHSAIKLELRIKNPTQSRPTTWKLNNLLLNDYWVHNEMKAEIKMFFETNENKDTTYQNLWDAFKAVCRGKLIALNAHKRKQERSKIDTLTSQLKELEKQEQTHSKASRRQEITKIRAELKETETQKTLQKINESRSWFFERINKIDRPLARLIKKKREKNQIDTIKNDKGDITTDPTEIQTTIREYYKHLYTNKLENLEEMDKFLDTYTLPRLNQEEVESLNRPITGAEIVAIINSLPTKRSPGPDGFTAEFYQRYKEELVPFLLKLFQSIEKEGILPNSFYEASIILIPKPGRDTTKKENFRPISLMNIEVKILNKILANRIQQHIKKLIHHDQVGFIPGMQGWFNICKSVNVIQHINRAKDKNHMIISIDAEKAFDKIQQPFMLKTLNKLGIDGMYFKIIRAIYDKPTANIILNGQKLEAFPLKTGTRQGCPLSPLLFNIVLEVLTRAIRQEKEINGIQLGKEEVKLSLFADDMIVYLENPIVSAQNLLKLISNFSKVSGYKINVQKSQAFLYTNNRQTESQIMSELPFTIASKRIKYLGIQLTRDVKDLFKENYKPLLKEIKEDANKWKNIPCSWVGRINIVKMTILPKSEKVSVCPSLGAHVIFKPYKDWPVCARTLTPARSPNLIKNRACHPSLLSKLFLDQLIILSYSPQKASLCTGSDRLAAASSPGVQSPVAPPRYSVNHWESGSMEAARPPPTAGKFVVVGGGIAGVTCAEQLATHFPSEDILLVTASPVIKAVTNFKQWQQRWCLISGAYGADRAEAQNTGIHGGIKVLGSGTVMILVPRVQISKILEEFDVEEQSSTMLGKRFPNIKVIESGVKQLKSEEHCIVTEDGNQHVYKKLCLCAGAKPKLICEGNPYVLGIRDTDSAQEFQKQLTKAKRIMIIGNGGIALELVYEIEGCEVIWAIKDKAIGNTFFDAGAAEFLTSKLIAEKSEAKIAHKRTRYTTEGRKKEARSKSKADNVGSALGPDWHEGLNLKGTKEFDLGEDGGLKVDDHMHTSLPDIYAAGDICTTSWQLSPVWQQMRLWTQARQMGWYAAKCMAAASSGDSIDMDFSFELFAHVTKFFNYKVVLLGKYNAQGLGSDHELMLRCTKGREYIKVVMQNGRMMGAVLIGETDLEETFENLILNQMNLSSYGEDLLDPNIDIEDYFD

SEQ ID NO: 48846 - protein, 1046 aa, Homo sapiens
  DOMAIN (294)..(339): kw TRANSCRIPTASE REVERSE II ORF2 domain identified by eMATRIX, accession number DM01354N, p-value=1.000e-40, raw score of 13.17
  DOMAIN (378)..(653): Reverse transcriptase domain identified by PFam, accession name rvt, E-value=9.3e-78, PFam score of 271.7
MGKKQNRKTGNSKKQSASLPPKERSFSPATEQSWTENDFDELREEGFRRSNYYELREDIQTKGKEVENFEKNLEESPHHTYSKIDHILGSKALLSKCKRTEIITNYLSDHSAIKLELRIKNLTQNRSTTWKLNNLLLNDYWVPNEMKAEIKMFFETNENKDTTYQNLWEAFKAVCRGKFIALNAHKRKQERAKIDTLTSQLKELEKQEQTHSKASRRQEITKIRAELKERETQKTLQKINESRSWFFERINKIDRPLARLIKKKREKNQIEAIKNDKGVITTDPTEIQTTIREYYKHLYTNKLENLEEMDKFLDTYTLPRPNQEEVESLNRPITGSEIVAIINSLPTKKSPGPDGFTAKFYQRYKEELVSFLLKLFQSIEKEGILPNSFYEASIILKPKPGRDITKKENFRPISLMNIDAKILNKILAKRIQQHIKKLIHHDQVGFIPGMQGWFHISKSINVIQHINGAKDKNHMIISIDAEKAFDKIKQHFMLKTLNKLGIDGRYFKIIRAIYDKPTANIILNGHKLEAFPLKTGTRQGCPLSPLPFNIVLEVLARAIRQEKEIKGIQLGKEEVKLSLFADDMIVYLENPIVSAQNLLKLISNFSKVSGYNINVQKSQAFLYTNNRQTESQIMSELPFTMASKRIKYLGIQLTRDVKDLFKENYKPLLKEIKEDTNKWKNIPCSWVGRINIVKMAILPKVIYRFSAIPIKLPMTFFTELEKTTLKFIWNQKRARIVKSILSQKNKAGGTTLPDFKLYYKATVTKIAWYWYQNRDIDQWNRTEPSEIMPHIYNYLIFDKPEKNKQWGKDSLFNKWCWENWLAICRKLKLDPFLTPYTKINSRWIKDLNVRPKTIKTLEENLGITIQDIGMGKDFMSKTPKAMATKPKIDKWDLMKLKSFCTAKETTIRVNRQPTKWEKIFATYSSDKGLISRIYNELKQIYKKKTNNPIKKWAKDMNRHFSKEDIYAAKKHMKKCSPSLAIREMQIKTTMRYHLPPVRMAIIKKSGNNRKSLQISALGNYTTQPYVRFGFDSLVVFTRLLPKKFIN

SEQ ID NO: 48847 - protein, 972 aa, Homo sapiens
  DOMAIN (381)..(406): 7 kw REVERSE TRANSCRIPTASE RNA POLYMERASE domain identified by eMATRIX, accession number DM00895E, p-value=7.111e-11, raw score of 15.72
  DOMAIN (352)..(575): Reverse transcriptase domain identified by PFam, accession name rvt, E-value=3.2e-46, PFam score of 167.0
PSLRLIGVPESDGENGTKLENTLQDIIQENFPNLARQANIQIQEIQRTPQRCSSRRATPTHVIVRFTKVEMKDKMLRAAREKDHSAIKLELRIKKLTQNRSTTWKLNNLLQNDYWVHNEMKAEIKMFSETNGNKDTTYQYLWHTFKAVCRGKFIALNAHKRKQERSKIDTLTSQLKELEKQEQTHSKASRRQEITKIRAELKEIETQNTVQKINESRSWFFEKINKTDRLLARLIKKKREKNQIDAIKNDKGDITTDPTEIQTTITEYYKHLYANKLDNLEEMDKFLDTYTIPRLKQEEVESLNRPITDSEIVAIINSLPTKKSPGADGFTAKFYQTYKEELVPFLLKLFQSIEKEGILPNSLYEASIILIPKPGRDTTKKESFRPISLMNADAKILNTILANRIQQHIKKLIYHDQVGFIPGMQGWFNIRKSINVIQHINRAKDKNHMIISIDAGKAFDKIQQSFMLKALNKLDIDGTAIRQEKEIKGIQLGKEEVKLSLFADDMIVYLENPIVSAQNLLKLISNFSKVSGYKINVQKSQAFLYTNNRQTESQIMSELPFTIASKRIKYLGIQLTRDVKDLFKENYKPLLKEIKEDINKWKNIPCSWVGRINIVKMAILPKNWKKTTLKFIWNQKRARITKAILSQKNKAGGITLPDFKLYYKATVTKTAWYWYQNRDIDQWNRTEPSEIMPHICNYLIFDKPEKNKQWGKDSLFNKWCWENWLAICRKLKLDPFLTPYTKINSRWIKDLNIRPKTIKTLEENLGITIRDIGMGKDFMSKTPKALATKAKIDKWDLIKLKSFCTAKETTIRVNRQPTKWEKIFATYSSDKGLISRIYNELKQIYKKKTNNPIKKWVKDMNRHFSKEDIYAAKKHMKKCSSSLAIREMQIKTTLPTGRLIETFQSNEHQSEVKLLKQDKKKWVGSWNENIHQQLKAQTSKGIFPHPLPLCCVMISNGSQSVACKILWFSNTP

SEQ ID NO: 48848 - protein, 980 aa, Homo sapiens
  DOMAIN (154)..(195): kw TRANSCRIPTASE REVERSE II ORF2 domain identified by eMATRIX, accession number DM01354I, p-value=1.000e-40, raw score of 15.55
  DOMAIN (1)..(140): AP endonuclease family 1 domain identified by PFam, accession name AP_endonucleas1, E-value=8.8e-09, PFam score of 17.4
MVKGSIQQEELTILNIYAPNTGAPRFIKQVLSDLQRDLDSHTLIMGDFNTPLSTLDRSTRQKVNKDTQELNSALQQADLIDIYRTLHPKSTEYTFFSAPHHTYSKIDHILGSKALLSKCKRTEIITNCLSDHSAIKLELRIKNLTQNRSTTWKLNNLLLNDYWVHNEMKAEIKMFFETNENKDTTYQNLWDAFKAVCRGKFIALNAHKRKQERSKIDTLTSQLKELEKQEQTHSKASRRQEIIKIRAELKEIETQQTLQKINESRSWFFERINKIDRPLARLIKKKREKNQIDAIKNDKGDITTDPTEIQTTIREYYKHLYANKLENLEEMDKFLDTYTLPRLNQEEVESLNRPITGSEIVAIINSLPTKKSPGPDGFTAEFYQRAIRQEKEIKGIQLGKEEVKLSLFADDMIVYLENPIVSAENLLKLISNFSKVSGYKINVQKSQAFLYTNNRQTDSQIMSEIPFTIASKRIKYLGIQLTRDVKDLFKENYKPLLKEIKEDTNKWKNIPCSWVGRINIMKMAILPKVIYRFNAIPIKLPMPFFTELEKTTLKFIWNQKKPRIAKSILSQKNKAGGITLPDFKLYYKATVTKTAWYWCQNRDIDQWNRTEPSEITPHIYNYLIFDIPEKNKQWGKDSLFNKWCWENWLAICRKLILDPFLTPYIKINSRWIKDLNVGPKTIKTLEENLGFTIQDIGMGKDFMSKTPKAMATKAKIDKWDLIKLKSFCTAKETTIRVNRQPTKWEKIFATYSSDKGLISRIYNELKQIYKKKTNNPIKKWVKDMNRHFSKEDIYAAKKHMKKCSSSLAIREMQIKTTVRYHLTPVRMVIIKKSGNNRCWRGCGEIGTLLHCWWDCKLVHPLWKSVWRFLRDLELEIPFDPAILLLGIYPKDYKSCCYKDTCTHEKAEIQKSKGIRDYGEIGTRTEDMDSQFRPLSVVRAQIIPFEFPWEGIPLGGPFPRHSCSYPVGLALLYHSSSAAGP

SEQ ID NO: 48849 - protein, 1213 aa, Homo sapiens
  DOMAIN (294)..(335): kw TRANSCRIPTASE REVERSE II ORF2 domain identified by eMATRIX, accession number DM01354I, p-value=1.000e-40, raw score of 15.55
  DOMAIN (540)..(815): Reverse transcriptase domain identified by PFam, accession name rvt, E-value=7.7e-89, PFam score of 308.6
MGKKQNRKTGNSKTQSASPPPKERSSSPATEQSWMENDFDELREEGFRRSNYSELWEDIQTKGKEVENFEKNLEECITRITNTEKCLKELMELKTKARELHEECRSLRSRCDQLEERVSAMEDEMNEMKREGKFREKRIKRNEQSLQEIWDYVKRPNLRLIGVPESDVENGTKLENTLQDIIQENFPNLARQANVQIQEIQRMPQRYSSRRATPRHIIVRFTKVEMKEKMLRAARQKAPHHTYSKIDHIVGSKALLSKCKRTEIITNYLSDHSAIKLELRIKNLTQSRSTTWKLNNLLLNDYWVHNEMKAEIKMFFETNENKDTTYQNLWDTFKAVCRGKFIALNAYKRKQETSKIDTITSQLKELEKQEQTHSKASRRQEITKIRAELKEIETQKTLQKINESRSWFFERINKIDRPLARLIKKKREKNQIDTIKNDKGDITTDPTEIQTTIREYYKHLYANKLENLEEMDTFLDTYTLPRLNQEEVESLNRPITGSEIVAIINSLPTKKSPGPDGFTAEFYQRYKEELVPFLLQLFQSIEKEGILPNSFYEASIILIPKPGRDTTKKENFRPISLMNIDAKILNKILANRIQQHIKKLIHHDQVGFIPGTQGWFNIRKSINVIQHINRAKDKNHMIISIDAEKAFDKIQQPFMLKTLNKLGIDGTYFKIIRAIYDKPTANIILNGQKLEAFPLKTGTRQGCPLSPLLFNIVLEVLARAIRQEKEIKGIQLGKEEVKLSLFADDMIVYLENPIVSAQNLLKLISNFSKVSGYKINVQKSQAFLYTNNRQTESQIMSELPFTIASKRIKYLGIQLTRDVKDLFKENYKPLLKEIKEDTNKWKNIPCSWVGRINIVKMAILPKVIYRFNAIPIKLPMTFFTELEKTTLKFIWNQKRACISKSILSQKNKAGGITLPDFKLYYKATVTKTAWYWYQNRDIDQWNRTEPSEIMPHIYNYLIFDKPEKNKQWGKDSLFNKWCWENWLAICRKLKLDPFLTPYTKINSRWIKDLNVRPKTIKTLEENLGITIQDIGVGKDFMSKTPKAMATKAKIDKWDLIKLKSFCTAKETTIRVNRQPTTWEKIFTTYSSDKGLISRIYNELKQIYKKKTNNPIKKWAKDMNRHFSKEDIYAAKKHMKKCSSSLAIREMQIKTTMRYHLAPVRMAIIKKSGNNRIKRLTDSERRKMKSEDRLTCEDSRNLITFIQWNKEQEEERKT

SEQ ID NO: 48850 - protein, 50 aa, Homo sapiens
HLKHRWICRVIWPKWQSSLHSSLDLLQSLLLFQTPLKTGSLSGHLIHGLE

SEQ ID NO: 48851 - protein, 1259 aa, Homo sapiens
  DOMAIN (562)..(607): kw TRANSCRIPTASE REVERSE II ORF2 domain identified by eMATRIX, accession number DM01354N, p-value=1.000e-40, raw score of 13.17
  DOMAIN (646)..(871): Reverse transcriptase domain identified by PFam, accession name rvt, E-value=4.9e-50, PFam score of 179.7
MHIVVETALSASWQNKAKPPARVLLQVVPNVWFLVAVVWELYPSLDLMDRSIECSSSPATEQSWTENDYDKLREEGFRRSNYSELQEDIQTKGKDVENFEKNLEECITRITNTQKCLKELMELKTKARELREECRSLRSRCDQLEERVSVMEDEMNEMKQEGKFREKRIKRNEQSLQEIWDYVKRPNLRLIGVPESDGENGTKLKNTLQDIIQENFPNLARQAKVQIQEIQRMPQRYSLTRATPRHIIVRFTKVEMKEKMLRAAREKGAPRFIKQVLSDLQRDLDSHTLIMGDFNTPLSTLDRSTRQKVNKDTQELNSALHQVDLIDIYRTLHPKSTEYTFFSAPHHTYSKIDHILGSKALLSKCKRTEIITNYLSDHSAIKLELRIKNLTQNRSTTWKLNNLLLNDYWVHNEMKLEIKMFFETNENKDTTYQNLWDAFKAVYRGKFIALNAHKRKQERSKIDTLTSQLKELEKQEQTHSKASRRQEITKIRAELKEIETQKTLQKINESRSWFFERINKIDRLLARLIKRKREKNQIDAIKNDKGDITTNPTEIQTTIREYYKHLYANKLENLEEMDKFLDTYTLPRLNQEEVESLNRPITGSEIVAIINSLPTKKSPGPDGFTAEFYQRYKKELVPFLLKLFQSIEKEGILPNSFYEASIILIPKPGRDTTKKENFRPISLMNIDAKTLNKILADRIQQHIKKLIHHDQVGFIPGMQGWFNIHISINVIQHINRAKDKNHMIICIDAERAFDKIQQPFMLKTLNKLVLEVLARAIRQEKEIKGIQVGKEEVKLSLFADDMIVYLENPIVSAQNLLKLISNFSKVSGYKINVQKSQAFLYTNNRQTESQIMSELPFTIASKRIKYLGIQLTRDVKDLFKENYKPLLNEIKEDTNKWKNILCSWVGRINIVKMAILPKVIYRFNAIPIKLPMPFFTELEETTLKFIWNQKRARIAKAILSQKKKAGGITLPDFKLYYKATVTKTAWYWYQNTDIEQWNRTEPSEIMLHIYNYLIFDQPEKNKQWGKDSLFNKWCWENWLAICRKLKLDPFLTPYTKINSRWIKDLNVRPKTIKTLEENLGITIQDISMGKDFMSKTPKAKATKAKIDKWDLIKLKSFCTAKETTIRVNRQPTKWEKIFATYSSDKGLISRIYNELKQIYKIKTNNPIEKWVKDMNRHFSKEDIYAAKKYMKKCSSSLAIREMQIKSFQRKDQAAIFAILQPPLVITRQTGSGVDLKQTPTDLKLRDLTVRRKMNKQKER

SEQ ID NO: 48852 - protein, 1019 aa, Homo sapiens
  DOMAIN (388)..(413): 7 kw REVERSE TRANSCRIPTASE RNA POLYMERASE domain identified by eMATRIX, accession number DM00895E, p-value=3.333e-11, raw score of 15.72
  DOMAIN (359)..(634): Reverse transcriptase domain identified by PFam, accession name rvt, E-value=6e-86, PFam score of 298.9
MVKGSIQQEELTILNIYAPNTGAPRFIKQVLSDLQRDLDSHTLIMGDFNTPLSTLDRSTRQKVNKDTQELNSALHQADLIDIYRTLHPKSTEYTFFSAPHHTYSKIDHIVGSKALLSKCKRTEIITNYLSDHSAIKLELRIKNLTQSRSTTWKLNNLLLNDYWVHNEMKAEIKMFFETNENKDTTYQNLWDAFKAVCRGKFIALNAYKRKQERSKIDTLTSQLKELEKQEINKIDRPLARLIKKKREKNQIDTIKNDKGDITTDPTEIQTTIREYYKHLYTNKLENLEEMDTFLDTYTLPRLNQEEVESLNRPITGSEIVAIINSLPTKKSPGPDGFTAEFYQRYKEELVPFLLKLFQSIEKEGILPNSFYEASIILIPKPGRDTTEKENFRPISLMNIDAKILNKILANRIQQHIKKLIHHDQVGFIPGMQGWFNIRKSINVIQHINRAKDKNHMIISIDAEKAFDKIQQPFMLKTLNKLGIDGMYFKIIRAIYDKPTANIILNGQKLEAFPLKTGTTQGCPLSPLLFNIVLEVLARAIRQEKEIKGIQLGKEEVKLSLFADDMIVYLENPIVSAQNLLKLISNFSKVSGYKINVQKSQAFLYTNNRQTESQIMSELPFTIASKTIKYLGIQLTRDVKDLFKENYKPLLKEIKEDTNKWKNIPCSWVGRINIVKMAILPKVIYRFNAIPIKLPMTFFTELEKTTLKFIWNQKRARIAKSILSQKNKAGGITLPDFKLYYKATVTKTAWYWYQNRDIDQWNRTEPSEIMPHIYNYLIFDKPEKNKQWGKDSLFNKWCWENWLAICRKLKLDPFLTPYTKINPRWIKDLNVRPKTIKTLEENLGITFQDIGVGKDFMSKTPKAMATKAKIDKWDLIKLKSFCTAKETTMRVNRQPTTWEKIFATYASDKGLISRIYNELKQIYKKKTNNPIKKWAKDMNRHFSKEDIYAAKKHMKKCSSSLAIREMQIKTTMRYHLTPVRMAIIKKSGNNRMIPAKPQSSCTKELPTATGYVSLESQGHN

SEQ ID NO: 48853 - protein, 1076 aa, Homo sapiens
  DOMAIN (336)..(377): kw TRANSCRIPTASE REVERSE II ORF2 domain identified by eMATRIX, accession number DM01354I, p-value=1.000e-40, raw score of 15.55
  DOMAIN (588)..(823): Reverse transcriptase domain identified by PFam, accession name rvt, E-value=2e-12, PFam score of 54.7
  misc_feature (1)...(1076): Xaa = X or * as defined in Table 2
MGKKQSRKTANSKKQSTSPPPKEHSSSPATEQSWTENDFDELREEGFRRSNYSELREDIQTKGKEVENFEKNLEECITTITNTEKCLKELMELKAKAQELREECRSLRSRCNQLEERVSAMEDEMNEMKREGKFREKRIKRNEQSLQEIWDYVKRPNLRLTGVPESDGENGTKLENTLQDIIQENFPNLARQANIQIQEIQRMPQRYSSRRATPRHIIVRFTKVEMKEKMLRAAREKDRSTRQKVNKNTQELNSALHQADLIDIYRTLHPKSTEYTFFSAPHHTYSKIGHIVGSKALLSKCKRTEIITNYLSDHSAIKLELRIKNLTQNRSTTWKLNNLLLNDYWVHNEMKAEIKMFFETNENKDTTYQNLWDTFKAVCRGKFIALNAHKRKQERSKIDTLTSQLKELEKQKQTHSKASRRQEITKIRAELKEIETQKTLQKINESRSWFFIFYFEKINKIDRPLARLIKKKREKNQIDAIKNDKEDITTNPTEIQTTIREYYKHLYANKLENLEEMDKFLDPYTFPRLNQEEVESLNRPITGSEIVAIINSLPTKKSPGPDGFTAEFYQRYKEELVPFLLKLFQSIEKEGILPNSFYEASIILIPKPGRDTTKKENFRPISLMNIDAKILNKILAKRIQQHIKKLIHHDQVGFIPGMQGWFNIRKSINVIQHINRAKDKNHMIISIDAEKAFDKIQQPFMLKTLNKLGDKIPRNPTYKGCEGPLQGELQTTAQGNKRGHKQMEEHSMLMGRKNQYHENGHTAQGNLXIQCHPHQATNAFLHRIGKNYFKVHMEPKKSLHHQLNPKPKEQSWRHHTTXLQTILQGYSNQNSMVLVPKQKYRSMEQNRALRNNAAYLQLCDLXQTXQKQEMGKGFPIXXMVLGKLASHMXKAETRSLPYTLYKNQFKMDXRLKRXTXNHKNPRRKPRQYHSGHRHGQGLHVXNTKSNGNKRQNXQMGSNXTKELLYSKRNYHQSEQATYRMGENFCNLLIXQRANNIQNLHXTQTNLQEKNKEPHQKVGEGHEQTLLKRRHLCSQKTHEKMLIITGHQRNANQNHYEISSHTSXNGNHXKVRKQQRI

SEQ ID NO: 48854 - protein, 1067 aa, Homo sapiens
  DOMAIN (115)..(156): kw TRANSCRIPTASE REVERSE II ORF2 domain identified by eMATRIX, accession number DM01354I, p-value=1.000e-40, raw score of 15.55
  DOMAIN (361)..(636): Reverse transcriptase domain identified by PFam, accession name rvt, E-value=2.1e-85, PFam score of 297.1
TWKGTTSTSRCKIMPKYRSTRQKVNKDTQELNSALHQADLIDIYRTLHTKSTEYTFFSAPHHTYSKIDHIVGSKALLSKCKRTEIITNYLSDHSAIKLELRIKNLNQSRSTTWKLNNLLLNDYWVHNEMKAEIKMFFETNENKDTTYQNLWDAFKAVCRGKFIALNAHKRKQERSKIDTLTSQLKELEKQEQTHSKASRRQEITKIRAELKEIETQKTLQKINESRSWFFERINKIDRPLARLIKKKREENQIDTIKNDKGDITTDPTEIQTTIREYYKHLYANKLENLEEMDKFLDTYTLPRLNQEEVESLNRPITGAEIVAIINSLPTKKSPGPDGFTAEFYQRYKEELVPFLLKLFQSIEKEGILPNSFYEASIILIPKPGRDTTKKENFRPISLMNIDAKILNKILANRIQQHIKKLIHHDQVGFIPGMQGWFNIRKSINVIQHINRAKDKNHMIISIDAEKAFDKIQQPFMLKTLNKLGIDGTYFKIIRAIYDKPTANIILNGKKLEAFPLKTGTRQGCPLSLLLFNIVLEVLARAIRQEKEIKGIQLGKEEVKLSLFADDMIVYLENPIVSAQNLLKLISNFSKVSGYKINVQKSQAFLYTNNRQTESQIMSELPFTIASKRIKYLGIQLTRDVKDLFKENYKPLLKEIKEDTNKWKNIPCSWVGRINIVKMAILPKVIYRFNAIPIKLPMTFFTELEKTTLKFIWNQKRARIAKSILSQKNKAGGITLPDFKLYYKATVTKTAWYWYQNRDIDQWNRIEPSEITPHTYNYLIFDKPEKNKQWGKDSLFNKWCWENWLAICRKLKLDPFLTPYTKINSRWIKDLNVRPKTIKTLEENLGITIQDIGVGKDFMSKTPKAMATKAKIGKWYLIKLKSFCTAKETTIRVNRQPTTWEKIFATYSSDKGLISRIYNELKQIYKKKTNNPIKKWAKDMNRHFSKEDIYAAKKYVKKCSSSLAIREMQIKTTMRYHLTPVRMAIIKKSGNNSKKNKAGGIMPADFKLYYKAMGTKTAWDMDETENHHAQQTNTRTEKQTPHVLTHKWELNNENTWIQEGEHHTPGLV

SEQ ID NO: 48855 - protein, 1697 aa, Homo sapiens
  DOMAIN (216)..(257): kw TRANSCRIPTASE REVERSE II ORF2 domain identified by eMATRIX, accession number DM01354I, p-value=1.000e-40, raw score of 15.55
  DOMAIN (463)..(1641): Reverse transcriptase domain identified by PFam, accession name rvt, E-value=3.5e-96, PFam score of 333.0
MEGEMNEMKREGKFREKRIKRNEQSLQEIWDYVKRPNLRLIGVPESDGENGTKLENTLQDIIQENFPNLARQANVQIQEIQRTPQRYSSRRATPRHIIVRFTKVEMKEKMLRAAREKDRSTRQKVNKDTQELNSALHQADLIDIYRTLHLKSTEYTFFSAPHHTYSKIDHILGSKALLSKCKRTEIITNYLSDHSAIKLELRIKNLTQNRSTTWKLNNLLLNDYWVHNKMKAEIKMFFETNENKDTTYQNLWDTFKAVCRGKFIALNAHKRKQERSKIDTLTSQLKELEKQEQTHSKASRRQEITKIRAELKEIETQKTLQKINESRSWFFERINKIDRPLARLIKKKREKNLIDAIKNDKGDITTDPTEIQTTIREYYKHLYANKLENLEEMDKFLDTYTLPRLNQEEVESLNRPITGSEIVAIINSLPTKKSPGPDGFTAEFYQRYKEELVPFLLKLFQSIEKEGILPNSCYEASIILIPKPGRDTTKKENFRPISLMNIDAKILNKILAKRIQQHIKKLIHHDQVGFIPGMQGWFNIRKSINVIQHINRAKDKNHMIISIDAEKAFDKIQQPFMLKTLNKLELEETTVKFIWNQKRAHIAKSILSQKNKAGGITLRDFKLYYKATVTKTAWYWYQNRDIDQWNRTEPSEITLHIYNYLIFDKPEKNKQWGTDSLFNKWCWENWLAICRKLKLDPFLTPYTKINSRWIKDLNVRPKTIKTLEENLGITIQDIGMGKDFMSKTPKAMATKAKIDKWDLIKLKSFCTAKETTIRVNRQPTKWEKIFTTYSSDKGLISRIYNELKQIYKKKTNNPIKKWAKDMNRHFSEEDIYAAKKHMKKCSSSLAIREMQIKTTMRYHLTPVRMAIIKKSGNNRCWRGCGEIGTLLHCWWDCKLVQPLWKSVWQLLRDLELEIPFDPAIPLLGIYPNDYKSCCYKDTCTRMFIAVLFTIAKTWNQAKCPTMIDWIQKMWHIYTMEYYAAIKKDEFMSFVGTWMKLEIIILSKLSQEQKTKHRIFSLIEIKTTIREYYKHFYTNKLENLEEIDKFLETYTLLSLNQEEVESLNRPITSSEIEEVINSLPTKKVQDQTKSQPDSIRDHSTIKLQLRIKNLTQNCSTTWKLNNLLLNDYWVHNEMKAEIKMFFETDENKDTTYQNLWNTFKAVCRGKFIPLNAHKRKQERSKIDTLTSQLKELEKQEQTHSKASRRQEITKIRAELKEIETQKTLQKINESRSWFFERINKIDRPLARLTKKKREKNLIDAIKNDKGDVITDPTEIQTTIREYYKHLYANKLENLEEMDKFLDTYPLPRLNQEEVESLNRPITGSEIVAIINSLPTKKSPGPDGFTAEFYQRYNEELVPFLLKLFQSVEKEGILPNSFYEASIILIPKPGRDTTKKENFRPISLMNIDAKILNKILANRIQQHIKKLIHHDQVGFIPGMQGWFNRHKSINVIQHINRAKDKNHMIISIDAEKAFDKIQQPFVLKTPNKLGIDGTYFKIIRAIYDKPTANIILNGQKLEAFPLKTGTRQGYPLSPLLFNIVLQVLAKAIRQEKEIKGIQLGKEEVKLSPFADDMIVYLENPIVSAQNLLKLISNFSKVSGYKINVQKSQTFLYISNRQTMSQIMSELSFTIASKRIKYLGIQLTRDVKDLFKENYKPLLKEIKEDTNKWKNIPCSWVGRINIVKMAILPKVIYRFNAIPI

SEQ ID NO: 48856 - protein, 43 aa, Homo sapiens
LMNIDAKILNKILANQIQQHIKKLIHYDQVSFIPRMKPDKNKQ

SEQ ID NO: 48857 - protein, 1289 aa, Homo sapiens
  DOMAIN (261)..(302): kw TRANSCRIPTASE REVERSE II ORF2 domain identified by eMATRIX, accession number DM01354I, p-value=1.000e-40, raw score of 15.55
  DOMAIN (17)..(248): AP endonuclease family 1 domain identified by PFam, accession name AP_endonucleas1, E-value=2.2e-89, PFam score of 310.4
  misc_feature (1)...(1289): Xaa = X or * as defined in Table 2
RAKSPANIIMTGSNSHITILTLNVNGLNSPIKRHRLASWIKSQDPSVCCIQETHLMCRDTHRLKIKGWRKIYQANGKQKKAGVAILVSDKTDFKPTKIKRDKEGHCIKVKGSIQQEELTILNIYAPNTGAPRFIKQVLSDLQRDLDSHTLIMGDFNTPLSTLDRSTRQKVNTDTQELNSALHQADLIDIYRTLHPKSTEYTFFSAPHHTYSKIDHIVGSKALLSKCKRTEIITNHLSDHSAIKLELRIKNLTQSRSTTWKLNNLLLNDYWVHNEMKAEIKMFFETNENKDTTYQNLWDAFKAVCRGKFLALNAHKRKQERSKIDTLTSQLKELEKQEQTHSKASRRQEITKIRAELKEIETKKTLQKINESRSWFFERINKIDRPLARLTKRKREKNQIHAIKNDKGDITTDPTEIQTTIREYYKHLYANKLENLEEMDKFLNTYTLPRLNQEEVESLNRPITGSAIVAIINSLPTKKSPGPDGFTAEFHQRYKEELVPFLLKLFQSIEKEGILPNSFYEASIILIPKPGRDTTKKENFRPISLMNIDAKFLNKILANRIQQHIKKLIHHDQMGFIPGMQGSFNIHKSINVIQHINRAKDKNHMVISIDAGKGPFDKIQQPFMLKTINKIGIDGMYFKIIRAIYDKTTANIILNGQKLEAFPLKTGTRQGCPLSPLPLLFNIVLEVLARAMRQEKEIKGIQLGKEEVKLSLFADDMIVYLENPIVSAQNLLKLISNFSKVSGYKINVQKSQAFLYTNNRQTESQIMSELPFTIASKRIKYLGIQLTRDVKDLFKENYKPLLKEIKEDTNKWKNIPCSWVGRINIVKMAILPKVIYRFNATPIKLPMTFFTELEKTTLKFIWNQKRARIAKSILSQKNKAGGITLPDFKLYYKATVTKTAWYWYQNRDIDQWNRTEPSEITPHIYNYLIFDKPEKNKQWGKDSLFNKWCWENWLAICRKLKLDPFLTPYTKINSRWIKKKDLNVRPKTIKTLEENLGITIQDIGVGKDFMSKTPKAMATKAKIDKWDLIKLKSFCTAKETTIRVNRQPTKWEKIFATYSSDKGLISRIYNELKQIYKKKTNNPIKKWAKDMNRHFSKEDIYAAKKHMKKCSSSLAIREMQIKTTMRYHLTPVRMAIIKKSGNNRLMRVHGKKRFLWQKQGVCEVEIQAQRESARDGTDREDAESPHAEVTVPGARALKFXPCGPQGIVLRQRVEXLSQKAALPTQVAWTGSVVWTLLCSTGXNRFRELAIWKWRQDPDAGTWMKLEAVTLSKLTXEQKTKHRMFSLISGS

SEQ ID NO: 48858 - protein, 104 aa, Homo sapiens
MQDPNADTEWNDILTQKGYLTPQGKSERIGRGGRRGAAHPPAESAPIFVYLEGDIKAQFIGPLVFGGMNLTRDELEWKLSESGAIMMDLEENPKKPIEDVLLSS

SEQ ID NO: 48859 - protein, 243 aa, Homo sapiens
  misc_feature (1)...(243): Xaa = X or * as defined in Table 2
RKKGILPPKESLKELEEEAEEEQRILQQSVVKTYEDMTLEELEDHEDEFNEEDECAIEMCRQQRLAEWKATKLKNKFGEVLEISGKDYVQEVTKAERRALWVILHLYKQGIPLCALVNQHLSWTLPGSFPDVKFIKAISTTCIPNYTDRNLPTILVYPGRRYQGLSLLVLWCLAGMNPDQEMSWEWKLSESGAIMTDLEENPKKPIEDVLLVLSAALWSSXRGDSDSEGDLRATASITCRTFL

SEQ ID NO: 48860 - protein, 770 aa, Homo sapiens
  DOMAIN (552)..(579): 14-3-3 proteins domain identified by eMATRIX, accession number BL00796A, p-value=4.656e-26, raw score of 10.52
  DOMAIN (552)..(631): 14-3-3 proteins domain identified by PFam, accession name 14- 3-3, E-value=5.9e-27, PFam score of 99.5
MGFRHVGQAGLKLLTSDPKEIVFKFMVKFFPVDPGHLREELTRPRSKSLGGPPNYPRREEPVRTQGATAAEAERGSIRLHGPLAGGCPSEWDAGEEAHAAPAAHVTAWEPGAPSVLGTGDKGRPQGSPEGRAGHYGQLHNITNTPGLTGTQLQVKFVLIFYIFITQVLAIFLAIKGIKPLGEVTGLNEVKASCSATESEQGQLVLKHVGVRQENCCCSQRCSQDLIKTAVPGDDYSLMSVIHSPVTLTQVTQRKVVFSSALGVNLDYLSQSRLSLMLVRAIGACLFGYYPSWRMEGCAARRSGWASSGISRSRRCKETASAKLACQQWLQVAKRAGLGGGQSGRTVLRERVRIEIASTHIALAVECVSVRVWKVPRLPSRQKYAKHASQLVSNQKSEEEEYMKTFNISQQDLELVEVATEKITMLYEDNKHHVGAAIRTKTGEIISAVHIEAYIGRVTVCAEAIAIGSAVSNGQKDFDTIVAVRHPYSDEVDRSIRVIPTYGTDEWEQWWNAFNEENLFCSEEMPSSDDEATADSQHSTPPKKKRKGMTMDKSELVQKAKLAEQAERYDDMAAAMKAVTEQGHELSNEERNLLSVAYKNVKTERNEKKQQMGKEYREKIEAELQDICNDVLYSPPFPMDVASCEQTAVIVVSLLGSSCSASLPGSGLVLGVVCTESCDVNHLWVSQPAIPAPVSVAISEGAMDSVKVLSFGGLMFFVLIGLLPGGGAFQKASAVVVWRGIGGGQGPRTPLSSTTRVDRKGPPGGGGARSV

SEQ ID NO: 48861 - protein, 373 aa, Homo sapiens
  DOMAIN (140)..(173): 14-3-3 proteins domain identified by eMATRIX, accession number BL00796B, p-value=7.000e-39, raw score of 10.67
  DOMAIN (127)..(341): 14-3-3 proteins domain identified by PFam, accession name 14- 3-3, E-value=3.8e-59, PFam score of 209.9
  misc_feature (1)...(373): Xaa = X or * as defined in Table 2
LYNRRRRRRCSHCRHRCRRLSSGLRKEEVISLGASLGRVFVPCSPPTVSAARGPTGAPGGPNSKPLSGCCDDGFNLGRQQWGNPLPFCSKTISSSLHWTWSQVNLVEILPAIFSSFLNLQHVNLWFLAAAMKAVTEQGHELSNEERNLLSVAYKNVVGARRSSWRVISSIEQKTERNEKKQQMGKEYREKIEAELQDICNDVLVRGQCFCFEQWFLNSINLMYKCRLSNYFRYLSEVASGDNKQSKXYLXKEIRPVMEPVFFHRDFLTILIRLGLALNFSVFYYEILNSPEKACSLAKTVRKTLCDIXPXQNSACVINFILFLNILRDNLTVSTTSTGFIVSFLFTYLIIHCYLQEGICTIKCSYSFKLLNLL

SEQ ID NO: 48862 - protein, 324 aa, Homo sapiens
  DOMAIN (175)..(198): 14-3-3 PROTEIN ZETA SIGNATURE domain identified by eMATRIX, accession number PR00305C, p-value=3.222e-10, raw score of 8.68
  DOMAIN (59)..(324): 14-3-3 proteins domain identified by PFam, accession name 14- 3-3, E-value=7.5e-21, PFam score of 77.6
  misc_feature (1)...(324): Xaa = X or * as defined in Table 2
AARPQKRHNNHSSLLTGSHIHWKRGRVQNIIADVLQFCLYLLTVLFVPCSPPTGMTMDKSELVQKAKLAEQAERYDDMACSSERHVTEQGHELSNEEKKSCSLVAYKNVVGARRFLPGRVISSIXAXKQRRNEKKAADGQKSTREKIEGRTCRTFCNXCFWELLGQISLFPNATQPRKVKVFYFEKXKGDYFRYLFXKWQSXRQQTQPTCVGTSPARAYPGSNLKIXLRKKMQPTHPNSVLVLAPKFPQSFYYEILNSPEKGLVSLGKNGHFDXSNLLNLDTLEWKSLIKDSTSDSWQLLRDNLTLWDIRKTRGDEGDAGEGEN

SEQ ID NO: 48863 - protein, 18 aa, Homo sapiens
PWRCWPMLMYWLTFHLVR

SEQ ID NO: 48864 - protein, 23 aa, Homo sapiens
  misc_feature (1)...(23): Xaa = X or * as defined in Table 2
XMIGGVLMGLLFGKIGYYLVLGX

SEQ ID NO: 48865 - protein, 195 aa, Homo sapiens
MAELAPASPSDIKASVSNGDTTLLCSRRQSCGMNEVRQVSLTYPGSPAPSHSLPLQPRSGGSLCPSRAWPDPHQLFDDTSSAQSRGYGAQRAPGGLSYPAASPTPHAAFLADPVSNMAMAYGSSLAAQGKELVDKNVSGRGWWEWGDARGHRASDLSSASPDHRFIPITKLKYYFAVDTMYVGRKLGLLFFPYLH

SEQ ID NO: 48866 - protein, 409 aa, Homo sapiens
  DOMAIN (356)..(396): HSF-type DNA-binding domain proteins domain identified by eMATRIX, accession number BL00434C, p-value=7.111e-09, raw score of 23.85
MMSSPVSQNLEDVFFTEVLKDKTCTRQVDTNTKNVFGQPRLRASLRDLRSPRKNYKSTIEDDLKKLIIMDNLGPEQERDTGQSPQKGLQRTLSDESLCSGRREPSFASPAGLEPGLPSDVLFTSTCAFPSSTLPARRQHQHPHPPVGPGATPAAGSGFPEKKCTAHTTRIKSHEPAGVGRAPDAPCNPPYPPPNPPTTERQGFKESQSPRPEPEPGAWDSLNSRSRDLALAVPSAWNVPPPATISASELSLADGRDRPLRRLDPGLMPLPDTAAGLEWSSLVNAAKAYEVQRAVSLFSLNDPALSPDIPPAHSPVHSHLSLERGPPTPRTTPTMSEEPPLDLTGKVYQLEVMLKQLHTDLQKEKQDKVVLQSEVASLRQNNQRLQEESQAASEQLRKFAEIFCREKKEL

SEQ ID NO: 48867 - protein, 200 aa, Homo sapiens
  misc_feature (1)...(200): Xaa = X or * as defined in Table 2
XFLADPVSNMAMANGSSLAAQGKELVDKNIDRFIPITKLQVLLCWWTPWIGEVAVTNRDTPVGPPAFEVNAPGPLHSRFHPPPTLHPPLSSGPIWSGNGFHHLRFGGLVLRWGPRIGSPQTSWGCKRAQPWAGLTLEVLAILLSLYLVTVNTDLTTIDLVAFLGYKYVGMIGGVLMGLLFGKIGYYLVLGWCCVAILCVQ

SEQ ID NO: 48868 - protein, 53 aa, Homo sapiens
PRPFPKSRLPPGIIGGEYDQRPNPILPGRGGPNDRFPFRPSRGRPTDGRLSFM

SEQ ID NO: 48869 - protein, 549 aa, Homo sapiens
  misc_feature (1)...(549): Xaa = X or * as defined in Table 2
CLRVLLLKRTWPVEVPETGARPTGGILRSHLRQSLLCTWGYSSNTRFTITLNYKDPLTGDEETLASYGIVSGDLICLILQDDIPAPNIPSSTDSEHSSLQNNEQPSLATSSNQTSMQDEQPSDSFQGQAAQSGVWNDDSMLGPSQNFEAESIQDNAHMAEGTGFYPSRTPCSWXLNPVEGQVPHSLETLYQLADCSDANDALIVLIHLLMLESGYIPQGTEAKALSMPEKWKLSGVYKLQYMHPLCEGSSVTLTCVPLGNLIVVNATLKINNEVRKCXKGCSLLPESFICKEKLGENVANIYKDLQKLSRLFKDQLAHPLLAFTRQALNLPDVFGLVVLPLELKLRIFRLLDVRSVLSLSAVCRDLFTASNDPLLWRVFYICVNFRDNTVRVQDTDWERTVQGRRAHTKEKESPKGRVLWMLLAIRQTHTIPFYSQPLWHPRGHFPKLPAFPPGIYSGGWNMDQRPTFPYVGRTQSSSLNSWVLGETPKPSFLPLRPRFDPVWPHFPGPXPPSLPRARAGPNDQISPFRPQQGSGQLIGRLSIHVDWIC

SEQ ID NO: 48870 - protein, 355 aa, Homo sapiens
  DOMAIN (105)..(150): CARCINOEMBRYONIC ANTIGEN PRECURSOR AMINO-TERMINAL DOMAIN domain identified by eMATRIX, accession number DM00372B, p-value= 4.750e-37, raw score of 20.31
  DOMAIN (86)..(326): Immunoglobulin domain identified by PFam, accession name ig, E-value=2.1e-12, PFam score of 45.0
AVLWKLLDPRLISTEENMHAAEIMGPLSAPPCTEHIKWKGLLLTALLLNFWNLPTTAQVMIEAQPPKVSEGKDVLLLVHNLPQNLTGYIWYKGQIRDLYHYITSYVVDGQIIIYGPAYSGRETVYSNASLLIQNVTREDAGSYTLHIIKRGDGTRGVTGYFTFTLYLETPKPSISSSNLNPREAMETVILTCNPETPDASYLWWMNGQSLPMTHRMQLSETNRTLFLFGVTKYTAGPYECEIWNSGSASRSDPVTLNLLHGPDLPRIFPSVTSYYSGENLDLSCFADSNPPAQYSWTINGKFQLSGQKLFIPQITPKHNGLYACSARNSATGEESSTSLTIRVIAPPGLGTFCFQ

SEQ ID NO: 48871 - protein, 504 aa, Homo sapiens
  DOMAIN (82)..(127): CARCINOEMBRYONIC ANTIGEN PRECURSOR AMINO-TERMINAL DOMAIN domain identified by eMATRIX, accession number DM00372B, p-value= 8.750e-37, raw score of 20.31
  DOMAIN (105)..(487): Immunoglobulin domain identified by PFam, accession name ig, E-value=8.1e-07, PFam score of 27.0
MGPLSAPPCTQRITWKGLLLTALLLNFWNLPTTAQVTIEAEPTKVSKGKDVLLLVHNLPQNLAGYIWYKGQMKDLYHYITSYVVDGQIIIYGPAYSGRETVYSNASLLIQNVTREDAGSYTLHIVKRGDGTRGETGHFTFTLYLETPKPSISSSNLYPREDMEAVSLTCDPETPDASYLWWMNGQSLPMTHSLQLSKNKRTLFLFGVTKYTAGPYECEIRNPVSASRSDPVTLNLLQHSWLIDGKFQQSAQVFFIPQITKTYRGVYVCFIHNSATAGTNLIIKRIIVPDTLRKRGNHEKVESSDDIENSNQPFSHPKAFKNIQVQHGQYGIHRKLITKLEKWLDSGLPCVISAETSSPRPGCSVSSGFQGHGKSHYYSSLECPWKWKLQRNHIYGGKVGWNLEGAHQLHIPAKLPKPYITINNLNPRENKDVLAFTCEPKSENYTYIWWLNGQSLPVSPRVKRPIENRILILPSVTRNETGPYQCEIQDRYGGIRSYPVTLNVL

SEQ ID NO: 48872 - protein, 749 aa, Homo sapiens
  DOMAIN (62)..(102): kw TRANSCRIPTASE REVERSE II ORF2 domain identified by eMATRIX, accession number DM01354Y, p-value=1.000e-40, raw score of 10.69
  DOMAIN (333)..(718): Immunoglobulin domain identified by PFam, accession name ig, E-value=3e-17, PFam score of 60.6
MAILPKVIYRFNAIPIKLPMTFFTELERTTLKFIWNQKRACIAKSILSQKNKAGGITLPDFKLYYKATVTKTAWYWYQNRDIDQWNRTDPSEITPHIYNYLIFDKPEKNKQWGKDSLFNKWCWENWLAICRKLKLDPFLTPYTKINSRWIKDLNVRPKTIKTLEENLGITIQDIGMGKDFMSKTPKAMATKAKIDKWDLIKLKSFCTAKETTIRVNRQPTKWEKIFTTYSSDKGLISRIYNELKQIYKKKTNNPIKKLISTEENTQTAETMGLLSAPPCTQRITWKGLLLTASLLNFWNPPTTAQVTIEAQPTKVSEGKDVLLLVHNLPQNLTGYIWYKGQIRDLYHYITSYVVDGQIIIYGPAYSGRETIYSNASLLIQNVTQEDAGSYTLHIIMGGDENRGVTGHFTFTLYLETPKPSISSSKLNPREAMEAVSLTCDPETPDASYLWWMNGQSLPMSHRLQLSETNRTLFLLGVTKYTAGPYECEIRNPVSASRSDPFTLNLLQHSWLIDGKFQQSAQVFFIPQITKTYRGVYVCFIHNSATAGTNLIIKRIIVPAKLPKPYITINNLKPRENKDVLNFTCEPKSENYTYIWWLNGQSLPVSPRVKRPIENRILILPSVTRNETGPYQCEIRDQYGGIRSYPVTLNVLYGPDLPRIYPSFTYYRSGEVLYLSCSADSNPPAQYSWTINGKFQLSGQKLFIPQITTKHSGLYACSVRNSATGKESSKSMTVKVSGGIALADTSFSCS

SEQ ID NO: 48873 - protein, 139 aa, Homo sapiens
ETPKPSISSSNLNPREVMEAVRLICDPETPDASYLWLLNGQNLPMTHRLQLSKTNRTLYLFGVTKYIAGPYECEIRNPALLNDCHNTNTEKKKQPEKVESSDDIENSNQPFSHPKAFKNIRVQHGHYGIHRKLITKLET

SEQ ID NO: 48874 - protein, 34 aa, Homo sapiens
AGSYTLHIIKGDDGTRGVTGRFTFTLHRIQTSEE

SEQ ID NO: 48875 - protein, 144 aa, Homo sapiens
ETPKPSISSSNLYPREDMEAVSLTCDPETPDASYLWWMNGQSLPMTHSLQLSKNKRTLFLFGVTKYTAGPYECEIRNPVSASRSDPVTLNLLQHSWLIDGKFQQSAQVFFIPQITKTYRGVYVCFIHNSATAGTNLIIKRIIVP

SEQ ID NO: 48876 - protein, 78 aa, Homo sapiens
  misc_feature (1)...(78): Xaa = X or * as defined in Table 2
QLECIPGTWELWKEEQERAMAGGGLKKIISATEKKLARMLLAPSASWCCSGPXVFHGSTXWGKPGPVSVSLLQGVLGK

SEQ ID NO: 48877 - protein, 97 aa, Homo sapiens
  misc_feature (1)...(97): Xaa = X or * as defined in Table 2
EAMEAVILTCDPATPAASYQWWMNGQSLPMTHRLQLSKTNRTLFIFGVTKYIAGPYECEIRNPSXVPAASDPVTLESPPLLFNGLATTETLRKRGNP

SEQ ID NO: 48878 - protein, 485 aa, Homo sapiens
  DOMAIN (77)..(122): CARCINOEMBRYONIC ANTIGEN PRECURSOR AMINO-TERMINAL DOMAIN domain identified by eMATRIX, accession number DM00372B, p-value= 8.750e-37, raw score of 20.31
  DOMAIN (100)..(460): Immunoglobulin domain identified by PFam, accession name ig, E-value=0.00023, PFam score of 19.1
  misc_feature (1)...(485): Xaa = X or * as defined in Table 2
GAVRTWGRGFQTEKCQASLLNFWNPPTTAQVTIEAEPTKVSKGKDVLLLVHNLPQNLAGYIWYKGQMKDLYHYITSYVVDGQIIIYGPAYSGRETVYSNASLLIQNVTREDAGSYTLHIVKRGDGTRGETGHFTFTLYLIPWTLLYLXRSLAQVSHYETPGKTAPPCGSTAXXLNXPPDLTLFSPVLFLLKYPVPGQAFQYPKGLKTIGSSITHLXDVLGKGSCRENIPRAAKXDXNXEDSSTACSKXGPQVETPKPSISSSNLYPREDMEAVSLTCDPETPDASYLWWMNGQSLPMTHSLQLSKNKRTLFLFGVTKYTAGPYECEIRNPVSASRSDPVTLNLLPKLPKPYITINNLNPRENKDVLAFTCEPKSENYTYIWWLNGQSLPGSVPRVKRPIENRVLIFTPCSRGIETGPYQCEIRDRYGGHPQLPSHPGMSSITTKHSGLYACSVRNSATGMESSKSMTVKVSAPSGTGHLPGLNPL

SEQ ID NO: 48879 - protein, 479 aa, Homo sapiens
  DOMAIN (70)..(115): CARCINOEMBRYONIC ANTIGEN PRECURSOR AMINO-TERMINAL DOMAIN domain identified by eMATRIX, accession number DM00372A, p-value= 5.378e-38, raw score of 19.18
  DOMAIN (156)..(447): Immunoglobulin domain identified by PFam, accession name ig, E-value=3.7e-16, PFam score of 57.1
EASLLEDDDGMVYLRPLTSHQYRTAQLRAMLRKFLDPRLSSTEENTQAAETMGPLSAPPCTQRITWKGLLLTASLLNFWNPPTTAQVTIEAEPTKVSKGKDVLLLVHNLPQNLAGYIWYKGQMKDLYHYITSYVVDGQIIIYGPAYSGRETVYSNASLLIQNVTREDAGSYTLHIVKRGDGTRGETGHFTFTLYLETPKPSISSSNLYPREDMEAVSLTCDPETPDASYLWWMNGQSLPMTHSLQLSKNKRTLFLFGVTKYTAGPYECEIRNPVSASRSDPVTLNLLPKLPKPYITINNLNPRENKDVLAFTCEPKSENYTYIWWLNGQSLPVSPRVKRPIENRILILPSVTRNETGPYQCEIQDRYGGIRSYPVTLNVLYGPDLPRIYPSFTYYHSGENLYLSCFADSNPPAEYSWTINGKFQLSGQKLFIPQITTKHSGLYACSVRNSATGMESSKSMTVKVSAPSGTGHLPGLNPL

SEQ ID NO: 48880 - protein, 397 aa, Homo sapiens
  DOMAIN (19)..(64): CARCINOEMBRYONIC ANTIGEN PRECURSOR AMINO-TERMINAL DOMAIN domain identified by eMATRIX, accession number DM00372A, p-value= 4.000e-39, raw score of 19.18
  DOMAIN (107)..(395): Immunoglobulin domain identified by PFam, accession name ig, E-value=4.5e-10, PFam score of 37.5
MGTLSAPPCTQRIKWKGLLLTASLLNFWNLPTTAQVTIEAEPTKVSEGKDVLLLVHNLPQNLTGYIWYKGQMRDLYHYITSYVVDGEIIIYGPAYSGREAAYSNACLLIQNVTREDAGYYTLHIIKGDDGTRGVTGRFTFTLHLETPKPSISSSNLNPRETMEAVSLTCDPETPDASYLWWMNGQSLPMTHSLKLSETNRTLFLLGVTKYTAGPYECEIRNPVSASRSDPVTLNLLPKLPKPYITINNLNPRENKDVLNFTCEPKSENYTYIWWLNGQSLPVSPRVKRPIENRILILPSVTRNETGPYQCEIRDRYGGIRSDPVTLNVLYGPDLPRIYPSFTYYRSGEVLYLSCSADSNPPAQYSWTINEKFQLPGQKLFIRHITTKHSGALCLLCS

SEQ ID NO: 48881 - protein, 392 aa, Homo sapiens
  DOMAIN (279)..(315): CARCINOEMBRYONIC ANTIGEN PRECURSOR AMINO-TERMINAL DOMAIN domain identified by eMATRIX, accession number DM00372C, p-value= 3.167e-15, raw score of 23.69
  DOMAIN (89)..(363): Immunoglobulin domain identified by PFam, accession name ig, E-value=8.2e-13, PFam score of 46.3
  misc_feature (1)...(392): Xaa = X or * as defined in Table 2
ESLCFPKTEQEASQSLSPXIIIHLSCDTCTSYWLSRTHVGXQVGDANSEXRMPVEESKVPHRTIFCYPHSKLPMPYITINNLNPREKKDVLAFTCEPKSRNYTYIWWLNGQSLPVSPRVKRPIENRILILPSVTRNETGPYQCEIRDRYGGIRSNPVTLNVLCEYPLFLCGPGHQLNSKRPEARPLSLSPVQVXTTLLLDIRPGHDSLPWEILGRHSLNQEYKGRGALVMGHXGPTACNERNRGIPQAWAXXTXMGFGCHLRLCLGSEGHCVPLRDQEHPLPLDDITCGFILFPPDGPDLPRIYPSFTYYRSGENLDLSCFADSNPPAEYSWTINGKFQLSGQKLFIPQITTNHSGLYACSVRNSATGKEISKSMIVKVSGKWIPASLAIGF

SEQ ID NO: 48882 - protein, 449 aa, Homo sapiens
  DOMAIN (49)..(94): CARCINOEMBRYONIC ANTIGEN PRECURSOR AMINO-TERMINAL DOMAIN domain identified by eMATRIX, accession number DM00372A, p-value= 1.000e-40, raw score of 19.18
  DOMAIN (135)..(427): Immunoglobulin domain identified by PFam, accession name ig, E-value=4.2e-17, PFam score of 60.2
GRTAQLTAVLRKLLDPRLISTEENTQAAETMGPLSAPPCTHLITWKGVLLTASLLNFWNPPTTAQVTIEAQPPKVSEGKDVLLLVHNLPQNLAGYIWYKGQMTYVYHYITSYVVDGQRIIYGPAYSGRERVYSNASLLIQNVTQEDAGSYTLHIIKRRDGTGGVTGHFTFTLHLETPKPSISSSNLNPREAMEAVILTCDPATPAASYQWWMNGQSLPMTHRLQLSKTNRTLFIFGVTKYIAGPYECEIRNPVSASRSDPVTLNLLPKLSKPYITINNLNPRENKDVLTFTCEPKSENYTYIWWLNGQSLPVSPRVKRPIENRILILPNVTRNETGPYQCEIRDRYGGIRSDPVTLNVLYGPDLPSIYPSFTYYRSGENLYLSCFAESNPRAQYSWTINGKFQLSGQKLSIPQITTKHSGLYACSVRNSATGKESSKSITVKVSDWILP

SEQ ID NO: 48883 - protein, 659 aa, Homo sapiens
  DOMAIN (291)..(336): CARCINOEMBRYONIC ANTIGEN PRECURSOR AMINO-TERMINAL DOMAIN domain identified by eMATRIX, accession number DM00372B, p-value= 1.500e-37, raw score of 20.31
  misc_feature (1)...(659): Xaa = X or * as defined in Table 2
CGSWLMTQFSMDKRQGRSRSVTITNTAVTSLEWVPFHAFAIPRSTLVSQQGATSHTDNTQEMDSPGQEPGFAKEVEVEPGFQPLPQMTLLVPAMCLLLHGACSAKGFCAAPHFLLASPMGKGQVPLNPFSFTLSEELDLPQSLKRNPKGCIARRAKPILAAERHKRLILHTSTKENTLLDNRVIECLTMEAVAKFNIMKEREGPSHQPALSPPKARWHILWQKLMFTASLLTFWEPPTTARVTTEAMPFNATEEEEEEFFLLAHNLPQNLTRATIWYKGQMRHLYHYITSYVVDGEIIIYGPAYSGRETAYSNASLLIQNVTREDAGSYTLHIIKRGDGTGGVTGRFTFTLYLETPKPSISSSNFNPREATEAVILTCDPETPDASYLWWMNGQSLPMTHSLQLSKANRTLYLFGVTNYTAGPYECEIRNPVSASRSDPVTLNLLPKLPKPYITINNLKPREEXGCLRPFTCEPKEXGTTPYIWWVKRFRSLPVSPGVKRPHLKNRILIPTPVFTRKWKQGPYSMWNYGDRYGGIRSLPSSPWNVLLWVQDLPRILPFHFTYYRSGRKSSYLSCSGGTLNPPAQYSWDNXWKSFQLTRGQKLFYSGHITTKHSGLYVCSVRNSATGRESSKSMTVEVSDWDITLNSTSTSNSIFSHGNH

SEQ ID NO: 48884 - protein, 377 aa, Homo sapiens
  DOMAIN (45)..(66): Nt-dnaJ domain proteins domain identified by eMATRIX, accession number BL00636B, p-value=5.050e-16, raw score of 15.11
  DOMAIN (4)..(68): DnaJ domain identified by PFam, accession name DnaJ, E-value= 8.2e-38, PFam score of 139.0
MGKDYYQTLGLARGASDEEIKRAYRRQALRYHPDKNKEPGAEEKFKEIAEAYDVLSDPRKREIFDRYGEEGLKGSGPSGGSGGGANGTSFSYTFHGDPHAMFAEFFGGRNPFDTFFGQRNGEEGMDIDDPFSGFPMGMGGFTNVNFGRSRSAQEPARKKQDPPVTHDLRVSLEEIYSGCTKKMKISHKRLNPDGKSIRNEDKILTIEVKKGWKEGTKITFPKEGDQTSNNIPADIVFVLKDKPHNIFKRDGSDVIYPARISLREALCGCTVNVPTLDGRTIPVVFKDVIRPGMRRKVPGEGLPLPKTPEKRGDLIIEFEVIFPERIPQTSRTVLEQNCLVGVHKQYLSFQQDQGSQPPNGLGVLKAGQTGAQGPAQD

SEQ ID NO: 48885 - protein, 201 aa, Homo sapiens
  DOMAIN (67)..(171): DnaJ C terminal region domain identified by PFam, accession name DnaJ_C, E-value=6.9e-05, PFam score of -5.2
MDIADPFSGFPMGMGGFTNMNFGRSRPAQEPTRKKQDPPVTHDLRVSLEEIYSGCTKKMYQEDKISHKRLNPDGKSIRNEDKILTIEVKKGISLPEALCGTTVNVPTLDGRTIPVVFKDAIRPGMRRKVRGEGLPLPKTPEKRGDLIIELEVIFPERIPQTSRTILEQILSSYLSYLSSPGLTRDLSRAQGFLDLSTSCGP

SEQ ID NO: 48886 - protein, 405 aa, Homo sapiens
  DOMAIN (65)..(86): DNAJ PROTEIN FAMILY SIGNATURE domain identified by eMATRIX, accession number PR00625B, p-value=9.561e-17, raw score of 13.48
  DOMAIN (31)..(88): DnaJ domain identified by PFam, accession name DnaJ, E-value= 9.8e-24, PFam score of 92.3
  misc_feature (1)...(405): Xaa = X or * as defined in Table 2
WSAAEPVDGDSGSAGRRRGPWPKTTYHPWAVARGASEKEIKRAYRRQALRSHPDKNKEPGAEEKFKEIAEAYEVLRDPRKREIFDHYREEALKGSGPSGGSGGGANATSFSYTFHGEPLAMFAEFFGGRNPFDTFFGQRNGEEGMDIDDPFSGFPMGLWGGFTNVNFGRSRSAQEPARKKQDSPVTHDLRVSLEGDLTAAVPRRCTKKMKISHKRLNTPDGKSIRNGDKILTIRSERRGWKEGTQITFPKEGDQTSNNIPADIVFVLKDKPHNIFKRDGSDVIYPARISLREALCVGCTVNCPHSGTGRTIPVVFKECYQGLGMRRKSSWENGLPLPQNTRENVGDLIIXGFEVIFPERIPQTSRTVLEAGSFQYSYLEVPQGLTRGPFPELKDFWDLFLPVVGP

SEQ ID NO: 48887 - protein, 266 aa, Homo sapiens
  DOMAIN (24)..(39): WILM'S TUMOUR PROTEIN SIGNATURE domain identified by eMATRIX, accession number PR00049D, p-value=1.305e-09, raw score of 0.00
  misc_feature (1)...(266): Xaa = X or * as defined in Table 2
GDAVPSAPRRPSRRTPGCGSRGALQPGPPPRAPPPEPPPRGAAAAAPPAGPAAPAARQPPRRPPAQPRSCPRRVRPTPAWSPPGRRGPRRSRRRPPGGPGPAAPLRLSRAHSPPAPPGSPYRPHGAGTSVAPWTRPPAARGTEADPGRCPVSAPGTAPGQMRGRGSATQRLHRGHSTAPGAGGRCGRRPGGSGRPGAGAGPRRSTAAPPRCRRRSPTGPRSPRGPRSARPARGSVGGPRGTPGKQPGPRRAXTSGPEPRCCGHARG

SEQ ID NO: 48888 - protein, 154 aa, Homo sapiens
  misc_feature (1)...(154): Xaa = X or * as defined in Table 2
KLEIQRLLRMTTECIRHTKQKKFGSPGLQPPLPGNAKSRADSTALPALPAQQKETKQQEPGESSXEPGGSSPSRMERAEAAPAQSPAGGTGTGQGWGAPHLGPALARRVTGPPQHGSPGPRTRPTPYPARCPSRPIFVPAIVWSRLRAPPGLPA

SEQ ID NO: 48889 - protein, 59 aa, Homo sapiens; identical to SEQ ID NO: 33721

SEQ ID NO: 48890 - protein, 181 aa, Homo sapiens
  misc_feature (1)...(181): Xaa = X or * as defined in Table 2
PLGNVSCSHRSFQTARVDYSLIYVLAWGQKKEVWELRNWQTHALMKLKNKLREPRTSVNKDSPKSLLYSCSYSYFDEPVELRSSSFSSWDDSSDSEYETHLLHLKLVXPNLAVFNCRPTARRKPDYEPVENTDEAQNSFCKTAHNLWSLTFPFPCLLXYETRARLESWSLSCLRYEHISSG

SEQ ID NO: 48891 - protein, 121 aa, Homo sapiens; identical to SEQ ID NO: 38336

SEQ ID NO: 48892 - protein, 127 aa, Homo sapiens
QRYSSRRATPRHIIVRFTKVERKETMLRAAREKGRVTHKGKPIRLTVDLLAETLQARREWGPIFNILNEKNFQPRISYPAKLSFISEGEINPQMLRDFVTTRPTLRDLLKEALNMERNNRYLPGRPL

SEQ ID NO: 48893 - protein, 281 aa, Homo sapiens
MTGEASGNLQSQRKAKRKEARLTCLEPVEEDHNSLPAREENQTENESDELTEAGFRRWVITNSSRLKEHVVTQCKEAKNFEKSLKELLTRITSLEDNINYLMEPRNTAREHREAYSSINSQIDQAEEKIPEIEDQHNEIKREDKIREKRMKRNKQSLQEIWDYVKRPNLSLAGVPESDEENGIKLKNTLQDIIQENFPNLAKQANIQIQEIQRTPQRYSLRKTTPRHIIVRYTKVEIKEKMLRAAREKDQVTHKGKPIRLTAELCRNRTSQKRVGGQYSTF

SEQ ID NO: 48894 - protein, 386 aa, Homo sapiens
  misc_feature (1)...(386): Xaa = X or * as defined in Table 2
VGSMTGEASGNLQSQRKAKRKEARLTCLEPVEEPGSGTHPPMCYLAPPMWKCQKPETGIKEGDRDHNSLPAREENQTENESDELTEAGFRRWVITNSSRLKEHVVTQCKEAKNFEKSLKELLTRITSLEDNINYLMEPRNTAREHREAYSSINSQIDQAEEKIPEIEDQHNEIKREDKIREKRMKRNKQSLQEIWDYVKRPNLSLAGVPESDEENGIKLKNTLQDIIQENFPNLAKQANIQIQEIQRTPQRYSLRRATPRHIIVRFTKVEMKEKMLRAAREKGRVTHKGKPIRLTADLSAETLQARRTEWGPIFNILKEKNFQPRISYPAKLSFISEGEIKYFTDKQMLRDFVTTRPALKRAPGKEGTXTLERDNRYQPLQKHAKL

SEQ ID NO: 48895 - protein, 473 aa, Homo sapiens
  DOMAIN (146)..(172): Aminotransferases class-III pyridoxal-phosphate attachment si domain identified by eMATRIX, accession number BL00600B, p-value= 1.000e-18, raw score of 19.60
  DOMAIN (161)..(465): Aminotransferases class-III pyridoxal-pho domain identified by PFam, accession name aminotran_3, E-value=1e-46, PFam score of 135.9
  misc_feature (1)...(473): Xaa = X or * as defined in Table 2
QDLRLFYLKDTMFSKLAHLQRFAVLSRGVHSSVASATSVATKKTVQGPPTSDDIFEREYKYGAHNYHPLPVALERGKGILLMGMXEGRKYFDFLSSYSALSNQGHCHPKIVKCSGRVKWDKIDLXHLEAFYNNGTLVNMREYYYXTFSTYHKVLPMNTGVEAGETACKLARKWGLYTVKGIQKYKAKIVFAAGNFWGRTLSAISSSTDPTSYDGFGPFYARDFDIIPYXXSCPHMEQCSFKDPKCGLAFHGXEPIQGEAGVVVPDPGYLMGSAESSGTRDQVLFICLMEIQTGLARTWXDGLAVDYENVRPDIVLLGKALSGGLYPVSAVLCDDDIMLTIKPGEHGSTYGGNPLGCRVAIAALEVLEEENLAENADKLGIILRNELMKLTLPSMLVTARKKEKGIYLNAHLAIKGNQKIWDAWGKVCLRLQDNGLLPKPTSVATLSRFAPPLVIKEDELRESIEIINKTILSF

SEQ ID NO: 48896 - protein, 115 aa, Homo sapiens
ARAKGLEKARRRSRREATVPRRREARPFQTGNQLSVKMAGPELLLDSNIRLWVGLPIVIITFFVGMIRHYVSILLQSDKKLTQEQVSDSQVLIRSRVLRENGKYIPKQSFLTRKY

SEQ ID NO: 48897 - protein, 71 aa, Homo sapiens
  misc_feature (1)...(71): Xaa = X or * as defined in Table 2
RTAYFCQYHTASVYSERAMPPGCPEPSQAXELQETGHRQVALRRSGRPPKCAERPGAADTGAHCTSTDGRL

SEQ ID NO: 48898 - protein, 112 aa, Homo sapiens
  misc_feature (1)...(112): Xaa = X or * as defined in Table 2
NSESPGPLWWLSCDNPAKDRIYSTEADGLGLPDQSFVVHRAQLXCVAGXLGTHSRFQEWAVXDXSDLLKAQLHFKVGRCVWEAGGGLEWVLGGRCRCRVPQPLETLIQWGPW

SEQ ID NO: 48899 - protein, 477 aa, Homo sapiens
  DOMAIN (165)..(187): Iron dependant repressor domain identified by eMATRIX, accession number PF01325B, p-value=5.680e-09, raw score of 20.91
  DOMAIN (58)..(113): von Hippel-Lindau disease tumor suppressor p domain identified by PFam, accession name VHL, E-value=1.5e-42, PFam score of 154.8
MPRRAENWDEAEVGAEEAGVEEYGPEEDGGEESGAEESGPEESGPEELGAEEEMEAGRPRPVLRSVNSREPSQVIFCNRSPRVVLPVWLNFDGEPQPYPTLPPGTGRRIHSYRDPTMLTDMMKGNVTNVLPMILIGGWINMTFSGFVTITPDYVPPLGNFDVETLDITPHTVTAISAKIRKKGKIERKQKTDGSKTSSSDTLSEEKNSECDPTPSHRGQLNKEFTGKEEKTSLLLHNSHAFFRELDIEVFSILHCGLVTKFILDTEMHTEATEVVQLGPPELLFLLEDLSQKLESMLTPPIARRVPFLKGSGPGEEAWTGIPVTPVGVSLGSMARGRQTGRTGRAPGYRAAADRQSGGVGSPWIRGWGQAAAGTLCGSRGSRGFRPTQRLQRPQATPILLSTHEFSGTMIGLCNVTSSPAFALYSHAIEHRSLDAGGEVVVHARYGRYTARGVLPSPSTAPGSGCALSVRSEMGTVD

SEQ ID NO: 48900 - protein, 264 aa, Homo sapiens
  misc_feature (1)...(264): Xaa = X or * as defined in Table 2
RWQGQRLLLDSNIRLWVVLPIRYSFTFFRRALIRHYVSILLAERQRSFTQGNKYLDSSSPNFEGRVRFRGKLGNYIPKQSFFGRRKFLFFPNPEDGIFSKKLKREVVPPSPMTDPTMLTDMMKGNVTNVLPMILIGGWINMTFSGFVTTKVPFPLTLRFXAXWLQQGNRSYSPFRCIPGXWFCIPGYFPQCILGFRSIYTLWISGGKDNGRWNQSRMMDRSRMTGASHGPWPADSGRRFPNKRWEALELTDHQWALDAAGEDAA

SEQ ID NO: 48901 - protein, 42 aa, Homo sapiens
  misc_feature (1)...(42): Xaa = X or * as defined in Table 2
LPTKSTWVAGKKXKKRSNIKDYSTPLTSYRSIRSHAFKIVAS

SEQ ID NO: 48902 - protein, 112 aa, Homo sapiens
  DOMAIN (59)..(76): CLASS IA AND IB CYTOCHROME C SIGNATURE domain identified by eMATRIX, accession number PR00604D, p-value=1.000e-17, raw score of 15.86
  DOMAIN (3)..(112): Cytochrome c domain identified by PFam, accession name cytochrome_c, E-value=0.016, PFam score of 13.8
  misc_feature (1)...(112): Xaa = X or * as defined in Table 2
IWGDVEKGKKVFYLXRCSQCHTVXERGGKHKTGPKSPXVSFGRRTGQAPWDTLYTAANKNKGIIWGEDTLMEYLENPKKVHPLDTKMIFVRHLRKREERADLIALSSKKLLN

SEQ ID NO: 48903 - protein, 210 aa, Homo sapiens
  DOMAIN (33)..(53): RECOVERIN FAMILY SIGNATURE domain identified by eMATRIX, accession number PR00450B, p-value=6.850e-24, raw score of 11.76
  misc_feature (1)...(210): Xaa = X or * as defined in Table 2
VTGAQRLVTCRMGKQNSKLAPEVMEDLVKSTEFNEHELKQWYKGFLKDCPSGRLNLEEFQQLYVKFFPYGRRLPSFAQHAFPNLSTRMGDGTIDFREFICALSITSRGSFEQKLNWAFNMYGPGWVMGKITRVEMLEIHRGLSYQNGXGTVIMMKMNEDGLTPEQRVGQDFSARWVRNKDDQIYTGIDFKGSCQRADPFIVXLLQCDIHK

SEQ ID NO: 48904 - protein, 157 aa, Homo sapiens
  DOMAIN (22)..(144): PX domain identified by PFam, accession name PX, E-value= 0.031, PFam score of 11.0
GAEGARGGGSSYSEMAETVADTRRLITKPQNLNDAYGPPSNFLEIDTNLPIFKLKESTVRRRYSDFEWLRSELERESKVVVPPLPGKAFLRQLPFRGDDGIFDDNFIEGKKTRGWEQFINKVSLGHPLAQNEPLFFHMFLQDEIIDKSYTPSKIRHA

SEQ ID NO: 48905 - protein, 228 aa, Homo sapiens
  misc_feature (1)...(228): Xaa = X or * as defined in Table 2
LRARSLRDRCARAPCPHGGQQRRRRRLNAEGAEGARGGGSSYSEMAETVADTRRLITKPQNLNDAYGPPSNFLEIDVSNPQTVGVGRGRFTTYEIRVKTNLPCFQSXKNLIVRRRYSDFEWLAKWNLERESKVVVPPLPGKAFLRQLPFRGDDGNILMDNFIXEERKIRGWSSFLNKVAGHPLAQNERCLHMVFYQDEIIDKKLLLPSKNKAMPWKFGPRKGAKNVDY

SEQ ID NO: 48906 - protein, 157 aa, Homo sapiens
  misc_feature (1)...(157): Xaa = X or * as defined in Table 2
MVAKKNXHMLKHPGAGSKECAQPSCHEGHAVSQVPRRREGTVSTGPLPMRVCSISVITFICRRRLCLPPYAVAVQRLAGLGLKVWRVSDLRVSQEGKLTEIPTDGVLCHLVPTRKPRLGLGQQPNSSLEADLVVYVVSHLSKIGEDSFALNKLTAVD

SEQ ID NO: 48907 - protein, 362 aa, Homo sapiens
  misc_feature (1)...(362): Xaa = X or * as defined in Table 2
RPLHTLEVLRRMTKRLVTKAAASAARAQPAEPRDRKYDKHLSYLATWGRSAGRAGSPRGARGRELARAPVSLPAGVPGRGSAAGHSSEARTGPNGKMGGSSREPGTEKVPCPRGLSPTREVGHQVHGTLGAGPNELHPSGPAGARCRPGRREAKLGDAARSEAQSSAHKFHIDSLSLPWNPTAMEMLMPKKNRIAIYELLFKEGVMVPKKDVPIPKHPELAEQKCAPTFHVMKAMQSLKSPRPTXKEQFAWRHFYWYLTNEGIQYLRDYLHLPPEIVPAHPYGRSPSRRLARPRPKKVWKGEATLRDFTRGEADSFLCHSDSYRRSAVPPGADKKAEAGGLGQKPNFQFRGGFVRGRGQPPQ

SEQ ID NO: 48908 - protein, 350 aa, Homo sapiens
  DOMAIN (96)..(111): RIBOSOMAL PROTEIN P2 SIGNATURE domain identified by eMATRIX, accession number PR00456E, p-value=8.861e-09, raw score of 3.06
MRKDSEGCESNCNRIGVDCMFKGLRESVFAFCSRVMRKCMWLCVQDSNVFVSQPSSVLTQAPGSRSRSRSVDALHASKRRAWGIVAGLPGRGRVLAAAARSRVPAAAAAAMVSPVTVVKSEGPKLVPFFKATCVYFVLWLPSSSPSWVSTLIKCLPIFCLWLFLLAHGLGFLLAHPSATRIFVGLVFSAVGDAFLIWQDQGYFVHGLLMFAVTHMFYASAFGMQPLALRTGLVMAALSGLCYALLYPCLSGAFTYLVGVYVALIGFMGWRAMAGLRLAGADWRWTELAAGSGALFFIISDLTIALNKFCFPVPYSRALIMSTYYAAQMLVALSAVESREPVEHYRLTKAN

SEQ ID NO: 48909 - protein, 176 aa, Homo sapiens
  DOMAIN (77)..(176): Ribosomal protein L6e domain identified by PFam, accession name Ribosomal_L6e, E-value=0.016, PFam score of -75.2
  misc_feature (1)...(176): Xaa = X or * as defined in Table 2
MGRYMEREPLQGNHRRSGLSGERCSHMGGVLIERRELQTETRKEGVVEWCWLEKEVLATITKPVRGDKNGGTQVVKHRKMPRYYPTEDVPQKLLSHGKKPFSQHMRKLFLYRRHARNLSLPPQPELIISDVKIPRHPADAXLEEQQLSEPEHSEGTSYXRIPEKVLSYPAIRPQQC

SEQ ID NO: 48910 - protein, 36 aa, Homo sapiens
  misc_feature (1)...(36): Xaa = X or * as defined in Table 2
MYKRKYSAANTKVEKKKKEKVLAPVTKPVGGDKNGX

SEQ ID NO: 48911 - protein, 67 aa, Homo sapiens
  misc_feature (1)...(67): Xaa = X or * as defined in Table 2
ARMSQEKDFHKVMSALKARTGHLHFFCGGMSSVKVGQGFSLLLXFFSYFRPSGCILPLXELPEARCP

SEQ ID NO: 48912 - protein, 238 aa, Homo sapiens
  misc_feature (1)...(238): Xaa = X or * as defined in Table 2
GTQSCNQKVLNSANNLQELGIGPKFQMRLKPQLAPMQPNRGTSLGRSIPCPPVLCSMRKIHLRPQVLRPTSPRNISPILNRVSEVSDHAGTPALVLHPXRQVPLFWGRGKYPNPFSLCLYPFSAFLGGKKHPTPSPSPXVASPLFXRSKYPNLVSLCPSPLFPRPDLLSLWPNPLFRTPTSYISVPQSLISMPRPLISAPQPLISTTQPLSRFSGRSLLQVPEIWPPGQGMPAARDSS

SEQ ID NO: 48913 - protein, 126 aa, Homo sapiens; identical to SEQ ID NO: 43275

SEQ ID NO: 48914 - protein, 122 aa, Homo sapiens; identical to SEQ ID NO: 43278

SEQ ID NO: 48915 - protein, 10 aa, Homo sapiens
MFLGLVGLRT

SEQ ID NO: 48916 - protein, 78 aa, Homo sapiens; identical to SEQ ID NO: 47813

SEQ ID NO: 48917 - protein, 139 aa, Homo sapiens
  misc_feature (1)...(139): Xaa = X or * as defined in Table 2
RQVPLFWGRGKYPNPFSLCLYPFSAFLGGKKHPTPSPSPXVASPLFXRSKYPNLVSLCPSPLFPRPDLLSLWPNPLFRTPTSYISVPQSLISMPRPLISAPQPLISTTQPLSRFSGRSLLQVPEIWPPGQGMPAARDSS

SEQ ID NO: 48918 - protein, 62 aa, Homo sapiens
  misc_feature (1)...(62): Xaa = X or * as defined in Table 2
AELATGNVKVEASGTPEEKAGSVLGXACFAGPXERCCWQNNXDGIISIQSYCLCNLGCFIQT

SEQ ID NO: 48919 - protein, 118 aa, Homo sapiens; identical to SEQ ID NO: 30811
  DOMAIN (48)..(65): Zinc finger, CCHC class domain identified by PFam, accession name zf-CCHC, E-value=7e-05, PFam score of 29.7

SEQ ID NO: 48920 - protein, 48 aa, Homo sapiens
SLQLLSREHLGRGQSESLGPEFQGLWEWLPGELNSLISSRVPHRWDTA

SEQ ID NO: 48921 - protein, 104 aa, Homo sapiens
GASEAIGQCRSSAAKPRRSGKESESLGPEFQGLWEWLPGSPAPLSSQKFANYLIRALSEILQKQSASGGKSDPNWRNKHPTYLHAHMVLRPCLEGDIKHLGELV

SEQ ID NO: 48922 - protein, 102 aa, Homo sapiens
CWIFEEPEENFFLQPILNPVSGLFLFSSPLSLNLSSLSLNLFLLSILAPHFNLSILLISIPFIFPLEIELSNSPGSHSQSPWNSGPRLSDSFPDLLGLAAEE

SEQ ID NO: 48923 - protein, 224 aa, Homo sapiens; identical to SEQ ID NO: 31182

SEQ ID NO: 48924 - protein, 272 aa, Homo sapiens; identical to SEQ ID NO: 32370

SEQ ID NO: 48925 - protein, 107 aa, Homo sapiens
  misc_feature (1)...(107): Xaa = X or * as defined in Table 2
LTSPSRCTIIEKSCSSLPPLXDKPQPHLQHTRTSKRLNCSSQVFLQNLLPEELATSSRNLATGPRNACSPGFLLSHIPSVWDPTGNRTVQLTWQPLPEPLELWPKAL

SEQ ID NO: 48926 - protein, 931 aa, Homo sapiens
  DOMAIN (366)..(382): Ank repeat proteins domain identified by eMATRIX, accession number PF00023A, p-value=4.536e-09, raw score of 16.03
  DOMAIN (362)..(501): Ank repeat domain identified by PFam, accession name ank, E- value=7.5e-09, PFam score of 42.8
VFDRTQNVQGRIMEAPEYLDLDEIDFSDDISYSVTSLKTIPELCRRCDTQNEDRSVSSSSWNCGISTLITNTQKPTGIADVYSKFRPEKRVLPLKHQPETLENNESDDQKNQIVGEYQKGGESDLGPQPQELGPGDGVGGPPGKSSEPSTSLGELEHYDLDMDEILDVPYIKSSQQLASFTKVTSEKRILGLCTTINGLSGKACSTGSSESSSSNMAPFCVLSPVKSPHLRKASAVIHDQHKLSTEETEISPPLVKCGSAYEPENQSKDFLNKTFSDPHGRKVEKTTPDCQLRAFHLQSSAAESKPEEQVSGLNRTSSQGPEERSEYLKKVKSILNIVKEGQISLLPHLAADNLDKIHDENGNNLLHIAASQGHAECLQHLTSLMGEDCLNERNTEKLTPAGLAIKNGQLECVRWMVSETEAIAELSCSKDFPSLIHYAGCYGQEKILLWLLQFMQEQGISLDEVDQDGNSAVHVASQHGYLGCIQTLVEYGANVTMQNHAGEKPSQSAERQGHTLCSRYLVVVETCMSLASQVVKLTKQLKEQTVERVTLQNQLQQFLEAQKSEGKSLPSSPSSPSSPASRKSQWKSPDADDDSVAKSKPGVQEGIQVLGSLSASSRARPKAKDEDSDKILRQLLGKEISENVCTQEKLSLEFQDAQASSRNSKKIPLEKRELKLARLRQLMQRSLSESDTDSNNSEDPKTTPVRKADRPRPQPIVESVESMDSAESLHLMIKKHTLASGGRRFPFSIKASKSLDGHSPSPTSESSEPDLESQYPGSGSIPPNQPSGDPQQPSPDSTAAQKVATSPKSALKSPSSKRRTSQNLKLRVTFEEPVVQMEQPSLELNGEKDKDKGRTLQRTSTSNESGDQLKRPFGAFRSIMETLSGNQNNNNNYQAANQLKTSTLPLTSLGRKTDAKGNPASSASKGKNKAA

SEQ ID NO: 48927 - protein, 108 aa, Homo sapiens
  misc_feature (1)...(108): Xaa = X or * as defined in Table 2
ERSTYNLRSSDQPRPRNILTNFKSVDKGDTFYPWTHNSGASHGLGRRLPWCXELATSARNLTPRPRTAGSPGFLLSHVPSVWDPTANRTVQLTWQPLPEPLELWPKAL

SEQ ID NO: 48928 - protein, 1908 aa, Homo sapiens
  misc_feature (1)...(1908): Xaa = X or * as defined in Table 2
MLTLTGAGGESWIIRPGNLLEQLGAEETLGRRQEPGDEVTAHFLLQGVINMGPVPYPGAHSSNMPGSVSPILGHSVKLFEEYYPVGDPLMGSGRPHTPRKKIWSDLNAHSDLYLALDWTPLPEQSEPGPGLAAWKPFQAEEYTCKCAEGNENTPFDLRKGTLPCPRNLERARQAYMHIEEKFPFELTEQHICEFQSMCYVLVRVLGACSQSTWLILEPDGVSGPSKGASEAIGQCQSSAAKPRRSGKESVREPWARVPGALGVAASNIFLKGQQSRPIRGHSVLFPRVSLMLPPSHSLWLVLPGEPLNIACQLNPGSPSELTGEHFGKLLRKREHRGGEKLQGGHTRLWDQNGELSNCMAWYMPGLFKYRGKPMTLKHWLRVGSPLDGYAVIRFGTIIIKLLINTYILHIKCDLDLYRVFHMLILQIAKATVKVKAQRVRSLRHFQEVKGALTMPRLKGSVTLGSYQEHEVSSSSWNCGISTLITNTQKPTGIADVYSKFRPVKRVSPLKHQPETLENNESDDQKNQKVVEYQKGGESDLGPQPQELGPGDGVGGPPGKSSEPSTSLGELEHYDLDMDEILDVPYIKSSQQLASFTKVTSEKRILGLCTTINGLSGKACSTGSSESSSSNMAPFCVLSPVKSPHLRKASAVIHDQHKLSTEETEISPPLVKCGSAYEPENQSKDFLNKTFSDPHGRKVEKTTPDCQLRAFHLQSSAAESKPEEQVSGLNRTSSQGPEERSEYLKKVKSILNIVKEGQISLLNFKAEGNLSNHGPDSLNHLLHLXREHLTACILSTSVPEPLSQICLELGVAEFEFQPATLECMLSCFRVMAXESWIIRPGNLLEQLGAEETLGRRQEPGDEVTAHFLLQGVINMGPVPYPGAHSSNMPGSVSPILGHSVKLFEEYYPVGDPLMGSGRPHTPRKKIWSDLNAHSDLYLALDWTPLPEQSEPGPGLAAWKPFQAEEYTCKCAEGNENTPFDLRKGTLPCPRNLERARQAYMHIEEKFPFELTEQHICEFQSMCYVLVRVLGACSQSTWLILEPDGVSGPSKGASEAIGQCQSSAAKPRRSGKESVREPWARVPGALGVAASNIFLKGQQSRPIRGHSVLFPRVSLMLPPSHSLWLVLPGEPLNIACQLNPGSPSELTGEHFGKLLRKREHRGGEKLQGGHTRLWDQNGELSNCMAWYMPGLFKYRGKPMTLKHWLRVGSPLDGYAVIRFGTIIIKLLINTYILHIKCDLDLYRVFHMLILQIAKATVKVKAQRVRSLRHFQEVKGALTMPRLKGSVTLGSYQEHEVSSSSWNCGISTLITNTQKPTGIADVYSKFRPVKRVSPLKHQPETLENNESDDQKNQKVVEYQKGGESDLGPQPQELGPGDGVGGPPGKSSEPSTSLGELEHYDLDMDEILDVPYIKSSQQLASFTKVTSEKRILGLCTTINGLSGKACSTGSSESSSSNMAPFCVLSPVKSPHLRKASAVIHDQHKLSTEETEISPPLVKCGSAYEPENQSKDFLNKTFSDPHGRKVEKTTPDCQLRAFHLQSSAAESKPEEQVSGLNRTSSQGPEERSEYLKKVKSILNIVKEGQISLLNFKAEGNLSNHGPDSLNPYSTSKESILQPVSLAPQCLNLFPRFVWSWVWLSLSSSQPRWSACCPVSGSWLKKNLSSSSLSLFSLDEKQEETNGTYFSLCQMGSRVIGIYPFPSRIVSSHTCTHIVGYCETIRRGNDWNMSKGAVTQSPLSFTVDQPCKTSPPSVKMCACCTARSHTEPAHSSALFQSISNGQHRRAPSKSSSLRLHAFFLLSEHGISHLSSFLTEPEVSAELGSFGRHASRFSFPPSCLTFSELLTIFNFRHFVRQFRALCQPFSSTPGGTHHRRYCSARCVITATPPGFFERDTECGIVLVLRVVVCGRFVVV

SEQ ID NO: 48929 - protein, 481 aa, Homo sapiens
  DOMAIN (213)..(227): VERTEBRATE METALLOTHIONEIN SIGNATURE domain identified by eMATRIX, accession number PR00860B, p-value=8.254e-09, raw score of 7.04
  misc_feature (1)...(481): Xaa = X or * as defined in Table 2
CSEYEDSSPAPVPATDLSSTLSSSVPQPQDTGTSQQLHPLDPWHELLRAQELQGATNHKGYSHAEHEHAGLGVQGGNGALAFSNSGHRHAVPTISSGTGRRRTPSSSAFGLLNLHQWFVSGFQAFSDRLKAALSASLLLRFGDSDWLPSSSACKCLMLGLHFVIVGNICATLKEKYSSMLHLDVTMKKNGEKRTRLQKRKKGMPPHPASXGPKHSCHHSPCQCCPSSAKSASELQGSWTPFGGLLTRTRMKFGAKTRDLDQGTSLGRSLPCPPTLCSMRKIHLRPQVLRPTSPRNISPISNPRQRRQVLSMDPKLRHRSRTGKDSLPLVFNHCRDTSLIIHPCFKGVRPRRDACLGPSPLAASPAFLEKGQDLINLAFKVYNNRKKLQFLASTVRQTAATSPAHKNFQMPEPQRPGVPPEPPPTGACYMCRKIWPLGQANARSPGFLLSRVPSVRDPTGNRTVQLTWQPLPEALELWPKAL

SEQ ID NO: 48930 - protein, 62 aa, Homo sapiens
CSLLPEKDPPMTSGPQTDQPKEHLTNFKSAARRSSRTSSHRNLLHVLEIWQLDQGMPAARDF

SEQ ID NO: 48931 - protein, 38 aa, Homo sapiens; identical to SEQ ID NO: 45397
  misc_feature (1)...(38): Xaa = X or * as defined in Table 2

SEQ ID NO: 48932 - protein, 152 aa, Homo sapiens
MPISRPTARFKRIKVYYHSPATAWPSKAYKLPLQFPHFTCPKTRQGLQVTSGSAPYQPNCFVYPPRVAKTKYSPILNTSLHNPLLCSGSQTCFLYSFLCTFHPSLSSLSLGLTLTPIRLSKLRGLYCHKASQTAPITSIKPKFLPHLLPISA

SEQ ID NO: 48933 - protein, 89 aa, Homo sapiens
MAPPLSPFADSLFGLSPPAPRDKGDTFYPWTQNSGARHGLGRQPSLGVSSLQGRLSDHSPTFQRCQTTQGRLPWSFTLSGKSCFSEEGA

SEQ ID NO: 48934 - protein, 152 aa, Homo sapiens
  DOMAIN (29)..(45): Retroviral aspartyl protease domain identified by PFam, accession name rvp, E-value=0.059, PFam score of 12.0
RLKTDAARSPRKPPGLSQTLWVTLTVEAPLLGRDILTKFSASLTIPGLQPHLIAAFSPSSKPPSPPPLVSPHLNPQVWDTSTPSLATDHAPLTISLKPNHPYPTQRQYPILQHALKGLKPVITHLLQHGLLKPINSPYNSPILSVQKPDKPY

SEQ ID NO: 48935 - protein, 153 aa, Homo sapiens
  misc_feature (1)...(153): Xaa = X or * as defined in Table 2
LLLTQSLFGGLFTRTRMKFGAVTRIGGPPLGNQSPSSCSLLHEKDPPTTSGPQTDQPKKHLTNFKSAARPTFLGQGQVPLNPFSFTLSEQVLLSXAARTPQSLISTPQPLISVPQSLISVPQPLLYFSGGQEPPPPPLLCVSSLFSRLASFTM

SEQ ID NO: 48936 - protein, 57 aa, Homo sapiens; identical to SEQ ID NO: 31166
  misc_feature (1)...(57): Xaa = X or * as defined in Table 2

SEQ ID NO: 48937 - protein, 73 aa, Homo sapiens; identical to SEQ ID NO: 45401

SEQ ID NO: 48938 - protein, 77 aa, Homo sapiens
  DOMAIN (45)..(62): Zinc finger, CCHC class domain identified by PFam, accession name zf-CCHC, E-value=0.00014, PFam score of 28.6
LGSGDLPWEINPLSSCSLLREKEPPTTSGPQTNQAKKHLTNFKSGACYTCRKSGHWAKECPQPGIPPKPRPICVGPH

SEQ ID NO: 48939 - protein, 231 aa, Homo sapiens
  misc_feature (1)...(231): Xaa = X or * as defined in Table 2
MAPTNCKGSRKCGRPHEQMPHPYLPLLTLFSDSARLHPGEINSRVPHTKPVWWSLHTDAYEIWYHDSDWGDLPWEINPLSSCSLLHEKDPPTTSGPQTNQPKEHLMNFKSGPHWKSDCPTRQPLPGPLELWPKAHLTDSFPDLLSLAAEDXCCLIALEAPWTITDAELWITLTVEDSQLYEDTLAGRSVLIKNLTPXTLQPLDGLDPTXSSIVPQLPSACRILPTGFTVPE

SEQ ID NO: 48940 - protein, 179 aa, Homo sapiens
FSFTYPNPIKQPHPYLPSLTLFSDSAHLHPGEINSHVAHTKPVWWSLHTDTHEIWCCDSDRGTSFGRSIPCPPVLCSMRKIHLRPQVLRPTSPRNISPISNPAAPRQAELGPNSSSASAPPPYNPFITSPPHTWSGLQFHSVTSPPPPAQQFTLKRVAEAKGIVKTVTDAELRVTLTVE

SEQ ID NO: 48941 - protein, 263 aa, Homo sapiens; identical to SEQ ID NO: 45414
  misc_feature (1)...(263): Xaa = X or * as defined in Table 2

SEQ ID NO: 48942 - protein, 55 aa, Homo sapiens
MCKRMPGRQAPQTICLFYNKNYLDLARWKNSKCHFLVIWNYCRVCIGVKRHSRRK

SEQ ID NO: 48943 - protein, 1131 aa, Homo sapiens
  DOMAIN (999)..(1049): ENV polyprotein (coat polyprotein) domain identified by eMATRIX, accession number PF00429, p-value=3.829e-15, raw score of 31.08
  DOMAIN (879)..(1127): ENV polyprotein (coat polyprotein) domain identified by PFam, accession name ENV_polyprotein, E-value=4.4e-41, PFam score of 141.4
  misc_feature (1)...(1131): Xaa = X or * as defined in Table 2
AASHLCGTPLEIGLSNSPGSHSQSPWNSGPRLSDCFPDLLGXVAEDXHCPIASEASWTVTELWVTLTVEVAATALILLEALKITSYAPLTLYSSHNFQNLFSSSHLTPYTFCPQGPFSYTHSLLSLPQSPLLLAQTSIRPPTLFLIPHLTPMTVSLXSILTFIPFPHISFFPVPHPDHTWFIDGSSTRPNRHTPAKAGYAIVSSTFIIEATALPPSTTSQQAKLIALTQALTLAKGLLVNIYTDSKYAFHIQYHHAVIWAERNFLTTQGSSIINASLIKTLLKAALLPKEAGVIHCKGHQKASDPIALGNAYVDKVARQAASSPTSVPHGQFFSFTSVTPTYSPTETSTYQSLPTQGKWFLDQGKYLLPASQAHSILSSFHNLFYVDIIPRFGLPTSIQSDNGPAFTSQITQVVSQALGIQWNLHTPYRPQSSGKVERTNGLLKAHLTKFSLQLTKDWTALLPLALLKIRACPRDATGYSPFELLYGRTFLLGPNLIPDTSPLGDYLPVLQQARQEIRQAANLLLPTPDPQPYEDNLAGRSVLVKNLTPQTLQPRWTGPYLVIYSTPTAVCLQNPPHWVHHSRIKLCPSDSQPNPSSSSWKSQVLSPTSLKLTHISEEHAYTAVPALQTDWATSPISLHLRTSFNSPHLYPPEELIYFLDRSSKTSPDISHQQAAALLRTYLKNLSPYINSTPPIFGPLTTQTTIPVAAPLCISWQRPTGIPLGNLSPSRCSFTLHLRSPTTNINETIGAFQLHITDKPSINTDKLKNISSNYCLGRHLPCISLHPWLSSPCSSDSPPRPSSCLLIPSPENNSERLLVDTRRFLIHHENRTFPSTQLPHQSPLQPLTAAALAGSLGVWVQDTPFSTPSHLFTLHLQFCLAQGLFFLCGSSTYMCLPANWTGTCTLVFLTPKIQFANGTEELPVPLMTPTQQKRVIPLIPLMVGLGLSASTVALGTGIAGISTSVMTFRSLSNDFSASITDISQTLSVLQAQVDSLAAVVLQGQLRGLDLLTAEKGGLCIFLNEECCFYLNQSGLVYDNIKKLKDRAQKLANQASNYAESPWALSNWMSWVLPIVSPLIPIFLLLLFGPCIFRLVSQFIQNRIQAITNHSIRQMFLLTSPQYHPLPQDLPSA

SEQ ID NO: 48944 - protein, 251 aa, Homo sapiens
  DOMAIN (132)..(148): Eukaryotic and viral aspartyl proteases proteins domain identified by eMATRIX, accession number BL00141A, p-value=8.400e- 09, raw score of 12.10
  DOMAIN (118)..(215): Retroviral aspartyl protease domain identified by PFam, accession name rvp, E-value=4.1e-15, PFam score of 58.8
  misc_feature (1)...(251): Xaa = X or * as defined in Table 2
WQVPLFSGRGKYPNPFSPCLYPFSAFPGKRQELATSARNLSDHQAKECLQPRIPPKPCPIFAGPHWKSDCSTSPGQPLPEPLELWPKAHLTDSFPDLLGLAAEDXHCPIASEAPETITDAELPVTLTVEGKSIPCLIDTGATHSTLPSFQGPVSLAPITVVGIDGQASKPLKTPPLWCQLGQHSFMHSFLVIPTCPLPLLGRNILTKLSASLTIPGVQLHLIAALLPNPKPPLCPLTSPQYHPLPQDLPSA

SEQ ID NO: 48945 - protein, 124 aa, Homo sapiens
  DOMAIN (39)..(58): GLYCOSYL HYDROLASE FAMILY 47 SIGNATURE domain identified by eMATRIX, accession number PR00747C, p-value=4.960e-20, raw score of 12.06
KGATIVYALDTLFIMEMKHEFEEAKSWVEENLDFNVNAEISVFEVNIRFVGGLLSAYYLSGEEIFRKKAVELGVKLLPAFHTPSGIPWALLNMKSGIGRNWAWASGGSSILAEFGTLHLEFMHL

SEQ ID NO: 48946 - protein, 306 aa, Homo sapiens
  DOMAIN (148)..(165): GLYCOSYL HYDROLASE FAMILY 47 SIGNATURE domain identified by eMATRIX, accession number PR00747F, p-value=8.200e-18, raw score of 13.56
  DOMAIN (1)..(295): Glycosyl hydrolase family 47 domain identified by PFam, accession name Glyco_hydro_47, E-value=9.2e-10, PFam score of -45.5
  misc_feature (1)...(306): Xaa = X or * as defined in Table 2
PITLRRHLFFSGIGRNWPWASGGSSILAEFGTLHGMKIVFXHFHGNILFSIKVMNIRTVLNKLEKHYLNXKLNHSKIHFPLFPDHVSVGGLGDSFYEYLLKAWLSINLRRDYKMLKNKCFSQAIETHLIRKSSSGLTYIAEWKGGLLEHKMGHLTCFAGGMFALGADAAPEGMAQHYPVSTVQENNPYSFIPCPLVMKLGPEAFRFDGGVEAIATRQNEKYYILRPEVMETYMYMFRLSGSDFFSSFLLLPPQASSCFQTLFDLFKVPDSLCSILEFRRHSSRQPYSTDQPFIYLVGKRILFCPLT

SEQ ID NO: 48947 - protein, 32 aa, Homo sapiens
MLLLPPPISAGFCNIPAHHCLLMPAASSSSSK

SEQ ID NO: 48948 - protein, 145 aa, Homo sapiens
  DOMAIN (85)..(119): IMMUNOGLOBULIN V REGION domain identified by eMATRIX, accession number DM00031B, p-value=2.937e-09, raw score of 15.41
CYFGHSMDMRVPAQLLGLLLLFLRGAGSSSSSSSSSSSSSSSSSSSSSSSSSSSSSSSSSSSSSSSSSSSSSSSSSSSSSSSSSSSSSSSSSSSSSSSSSSSSSPLQPEDSATYLCQQTYTGPYTFGQGTNLEIRRTVAAPSAFI

SEQ ID NO: 48949 - protein, 257 aa, Homo sapiens
  DOMAIN (41)..(116): Immunoglobulin domain identified by PFam, accession name ig, E-value=5.5e-08, PFam score of 30.8
  misc_feature (1)...(257): Xaa = X or * as defined in Table 2
GHSMDMRVPAQLLGLLLLWLPGARCVIWMTQSPGTLSLSPGERATLSCRASQRVNSNYLAWYQQKPGKTPKLLIYGASNLETGVPSRFSGSGSGTDFIFTISSLQSEDIAMYYCQQYNNWPHPSTFGQGTKLEIKRTVAAPSVVHLPGPSDEQLKIWELPSACVPAXNNFYPQSRPKVQWEGGITPLQSGXLPQESVHRGRTRQGTAPYSPQQAPWTVRQSRITEETQSLTACEVTPSGALRFRPVHKGAFNRGESF

SEQ ID NO: 48950 - protein, 227 aa, Homo sapiens
  DOMAIN (22)..(222): Ribosomal L18ae protein family domain identified by PFam, accession name Ribosomal_L18ae, E-value=1.6e-11, PFam score of 46.7
  misc_feature (1)...(227): Xaa = X or * as defined in Table 2
HASADAWAANAEEHRHDRPRGTLREYKVVGRCLPTPKCHTPPLLPACEIFAPNHVVAKSRAFWYFVSQLKKMKKVFQGKIGLLVGQVFXESSPLRVXKNFRGSWLAAMDSRERAPTNMLPGNNRGPXPPAGGCSTQLLTRDNGVAPGTGAPKPHFHFRFIERLEGRFAGQQSCRRPALVQSSFHDSKIKFPACPNGVLRRQHKPRFTTKRPNTFFLGAGPSSGVCPK

SEQ ID NO: 48951 - protein, 261 aa, Homo sapiens
MDAQVSGHDRMELRYKTSPVFLRPLASTTQESVSHFIPAQAHAFTCITCKMPVSLCCTEKGRASNRAVRFGLMGSPHVRSCGEFGDSVALGISEPLWEEQEPQKLFQGPVKTQHQSIRDQRLHKYSHTRPNSKNTAGKGLSAPSQAFWGKPESCAVTPRFPKSKDEGWFLILGEVDKRELIALKRVGYIRNHHVASLSFYTPEIPGSPFTGHSTATATATSSSLQVELTGNSIYEYIHPADHDEMTAVLTAHQPYHSHFVQ

SEQ ID NO: 48952 - protein, 1565 aa, Homo sapiens
  DOMAIN (148)..(195): kw SKI2W SKI2 NUCLEOLAR HELICASE domain identified by eMATRIX, accession number DM01537B, p-value=1.878e-37, raw score of 21.63
  DOMAIN (691)..(901): DEAD/DEAH box helicase domain identified by PFam, accession name DEAD, E-value=7.3e-36, PFam score of 116.3
  misc_feature (1)...(1565): Xaa = X or * as defined in Table 2
MQGPYLLLWLPDSLEEGKEGLYLGNCIHTCLVTVPEDAFFPHFLTQHSGTHLPPSSDIPSHFMNNSTGRLAQRILGTSTEAFLSPEVMVFVHARNATVRTAMSLIERAKNCGHIPFFFPTQGHDYVLAEKQVQRSRNKQVRELFPDGFSIHHAGMLRQDRNLVENLFSNGHIKVLVCTATLAWGVNLPAHAVIIKGTQIYAAKRGSFVDLGILDVMQIFGRAGRPQFDKFGEGIIITTHDKLSHYLTLLTQRNPIESQFLESLADNLNAEIALGTVTNVEEAVKWISYTYLYVRMRANPLAYGISHKAYQIDPPLRKHREQLVIEVGRKLDKAQMIRFEERTGYFSSTDLGRTASHYYIKYNTIETFNELFDAHKTEGDIFAIVSKAEEFDQIKVREEEIEELDTLLSNFCELSTPGGVENSYGKINILLQTYISRGEMDSFSLISDSAYVAQNAARIVRALFEIALRKRWPTMTYRLLNLSKVIDKRLWGWASPLRQFSILPPHILTRLEEKKLTVDKLKDMRKDEIGHILHHVNIGLKVKQCVHQIPSVMMEASIQPITRTVLRVTLSIYADFTWNDQVHGTVGEPWWIWVEDPTNDHIYHSEYFLALKNQVISKEAQLLVFTIPIFEPLPSQYYIRAVSDRWLGAEAVCIINFQHLILPERHPPHTELLDLQPLPITALGCKAYEALYNFSHFNPVQTQIFHTLYHTDCNVLLGAPTGSGKTVAAELAIFRVFNKYPTSKAVYIAPLKALVRERMDDWKVRIEEKLGKKVIELTGDVTPDMKSIAKADLIVTTPEKWDGVSRSWQNRNYVQQVTILIIDEIHLLGEERGPVLEVIVSRTNFISSHTEKPVRIVGLSTALANARDLADWLNIKQMGLFNFRPSVRPVPLEVHIQGFPGQHYCPRMASMNKPAFQAIRSHSPAKPVLIFVSSRRQTRLTALELIAFLATEEDPKQWLNMDEREMENIIATVRDSNLKLTLAFGIGMHHAGLHERDRKTVEELFVNCKVQVLIATSTLAWGVNFPAHLVIIKGTEYYDGKTRRYVDFPITDVLQMMGRAGRPQFDDQGKAVILVHDIKKDFYKKFLYEPFPVESSLLGVLSDHLNAEIAGGTITSKQDALDYITWTYFFRRLIMNPSYYNLGDVSHDSVNKFLSHLIEKSLIELELSYCIEIGEDNRSIEPLTYGRIASYYYLKHQTVKMFKDRLKPECSTEELLSILSDAEEYTDLPVRHNEDHMNSELAKCLPIESNPHSFDSPHTKAHLLLQAHLSRAMLPCPDYDTDTKTVLDQALRVCQAMLDVAANQGLGWVTVLNITNLIQDGXSRGRWVXRDSSLLTLPNIENHHLHLFKKWKPIMKGPHARGRTSIECLPDLIHSCGGKDHVLSSMVESELHAAKTKQAWNFLSHLPVINVGISVKGSWDDLVEGHNELSVSTLTADKRDDNKWIKLHADQEYVLQVSLQRVHFGFHKGKPESCAVTPRFPKSKDEGWFLILGEVDKRELIALKRVGYIRNHHVASLSFYTPEIPGRYIYTLYFMSDCYLGLDQQYDNLSQRYTSESFCTGQHQGL

SEQ ID NO: 48953 - protein, 59 aa, Homo sapiens
  misc_feature (1)...(59): Xaa = X or * as defined in Table 2
SSCFKLHFQQLFKNCNTQMRNQIGFLRFXNNLVMLLSSSSVTNQLELQKKIILLTCKMQ

SEQ ID NO: 48954 - protein, 280 aa, Homo sapiens
  misc_feature (1)...(280): Xaa = X or * as defined in Table 2
ACGWALAQRPARRAMVAGIDAGRSLGVLSVVCLLHCFGFISCFSQQIYGVVYGNVTFHVPSNVPLKEVLWKKQKDKVAELENSEFRAFSSFKNRVYLDTVSRXPSLSTTXTSSRXKMKYEMESAKIVTDTMKFLPYVPXVSFQSPTLTCALTNGSIEVQCMIPEHYNSHRGLIMYSWDCPMEQCKRNSTSIYFKMENDLPQKIQCSLSNPLFNTTSSIILTTCIPSSGHSRHRYALIPIPLAVIPTCIVLYMEWVFXKCARNPDRTQLQLIGNRRMKTTA

SEQ ID NO: 48955 - protein, 48 aa, Homo sapiens; identical to SEQ ID NO: 30801

SEQ ID NO: 48956 - protein, 90 aa, Homo sapiens
  misc_feature (1)...(90): Xaa = X or * as defined in Table 2
PQVLRPTSPRNISPILNRVSDHAGTPALVLHPXRQVPLFWGRGKYPNPLYLCAPIPYFRTHNLISLRPNPLCPHPDLVSLCPDPFPAFLE

SEQ ID NO: 48957 - protein, 89 aa, Homo sapiens; identical to SEQ ID NO: 48933

SEQ ID NO: 48958 - protein, 112 aa, Homo sapiens
  DOMAIN (44)..(61): Zinc finger, CCHC class domain identified by PFam, accession name zf-CCHC, E-value=0.0035, PFam score of 23.7
  misc_feature (1)...(112): Xaa = X or * as defined in Table 2
QYISELQFLASTVRQTPATSPAHKNFQTPEPQQPGIPPEPPPPGACYKCWKSGHQAKECLQPGIPRKPRPISGSHSQSPLELWPKAHLTDSFPDLLGLAAEDXHCPIASEAL

SEQ ID NO: 48959 - protein, 98 aa, Homo sapiens
  misc_feature (1)...(98): Xaa = X or * as defined in Table 2
CQTTQGRLLTAGTPLXSFTHVSRVSDHAGTPALVLHPXRQVPLFWGRGNHISGTQELPNTXTAVVQAFLPEPPPTGCLLHVPEIWPLGQGMPAGQDSS

SEQ ID NO: 48960 - protein, 107 aa, Homo sapiens
VKFGPEIWCRDSDQGRGGVGTSLGRSIPCPPALCSVRKIYLRPLVLRPTSPRNISPILNRDPTVQLTWQPLPEPLELWPKAHLTDSFPDLLGLAAEDRCCPIASEAP

SEQ ID NO: 48961 - protein, 92 aa, Homo sapiens
  misc_feature (1)...(92): Xaa = X or * as defined in Table 2
PPRQAKMQNLAAPGSHSQSPWTLRPKALXLTPSQIFSAXRLKTDTARSPRKPPSFQGPVSLASITVVGIDGQASKPLKTPQLWCQLRQYSFK

SEQ ID NO: 48962 - protein, 76 aa, Homo sapiens
IILVVKWANGLRCLTSRHSFTHQSLPSPLCPVQLVPNSRLSPQSQPQASLSLSNLPFLQTHLTSPFLPRLLLARPK

SEQ ID NO: 48963 - protein, 47 aa, Homo sapiens; identical to SEQ ID NO: 33408
  misc_feature (1)...(47): Xaa = X or * as defined in Table 2

SEQ ID NO: 48964 - protein, 429 aa, Homo sapiens
  DOMAIN (281)..(299): RNase H domain identified by eMATRIX, accession number PF00075J, p-value=1.225e-16, raw score of 15.78
  DOMAIN (258)..(342): Integrase core domain identified by PFam, accession name rve, E-value=1.9e-18, PFam score of 67.8
  misc_feature (1)...(429): Xaa = X or * as defined in Table 2
MNFEGTETLHCNGHCKVIAMTLGNQEVNQRNFSTGTTGPMEGMWLLSSNSHHSLKYAGALAILSAFQYQERGSQAGHRDSWPETKETHFICGPKTPALVTDWEGSLPLVFNHCRDASLIIHPRFSGVRPRRDACLGPSPLAATPQTITDTELWVTLTVEVWDISTLFPGNXSHATLPSHXNLITLTPLNANIAIPQHALKGLKPVITRLLQHGLLKPINSPYNSPILPVQKLDKSYRLVQNLRLINKIVSPIHPVVPNPPAFTSQITQAVSQALGIQWNLHIPYHPQSSGKVERTNGLLKVHLTKLSLQLKKDWTVLLPLALLRIRACPRDATGYSRFELLYGRTFLLGPNLIPDTSPLGDYLPVLQQARQAANLLLPTPDPQPHEDTLAGRSVLVKNLTPQTLQPRWTGPHFIIYSTPTAVCLQDPPH

SEQ ID NO: 48965 - protein, 310 aa, Homo sapiens; identical to SEQ ID NO: 31184

SEQ ID NO: 48966 - protein, 144 aa, Homo sapiens
TKETGFIHGPKTPAPVTDWEGSLPLVFNHCRDTSLIIHPCFKGVRPRRDACLGPSPLAASPAFLEKGQDLINLAFKVYNNRKKLQFLASTVRQTAATSPAHKNFQMPEPQRPGVPPEPPPTGCLLHVPEIWPLGQGMPAARDSS

SEQ ID NO: 48967 - protein, 36 aa, Homo sapiens; identical to SEQ ID NO: 45402

SEQ ID NO: 48968 - protein, 199 aa, Homo sapiens; identical to SEQ ID NO: 33685
  misc_feature (1)...(199): Xaa = X or * as defined in Table 2

SEQ ID NO: 48969 - protein, 447 aa, Homo sapiens
  DOMAIN (234)..(282): Cadherins extracellular repeat proteins domain proteins domain identified by eMATRIX, accession number BL00232B, p-value= 2.269e-13, raw score of 32.79
  DOMAIN (142)..(242): Cadherin domain identified by PFam, accession name cadherin, E-value=0.0094, PFam score of 22.3
MQKRLWNWVTGRDWNSLQGSVEDRKMRESLELSRDLPNGFDQNADNDINDENQAEVVSDRDEELVGNWSKGTPEDYPRFFHMHPRTAELSLLEPVNRDFHQKFDLVIKAEQDNGHPLPAFAGLHIEILDENNQSPYFTMPSYQGYILESAPVGATISDSLNLTSPLRIVALDKDIEDTKDPELHLFLNDYTSVFTVTQTGITRYLTLLQPVDREEQQTYTFSITAFDGVQESEPVIVNIQVMDANDNTPTFPEISYDVYVYTDMRPGDSVIQLLMATKDTGDYYGGREGEETIEKLTIVYYTQYLGDRINHTPNLNIMQYTQGASEAIKQCQSSAAKPRRSGKESVSLGPEFQGLWEWLPGELNSPIFSGVPHRWDAAYEESRAAGIPWPSGQISCMCSKLLWEEVLEERLAAAVQAFGSSFVLEMWLGFVSQWRQGIATFFYYCTP

SEQ ID NO: 48970 - protein, 52 aa, Homo sapiens
  misc_feature (1)...(52): Xaa = X or * as defined in Table 2
VPILPQPLLLHPAIFLSPPLLTPGPAYSFVPXLALPHLPSNLLLKRWLEPKA

SEQ ID NO: 48971 - protein, 36 aa, Homo sapiens
MSSVKAGTSHFHFFCGSSVASGHLDVYMHAWAQRPA

SEQ ID NO: 48972 - protein, 159 aa, Homo sapiens
KALLLTQSLFGGLFTRMRMKFGAVTRIGGTSLGRSIPCPPALCSMRKIHLRPLVLRPTSPRNFSPILNQSQLQALLSLSNLPFLRTHLTPPLLPRLLLARPSQVPILPQPLLPDPIILLSPPLLTPGRAYSFILRLALLHLPNNFLLKRWLKLKAQSSG

SEQ ID NO: 48973 - protein, 271 aa, Homo sapiens
MSQEKDFHKGASDTIRQYQSSAAKPRRSGKESVREPWARVPGALGVAARKAGLAAKGEGPRQASLRGLTPLKHECIIRGVPAMIKHQGKAAFPVHDRRRSFGSTDKTCLLCLYQKMKGIEIKRREKLKCGTKIERRKRLRDMHYLKFLKESRIQDAGGDGQNEGPGIEIPKKRSHEEHLEGLKARMNNQTALLLLIVKIISKLPGAVYYISIVIFYPKISNSPTSLSAPGHEHCAALRLSKAVAAPFTGTERDRSTPAAFEAIIPDINQTS

SEQ ID NO: 48974 - protein, 171 aa, Homo sapiens
MPHQNGNKCGYQRSLQSFWILMEKKKLPFAWNFLMWPQIAIHLMPLDMLFHTCEINSHVAHTKPVWWSLHTDAYEIWCCDSDRGTSLGRSIPCPPVLCSVRKIHLRPQVLRPTSPRNISPILNQTITDAELRVTLTVEECSLFSLRVVDSMPAHVSRRSSTSNFTKIINLT

SEQ ID NO: 48975 - protein, 483 aa, Homo sapiens; identical to SEQ ID NO: 33014
  DOMAIN (241)..(281): kw TRANSCRIPTASE REVERSE II ORF2 domain identified by eMATRIX, accession number DM01354Y, p-value=9.571e-24, raw score of 10.69

SEQ ID NO: 48976 - protein, 55 aa, Homo sapiens
LGSGDLPWEINPLSSCSLLHEKDPPTTSGPQTDRPKEHLINFKSGACYTCRKSGH

SEQ ID NO: 48977 - protein, 702 aa, Homo sapiens; identical to SEQ ID NO: 45423
  misc_feature (1)...(702): Xaa = X or * as defined in Table 2

SEQ ID NO: 48978 - protein, 78 aa, Homo sapiens
  misc_feature (1)...(78): Xaa = X or * as defined in Table 2
RHSQAAEDXHCPIALEVPQTIIDAELRVTLTVEGYSLPPGCLRGLMLSVSGFSRSTVQAVSGSTVLGSGGQWFSCASV

SEQ ID NO: 48979 - protein, 532 aa, Homo sapiens
  misc_feature (1)...(532): Xaa = X or * as defined in Table 2
LGSGDLPWEINPLSSCSLLCEKHPPTTSGPQTDQPKKHLTNFKSGETKEMHFIRGPKTPVPVTDWEGSLLLVFNHCRDGLSDHSATFQGCQTMAGMPALVLHPXRQVPLFWGRSKLLLARLSXVPILPQPLLLHPIILLSPPLLTPGPAYSFVPXLSMSIHQVVLRPDEQGPGQEQQPPLYVMEPGEINSFIAHTKPVWWSLHTDAHEIWCHDSDRGTSLGRSIPCPPALCSVRNIRLRPQVLRPTSPRNISPILNQERQRRCILFVDPKLRCQSRTGKAAFSWCLIIAGTASLIIQPHFKGVRPCRDACLGPSPLAASPAFLGKEQAAPCQAELGPNSSSASAPPPYNPFITSPPHTRSGLQFRSVTSPPPPAQQFTLKKVAGAKDIVKASLAPALAQGVPGTPQATASEGASLKSWECLCGVNLATAQSARVKEACQEACQSLPRFQRMYEKAWVPKQKTTAEVELSQRASTRVVLRGNVGLESPSRVFSIALSSGAVGGVHCPSDHRMIEPAAFNLSMKNPQRQSCLRA

SEQ ID NO: 48980 - protein, 178 aa, Homo sapiens
  misc_feature (1)...(178): Xaa = X or * as defined in Table 2
LRSADLPWEINPLSSCSLLHEKDPPTSSGPQTDQPKEHLTNFKSEKKETRFIRGPKTPAPVMDXGRQPSLGVXPLQGCLSDYSPRFQRCQTTQGHLPWSFTLSSKSHFSGGRGKSLLQVPEIWPPGQGMPAAQDSSXAVPICAGPRWKSDCPTHLAATPKAPGTLAQGSLTPSQIFLA

SEQ ID NO: 48981 - protein, 334 aa, Homo sapiens
  DOMAIN (184)..(202): RNase H domain identified by eMATRIX, accession number PF00075J, p-value=1.225e-16, raw score of 15.78
  DOMAIN (163)..(247): Integrase core domain identified by PFam, accession name rve, E-value=1.9e-18, PFam score of 67.8
  misc_feature (1)...(334): Xaa = X or * as defined in Table 2
KFGLVQLTLGKPLPEPLELRPKAHLTDSFPDLLGLAAEDXHCPIASEAAXTITDTELRVTLTVEVWDISTLFPGNXSHATLPSHXNLITLTPLNANIAIPQHALKGLKPVITRLLQHGLLKPINSPYNSPILPVQKLDKSYRLVQNLRLINKIVSPIHPVVPNPPAFTSQITQAVSQALGIQWNLHIPYHPQSSGKVERTNGLLKVHLTKLSLQLKKDWTVLLPLALLRIRACPRDATGYSRFELLYGRTFLLGPNLIPDTSPLGDYLPVLQQARQAANLLLPTPDPQPHEDTLAGRSVLVKNLTPQTLQPRWTGPHFIIYSTPTAVCLQDPPH

SEQ ID NO: 48982 - protein, 91 aa, Homo sapiens
  DOMAIN (13)..(52): kw TRANSCRIPTASE REVERSE II ORF2 domain identified by eMATRIX, accession number DM01354X, p-value=7.250e-37, raw score of 13.86
  misc_feature (1)...(91): Xaa = X or * as defined in Table 2
MAILSKVIYRFNAIPIKIPMTFFTELEKTALKFIWNQRRARIAKSILSQKNKAGGITLPDFKLYYKATVTFPKTYNAISKRESDSARLHPX

SEQ ID NO: 48983 - protein, 118 aa, Homo sapiens
  misc_feature (1)...(118): Xaa = X or * as defined in Table 2
CSWHDRFPDWKAGNLLSLAAXDXHCPIASEAPXTITDAELQVTLTVEGSGDLPWEINPPSSYTLLCEKDPPTTSGPQTNQPKKHSHQFQIRDKGDTFYPWTHNSGASHGLGRQPSLGV

SEQ ID NO: 48984 - protein, 215 aa, Homo sapiens
  misc_feature (1)...(215): Xaa = X or * as defined in Table 2
GASPSVWDPTENRTVQLHLGSHSQSPWNTGQRSRDLTSFPDLLGLAAEDXHCPITSEAPLTITDARAMGXLSTVEGKPVPFLINTEATHATLPSFQGPVSLASITVVGIDGQAFXTSLKLPNSWCQHXTIRRFKHSFLVIPTCQVPLLGEDTLTKLSASLTIPGLQLYLIATLLPNPKPPLCPPLVYPHLNPQVXDISTPSLGDRSCTPYHLIKT

SEQ ID NO: 48985 - protein, 320 aa, Homo sapiens
  DOMAIN (195)..(247): Ribosomal protein S3Ae proteins domain identified by eMATRIX, accession number BL01191C, p-value=1.000e-40, raw score of 16.50
  DOMAIN (16)..(256): Ribosomal S3Ae family domain identified by PFam, accession name Ribosomal_S3Ae, E-value=7.9e-15, PFam score of 62.7
  misc_feature (1)...(320): Xaa = X or * as defined in Table 2
TSTMAVGKNKRLTKGGKKGAKKKVVDPFPRKDWYXRRKHPLMFHIRNIEKDVGSPRTPRDPKLQSDGLKGSVCLKVSPAELPEXLKFAFRKFKLITEDVSGVKTCPDLTSHGAWDLYPXQNCCSMVQKMGRPMIEAHVECSRLTDGYLLRLFCVGFYLKNRNISDHGRPSYAQPPNRVRQIRKKMMEIHDPQRLQTNVPXKEVVNKLIPASIGKDIEKACQSIYPLQNVFVKKVKMLKKPKFELGKLMELHGEGSSSGKATGDETGAKVERADGYGPPVQESVGKFRLPIVGNRSGHCVKKEKQSSRRRDFGVSVHPRIP

SEQ ID NO: 48986 - protein, 201 aa, Homo sapiens
  misc_feature (1)...(201): Xaa = X or * as defined in Table 2
ASTAAPRMLLLFQPRYRTLQPQRLLMPKKNRIAIYELLFKEGVMVPKKDVPIPKHPELADRNVPNLHVMKAMQVSQSPRGYVKEQFAWKKISYWCLTNXGYQGVSISSRDYLHLPPEIVPATPLRRSRPEDSGRPSAXKGLEGXSDLARLHKNGEAGQRLPYRRSAVPPGADKKAEAGGLGQKPEFQFRGGFVRGRGQPPQ

SEQ ID NO: 48987 - protein, 130 aa, Homo sapiens; identical to SEQ ID NO: 44463
  DOMAIN (45)..(92): Intermediate filaments proteins domain identified by eMATRIX, accession number BL00226D, p-value=9.710e-33, raw score of 19.10
  DOMAIN (1)..(92): Intermediate filament proteins domain identified by PFam, accession name filament, E-value=7.8e-29, PFam score of 109.2

SEQ ID NO: 48988 - protein, 545 aa, Homo sapiens
  DOMAIN (285)..(333): Intermediate filaments proteins domain identified by eMATRIX, accession number BL00226B, p-value=3.600e-21, raw score of 23.86
  DOMAIN (261)..(498): Intermediate filament proteins domain identified by PFam, accession name filament, E-value=1.4e-24, PFam score of 95.1
  misc_feature (1)...(545): Xaa = X or * as defined in Table 2
PCMWIGFAAVRKGLKDSSSASCGCTRRVRGTWWQGLSRVCVARNEEVRLWGLCWLGSSPPAGWNNVFYMLISADVLACLEPRANKEAANELAGAVDLGWMANVRRNPRDMVTSTHLGTHFHLRKTPPRGEKTCELASQQPLIEATTKTKSVAVSHILTYTPPTLNGVAAVSSRVHFSFWPPTLQTGLEQGSMSFTICFTTSTNYQSLHSIQPHSHSVQFISSTAKVYAVLRGLGSRTSVSFSTSFWSGWGSGGLAAGMPGIDNARLAADDFRVKYKTELVMCLSVESNVRGLHKVTDDTNVTRLQLETEMEALKEELLFMKKNQEKEVKGLQALIASSELTMEVNAPKSQDLSNIMADLPAQYDELARKNXEELDKYWSQEDIEEHTTVVTNTSLLEVWSCXDARLTELRRTSPGLWRFDLDSMRNLKASLENSLREVEAPYALQMEQLNGILLHLESQLGQTPRTEAQRQAQEYEALLNIKVKLEAEIATLPGRLLGRMAKDFNLGDSLDERNSFQNLQKTNTPPGNVDGKVVSETNDTKVLRH

SEQ ID NO: 48989 - protein, 298 aa, Homo sapiens
  DOMAIN (251)..(282): Intermediate filaments proteins domain identified by eMATRIX, accession number BL00226C, p-value=3.250e-16, raw score of 13.23
  DOMAIN (98)..(298): Intermediate filament proteins domain identified by PFam, accession name filament, E-value=4.3e-75, PFam score of 262.9
MGHHRRQSLSPVLSLYSPDSMSFTTRSTFFTNYQSLGSVQAPSYGARAVSSAASVYAGAGGSGSRISVSRSTSFRGGMGPGGLAAGMAGGLAGMGGIQNKKTMQSLNDRLASYLDRVRSLETENRRLESKIREHLENKGPQVKDWSHYCKTIEDLRAQIFANTVDNACIVLHIDNARLAADDFRVKYETQLAMRQSVENDIHGLRKLETEIEALREELLFMKNHEEEVKGLQAQIASFRLTVEVDAPKSQDLAKIMADIRAQYDDLAGKNREELDKYWPQQFEENTTVVTQSAEVGAA

SEQ ID NO: 48990 - protein, 140 aa, Homo sapiens
  DOMAIN (70)..(85): Intermediate filaments proteins domain identified by eMATRIX, accession number BL00226A, p-value=2.000e-16, raw score of 12.77
  DOMAIN (70)..(136): Intermediate filament proteins domain identified by PFam, accession name filament, E-value=7.3e-31, PFam score of 116.0
SLSPVLSLSPDSMSFTTRSTFSTNYRSLGSVQAPSYGARPVSSAASVYAGAGGLATGIAGGLAGMGGIQNEKETMQSLNDRLASYLDRVRSLETENRRLESKIREHLEKKGPQVRDWSHYFKIIEDLRAQIFANTVDNAR

SEQ ID NO: 48991 - protein, 472 aa, Homo sapiens
  DOMAIN (61)..(90): Urocanase proteins domain identified by eMATRIX, accession number BL01233E, p-value=8.752e-09, raw score of 12.37
  misc_feature (1)...(472): Xaa = X or * as defined in Table 2
AFTTRSTFSTNYRSLGSVQAPSYGAGPGRAARPASYAGAGGSGSRISVSRSTSFRGGMGSGGLGQRELAGGLAGMGGIQNEKETMAQALNDRLGLFTWDRVRSLGDRRTRKLGRAKFREHFGRKKGPQVRDWSHYFKIIEDLRAQIFRKYLLDNAPHPFLQDLTIAPSLLLDXFXEFKYXGQSLAMRQFLWRNDIPLGSAKVIDDTQYHTDLQAWRQRFEAPQRRELALSMKKEPRRRKLKGLSSPRLPSSWGXPVEVRLPPNFQDLRQRSLADIPGPNMNELGSKKNPRRKLRQSTWSQQIXGRAPQLVTTTSLLEVGSLLKTTLTQKLRRTSPGPWKIRPWTSMKKSXKAQLGRNSPXREVGRPPYGPYKMEASFKRGSLLHPXSQSWQTRPGAEGTAPQAPRSYEGPCXNIKRSKLEAXDRPPYPPALLEDGEDFXSLVDPLDSKQLHAKPIQKTTTPPGXVGLGKVVS

SEQ ID NO: 48992 - protein, 343 aa, Homo sapiens
  DOMAIN (179)..(199): PROHIBITIN SIGNATURE domain identified by eMATRIX, accession number PR00679E, p-value=6.000e-22, raw score of 12.82
  DOMAIN (30)..(246): SPFH domain / Band 7 family domain identified by PFam, accession name Band_7, E-value=1.4e-07, PFam score of 31.5
  misc_feature (1)...(343): Xaa = X or * as defined in Table 2
NFRVEAGVRGVQQKETCAFKVLESIGKFGLALAVAGGVVNSALYNVDAGHRAVIFDRFRGVQDIVVGKGTHFLIPWVQETQLSFDCRSRPRNVPSQSTGXAKDLQNVQHHTAASLFRACRQPSFPRIFTSIGEDYGWSVCLPSITTEVLKVSVGSLWMLGELITKRELVSRQVSDDLTERAATFGLILDDVSLTHLTFGKDFTXAVEAKQVAQQEAEKGQICWLEKAEQQKKAAIISAEGDSKAAELIANSLATAGDGLIELRKLEXAAEDIAYQLSRSRNITYLPTGQSVLLQLPQLRGPPLPCTSRGLDLGPQPRLILNNSLSFLLPTPEINCEIFMIGLK

SEQ ID NO: 48993 - protein, 78 aa, Homo sapiens
MNMHTAIPSSGVPSDFTAFRSDPEEKVFFAPRTMRPFPSVQFSNSITFSRSCSIITPEKAFILLGLFRVRMPMPLSSF

SEQ ID NO: 48994 - protein, 274 aa, Homo sapiens
  misc_feature (1)...(274): Xaa = X or * as defined in Table 2
QFCPSRQKGCLQKTFRHFVAGHGGDFLFRSPTHAFPFCVPLFPLPPVTIVRPCPPFSXVLSSSPRNSQNTIPRSPFLSPGTLSRSPAGSRDPGNPAPGSNTRLGPTAPVSRLAPVDIGFRSTDCWSLQPQVPVNPGSRPAPTNPRSRSTPVDPGSNTRLGPTAPVSRLAPVVXALGPLTAGPYSPRCPVNPGSRPAPTNPRSRSTPVDPGSNTRLGPTAPVSRLAPVDIGFRSTDCWSLQPQVPVNPGSRPAPTNPRSRSTPVDPGTRTTPEGL

SEQ ID NO: 48995 - protein, 93 aa, Homo sapiens
AMGFIVAPSLGCFVGSRFVHGEGLRWYAGLQKPSWHPPHWVLGPVWGTLYSAMGYGSYLVWKELGGFTGVSRASEVAPPEPPPGSSVLCFLHA

SEQ ID NO: 48996 - protein, 211 aa, Homo sapiens
  misc_feature (1)...(211): Xaa = X or * as defined in Table 2
TAAAAAMAPPWVPAMGFTLAPSLGCFVGSRFVHGEGLRWYAGLQKPSWHPPHWVLGPVWGTLYSAMGXVGVHWPGDKPGPLQGEAWPRTEDTGQLALNWAWPPIFFGARQMGGALVNLLLVSGAAGHTTLGGRGASQWLAARLLYPYLGLAWPSTTTTQTTCVWRDNHGWHGGRRLARVSARPTMGLQLHQAGAITLVMWWPSRFHDHWAC

SEQ ID NO: 48997 - protein, 201 aa, Homo sapiens; identical to SEQ ID NO: 46987
  DOMAIN (158)..(201): ubiE/COQ5 methyltransferase family proteins domain identified by eMATRIX, accession number BL01183D, p-value=8.535e-27, raw score of 27.71
  DOMAIN (1)..(200): ubiE/COQ5 methyltransferase family domain identified by PFam, accession name Ubie_methyltran, E-value=3e-10, PFam score of -23.6

SEQ ID NO: 48998 - protein, 594 aa, Homo sapiens
  DOMAIN (235)..(278): 1 kw MIND INHIBITOR DIVISION CONTROL domain identified by eMATRIX, accession number DM01756B, p-value=4.822e-15, raw score of 22.91
  DOMAIN (200)..(314): ParA family ATPase domain identified by PFam, accession name ParA, E-value=2.7e-28, PFam score of 107.5
MKLMETLNQCINAGHEMTKAIAIAQFNDDSPEARKITRRWRIGEAADLVGVSSQAIRDAEKAGRLPHPDMEIRGRVEQRVGYTIEQINHMRDVFGTRLRRAEDVFPPVIGVAAHKGGVYKTSVSVHLAQDLALKGLRVLLVEGNDPQGTASMYHGWVPDLHIHAEDTLLPFYLGEKDDVTYAIKPTCWPGLDIIPSCLALHRIETELMGKFDEGKLPTDPHLMLRLAIETVAHDYDVIVIDSAPNLGIGTINVVCAADVLIVPTPAELFDYTSALQFFDMLRDLLKNVDLKGFEPDVRILLTKYSNSNGSQSPWMEEQIRDAWGSMVLKNVVRETDEVGKGQIRMRTVFEQAIDQRSSTAAPMVDSLIARVGVMARGNAITLPVCGRDVKFTLEVLRGDSVEKTSRVWSGNERDQELLTEDALDDLIPSFLLTGQQTPAFGRRVSGVIEIADGSRRRKAAALTESDYRVLVGELDDEQMAALSRLGNDYRPTSAYERGQRYASRLQNEFAGNISALADAENISRKIITRCINTAKLPKSVVALFSHPGELSARSGLAWVLGDAEELPFDDDKFDIYTIAFGIRNVTHIDQATIT

SEQ ID NO: 48999 - protein, 213 aa, Homo sapiens
  DOMAIN (30)..(52): ubiE/COQ5 methyltransferase family proteins domain identified by eMATRIX, accession number BL01183A, p-value=7.868e-20, raw score of 13.25
  DOMAIN (23)..(201): ubiE/COQ5 methyltransferase family domain identified by PFam, accession name Ubie_methyltran, E-value=3.1e-08, PFam score of - 51.1
CESFCWHHFFWDIFNLFVTAPFLVHVDYQGFESVAKKYDVMNDMMSLGIHRVWEGFSCSGKMHPLPGDQLLDVAGGTGDIAFRFLNYVQSQHQRKQKRQLRAQQNLSWEEIAKEYQNEEDSLGGSRVVVCDINKEMLKVGKQKALAQGYRAAHKSGVILDCLWFPPILHPIAQQICQLYLQNTSGIWPSLPYLCYHLLVQATIPSYLDCCNSL

SEQ ID NO: 49000 - protein, 292 aa, Homo sapiens
  DOMAIN (33)..(55): ubiE/COQ5 methyltransferase family proteins domain identified by eMATRIX, accession number BL01183A, p-value=3.250e-23, raw score of 13.25
  DOMAIN (19)..(292): ubiE/COQ5 methyltransferase family domain identified by PFam, accession name Ubie_methyltran, E-value=4.3e-81, PFam score of 282.8
  misc_feature (1)...(292): Xaa = X or * as defined in Table 2
VLGSLSQEKRAAETHFGFETVSEEEKGGKVYQVFESVAKKYDVMNDMMSLGIHRVWKDLLLWKMHPLPGTQLLDVAGGTGDIAFRFLNYVSVPASEKTEEAVKGPTKFILGKNLPKSTRMKKIPWAGTRVVVCDINKEMLKVGKQKALAKDTRAGLAWLLXDAEELPFDDDKFDIYTIAFGIRNVTHIDQALQGSSFGCLKPGGRFLCLGFSQVEQSPLSRLYDLYSSRVIPVLGEVIAGDWKSYQYLVESIRRFPSQEKFKDMIEDAGFPQVXLTKVXHQGIVAIHSGFKL

SEQ ID NO: 49001 - protein, 95 aa, Homo sapiens
MLLTRKQTCQLGILLSIHRQHSKIKSLDEQCVVGKISKHWTGILREAFTDADNFGIQFPLDLDVKMKAVMIGACFLIDFMFFESTGSQEQKSGVW

SEQ ID NO: 49002 - protein, 102 aa, Homo sapiens
MKSMRKQAPIITAFILTSRSKGNWIPKLSASVNASLKIPVQCLEILPTTHCSSRDLIFQKFNLLMNQYLIYLGMLSVDTEEDTQLASLFPGEKHSSVSFVCP

SEQ ID NO: 49003 - protein, 116 aa, Homo sapiens
  misc_feature (1)...(116): Xaa = X or * as defined in Table 2
IQEPPVIXXGLHMVHNFNTIFVSSYFKFESTFAISFLKVFNTCFFSIXIKSLDEQCVVGKISKHWTGILREAFTDADNFGIQFPLDLDVKMKAVMKVGICGKNLVKQGNFTMTHSN

SEQ ID NO: 49004 - protein, 414 aa, Homo sapiens
  misc_feature (1)...(414): Xaa = X or * as defined in Table 2
AAPQAGLSPVAIAAAIQLHLHSTQCSSPNTCCLPRRTRATIYYSRWSYHPLGSVPXSPXPFQEASALTLPPACSFYGPLTXFQPKPXGSFPLSQXMEYTIGLYTXTFHCPGTSRRQIPSSYLNCKDAFLPLLSNPPQCRPFTGVGLVDVLTGFETNNKYEIKNSFGQRVYFAAEDTDCCTRNCCGPSRPFTLRIIDNMGQEVITLERPLRCSSCCCPCCLQEIKSLDEQCVVGKISKYWTGILREAFTDADNFGIQFPLDLDVKMKAVMIGACFLIDRNCSPAMEQSWMENYFDEMTEIGFRRSVITNFSELKEHVLTHCKEANKNLDKMLDEWLTRKNSVEKTLNELMEVKTINEKLTIGKISKYWSGFVNDVFTNADNFGIHVPADLDVTVKAAMIGACFLFAFRLGSELHN

SEQ ID NO: 49005 - protein, 45 aa, Homo sapiens
  misc_feature (1)...(45): Xaa = X or * as defined in Table 2
XSLVGPRAPARGTGKRKPCCVRKIQETKPGAAGVGAKVTPRPFSG

SEQ ID NO: 49006 - protein, 31 aa, Homo sapiens
PGHSHGFPTSCSMQDTLSNISHLMPQGCQGT

SEQ ID NO: 49007 - protein, 254 aa, Homo sapiens
  misc_feature (1)...(254): Xaa = X or * as defined in Table 2
SNAGLRHVCRTSCQSGRARSCHVGLHTPWVSXVPWHPWGIRWRGDPQKSQRSRKCCVPGGAPQKGGDPEPQPSLSVSWNWLSGSCAGFRAVLPRKPQRKVWLFASSAGTAATEPPRXXLAWKADSGGDPWQQPQQSARPHAXTWTWRGDGAPPGRVAQGRGTAGGASAGVSSGRSRGSPQTGFQALQSCLEASRRPPVVACNPHPAGALPAAQAGNRATLMTGSCLQMPIMYEEAQLRLEELCTKARLNCQWFL

SEQ ID NO: 49008 - protein, 42 aa, Homo sapiens
  misc_feature (1)...(42): Xaa = X or * as defined in Table 2
CLQRLLPPGFRRQPSKYRRNRGKSGKGXRPSPVATWQPDYNI

SEQ ID NO: 49009 - protein, 316 aa, Homo sapiens
  misc_feature (1)...(316): Xaa = X or * as defined in Table 2
RRVLEAMGPSRAAKVLSVCVRSRIGPLICSQRHPATSKTKPQGRPPGEQGTPRDNPRRNNRPARSATPRGAPQGAPPRPGEEPNAPQTIDKGPPSPPSRGHTRRLARSGNQPPERHTPAAGGKTRYVRQSVLHRARGGEPVRMPRLPRIAEAPAPDRVECFXVVQSPAREMHSCQADSMCPVWXGRIWRSAGSCXSRSEKILVWIPQSGLQAHACPSEAHKMPGNPRDGGAGICKSSPGGKGERRKVEGGSTTRAGTSRDSVSKRHANTMGEQAQGEKHPRGTVXKTKRRGPKGQTRGTKAPEEETSREPPCTGPI

SEQ ID NO: 49010 - protein, 42 aa, Homo sapiens
AALPTVTNMKLLAATVLLLTICSLEGGCDMERGPKGRMCWWL

SEQ ID NO: 49011 - protein, 153 aa, Homo sapiens
MKLLASQLCLLPHPILQPLKGAFGSGDRAKGAHVWRALVSSVLPRPVTDLWARTLMEKVQEPQSLTSGPRHSSYFEKSKEQLDTPGFKKGWERELVKLSLSLFSWELGNTSLPTQLKVFQDHLVFPNPRLGLLGTPHWAQFLRRFLFPNPFFC

SEQ ID NO: 49012 - protein, 17 aa, Homo sapiens
HKFNDVVWHVSWSITAN

SEQ ID NO: 49013 - protein, 139 aa, Homo sapiens; identical to SEQ ID NO: 47204
  DOMAIN (83)..(98): G-PROTEIN BETA WD-40 REPEAT SIGNATURE domain identified by eMATRIX, accession number PR00320A, p-value=2.853e-10, raw score of 16.74
  DOMAIN (17)..(96): WD domain, G-beta repeat domain identified by PFam, accession name WD40, E-value=4.9e-06, PFam score of 33.5

SEQ ID NO: 49014 - protein, 129 aa, Homo sapiens; identical to SEQ ID NO: 47206
  DOMAIN (7)..(22): G-PROTEIN BETA WD-40 REPEAT SIGNATURE domain identified by eMATRIX, accession number PR00320A, p-value=6.049e-09, raw score of 16.74
  misc_feature (1)...(129): Xaa = X or * as defined in Table 2

SEQ ID NO: 49015 - protein, 347 aa, Homo sapiens
  DOMAIN (207)..(222): G-PROTEIN BETA WD-40 REPEAT SIGNATURE domain identified by eMATRIX, accession number PR00320C, p-value=9.500e-12, raw score of 13.01
  DOMAIN (28)..(315): WD domain, G-beta repeat domain identified by PFam, accession name WD40, E-value=3.3e-22, PFam score of 87.2
MLPAEMIELLLGVGPPEVWFINPDWWVSVINTVDTSHEDMIHDAQMDYYGTRLATCSSDRSVKIFDVRNGGQILIADLRGHEGPVWQVAWAHPMYGNILASCSYDRKVIIWREENGTWEKSHEHAGHDSSVNSVCWAPHDYGLILACGSSDGAISLLTYTGEGQWEVKKINNAHTIGCNAVSWAPAVVPGSLIDHPSGQKPNYIKRFASGGCDNLIKLWKEEEDGQWKEEQKLEAHSDWVRDVAWAPSIGLPTSTIASCSQDGRVFIWTCDDASSNTWSPKLLHKFNDVVWHVSWSITANILAVSGGDNKVTLWKESVDGQWVCISDVNKGQGSVSASVTEGQQNEQ

SEQ ID NO: 49016 - protein, 144 aa, Homo sapiens
  DOMAIN (110)..(125): G-PROTEIN BETA WD-40 REPEAT SIGNATURE domain identified by eMATRIX, accession number PR00320A, p-value=2.853e-10, raw score of 16.74
  DOMAIN (39)..(123): WD domain, G-beta repeat domain identified by PFam, accession name WD40, E-value=2.6e-06, PFam score of 34.4
MTTARIPGRRFRAAGSCHVRDLFSYRRNHGECCLVKKVSVINTVDTSHEDMIHDAQMDYYGTRLATCSSDRSVKIFDVRNGGQILIADLRGHEGPVWQVAWAHPMYGNILASCSYDRKVIIWREENGTWEKSHEHAGHDSSVNS

SEQ ID NO: 49017 - protein, 475 aa, Homo sapiens
  DOMAIN (406)..(420): Phage integrase family domain identified by eMATRIX, accession number PF00589B, p-value=1.621e-11, raw score of 16.17
  DOMAIN (285)..(455): "Phage" integrase family domain identified by PFam, accession name Phage_integrase, E-value=4.2e-11, PFam score of 50.3
  misc_feature (1)...(475): Xaa = X or * as defined in Table 2
EVKKINNAHTIGCNAVSWAPAVVPGSLIDHPSGQKPNYIKRFASGGCDNLIKLWKEEEDGQWKEEQKLEAHSDWVRDVAWAPSIGLWPPSTIASCSQDGRVFIWTLXXCPQAITVVPLNCLHKFNDVVLGMLNWGPSQPTSLAVSGGDNKNGTNTVCPTGWLQDSNTLVHLVTYKMPRSLGLGFLWCQLLSPRKYREGTSPVSLWVGEVWFINPDWWGSIRVYHPSPSGSYRTHKPPLNNLSCDTSIIRELLKGKKFLLFVSVYPVPSTVLGRKKVSVINTVDTSHEDMIHDAQMDYYGTRLATCSSDRSVKIFDVRNGGQILIADLRGWPRASRYQQGHQDLFILRSDLPSQVFIRDKLMERRNRRTGRTEKARIWEVTDRTVRTWIGEAVAAAAADGVTFSVPVTPHTFRHSYAMHMLYAGIPLKVLQSLMGHKSISSTEVYTKVFALDVAARHRVQFAMPESDAVAMLKQLS

SEQ ID NO: 49018 - protein, 220 aa, Homo sapiens
MGGQILIRRPSGVMEGSCVASWLGVHPIVTGNILGIRCFLIDRKVHLFLGERENGHPGEKSHEQCGDTTPQVELRVLLGPPWTYGPDSWACWSRMGAIFPGWTLHRGKANGEVKKINNGHTIGLQMPSAGPLLFVPGSLIDHPIGVRNPITSRGLHQVAVDNLIQAVEGGGGRPVEGGAEARSATVTGFRDVAWAPSIGPAHQHHRPAAPRMGRVFIWDL

SEQ ID NO: 49019 - protein, 138 aa, Homo sapiens
PSASSSPARIPAATRQGRRSPRIPPAPSNEAPRLPADREFLEQQPPRFPKPTIQASGADRAVDCGILKLQKSPARLARPRWPRRPSKRFWSAAGSVEEQPKPPRRRAKSPEQSPQLSVLPLVTITPQASGASFEKMKN

SEQ ID NO: 49020 - protein, 127 aa, Homo sapiens
  misc_feature (1)...(127): Xaa = X or * as defined in Table 2
WGRGGGRGLLYGRRHFVRRRRRGGRSPGESPALTVTXGAVPSAAFRESAQPGPRSSEAHISTSPKRTDGGRDSXPGLPRSSLTPSLPRPASFSTSPGRVSAPHRLPRHSAGPGLSGSSXPQPYSDPT

SEQ ID NO: 49021 - protein, 60 aa, Homo sapiens
PAILSPNLDDLNFSVRASVPTLAPSAPSASSSPARIPAATRQGRRSPRIPPAPSNEFHDS

SEQ ID NO: 49022 - protein, 329 aa, Homo sapiens
  misc_feature (1)...(329): Xaa = X or * as defined in Table 2
AREKKQKTRRQNKNIPRQINKTQRICCXQSCLTMTQDFFWPLCQGHSRGAPCLLVPPGLSLTCAPAQPAARPGVSQLTCAIACTHIQWFPSSCPPSEKNGDTLTVKTPSASSSPARIPAATRQGRRSPRIPPAPSNEASPAPGRPRVPGAAPPRFPKPTIQASGADRAVDCGILKLQKSPARLARPRWPRRPSKRFWSAAGSVEEQPKPPKAPPAKSPEQSPQLSVLPLATITPQAYGASFEKMKNLKTRRGGRSRWHFPFNVIPQAPSLKWGFQTSDASSAEVFHVDRSLASHKMGPGRRPRSPLWAPPFCEAAAARRQEPGVCIMVE

SEQ ID NO: 49023 - protein, 19 aa, Homo sapiens
FQALHREQRELVAVLREPE

SEQ ID NO: 49024 - protein, 155 aa, Homo sapiens
LITVVKLLDTMVDTFLQKLVAAGSYQRFTDCYKCFYQLQPAMTQRIYDKFIAQLQTSIREEISDIKEEGNLEAVLNALDKIVEEGKVRKEPAWQRDTLRRHVQKQEAENQQLADAVLAGRRQVEELQLQVQAQQQAWQALHREQRELVAVLREPE

SEQ ID NO: 49025 - protein, 169 aa, Homo sapiens
FNMAEASSANLGSGCEEKRHEGSSSESVPPGTTISRVKLLDTMVDTFLQKLVAAGSYSTPSLGRKCWSRLPSGGQSVKQAFSWAACRLPQGRKEEISDIKEEGNLEAVLNALDKIVEEGKVRKEPAWRPSGIPEKDLHSVMAPYFLQQRDTLRCHVQKQEAENQQLADA

SEQ ID NO: 49026 - protein, 172 aa, Homo sapiens
  misc_feature (1)...(172): Xaa = X or * as defined in Table 2
NRPSVGRRAGYHRGGSYQRFTDCYKCFYQLQPAMTQRIYDKFIAQLQTSIREEILFDNQKQEGEPRKLSWNALGXKFVGTKGKVRKEPAWRPSGIPEKDLHSVMAPYFLQQRDTLRRHVQKQEAENQQLADAVLAGRKQVEELQLQVQAQQQAWQALHREQRELVAVLREPE

SEQ ID NO: 49027 - protein, 140 aa, Homo sapiens; identical to SEQ ID NO: 41929
  DOMAIN (11)..(37): TROPOMYOSIN SIGNATURE domain identified by eMATRIX, accession number PR00194E, p-value=1.000e-30, raw score of 8.74
  DOMAIN (1)..(59): Tropomyosins domain identified by PFam, accession name Tropomyosin, E-value=2.4e-36, PFam score of 115.8

SEQ ID NO: 49028 - protein, 256 aa, Homo sapiens
  DOMAIN (198)..(224): TROPOMYOSIN SIGNATURE domain identified by eMATRIX, accession number PR00194E, p-value=9.289e-24, raw score of 8.74
  DOMAIN (11)..(256): Tropomyosins domain identified by PFam, accession name Tropomyosin, E-value=2.4e-60, PFam score of 190.5
  misc_feature (1)...(256): Xaa = X or * as defined in Table 2
AGITTIEAAKRTIQVLHLQANDAQERAERSQREFREERRAREPGLRLKXSFLNRRIQLVEEELDRAQERLGHLPCKKLXRSXKKLADESERRYXRLFENRALKRLKEKIGTSREIPTQKKLKHICRKEADRKYEEVARKLGDHLKEDLEPTEERAELAESRCXEIDEQIRLIDQNLQCLSAAEDKYSQKEDKWEEEMKILTNKLREAETRAEFAERSVAKLKKTIDDLEDKLKCTKEEHLCTQRMLDQTLLDLNEM

SEQ ID NO: 49029 - protein, 503 aa, Homo sapiens
  misc_feature (1)...(503): Xaa = X or * as defined in Table 2
SAAPGAVPPPEADSTSAGMSRRPCSCALRPPRCSCSASPSAVTAAGRPRPSDSCKEESSTLSVKMKCDFNCNHVHSGLKLVKPDDIGRLVSYNPAYLEGSCKDCIKDYERLSCIGSPIVSPRIVQLETESKRLHNKENQHVQQTLNSTNEIEALETSRLYEDSGYSSFSLQSGLSEHEEGSLLEENFGDSLQSCLLQIQSPDQYPNKNLLPVLHFEKVVCSTLKKNAKRNPKVDREMLKEIIARGNFRLQNIIGRKMGLECVDILSELFRRGLRHVLATILAQLSDMDLINVSKVSTTWKKILEDDKGAFQLYSKAIQRVTENNNKFSPHASTREYVMFRTPLASVQKSAAQTSLKKDAQTKLSNQGDQKGSTYSRHNEFSEVAKTLKKNESLKACIRCNSPAKYDCYLQRATCKREGCGFDYCTKCLCNYHTTKDCSDGKLLKASCKIGPLPGTKKSKKNLXRLHVGWHEPAPLQLRPTATPLLLQRQPQRSDSRRAPSTLG

SEQ ID NO: 49030 - protein, 424 aa, Homo sapiens
  misc_feature (1)...(424): Xaa = X or * as defined in Table 2
RKAASSYVSRMALPIIVKWGGQEYSVTTLSEDDTVLDLKQFLKTLTGVLPERQKLLGLKVKGKPAENDVKLGALKLKPNTKIMMMGTREESLEDVLGPPPDNDDVVNDFDIEDERXFEVENREENLLKISRRVKEYKVEILNPPREGKKLLVLDVDYTLFDHRSCAETGVELMRPYLHEFLTSAYEDYDIVIWSATNMKWIEAKMKVKPLGVIWGKFSEFYSKKNTIMFDDIGRNFLMNPQNGLKIRPFMKAHLNRDKDKELLKLTQYLKEIAKLDDFLDLNHKYWERPRVRCHIFHGKEDRYDPCPMGACSCKTVCTTNLALPALPLGSMKNGQPCRNVIGQKGYALTVINSGPQQGLFVRILLGLFIRDFFPAGCGARPFWNEGLMAYFQRRTLVGVMLVLSSSKSFKAKCYNLLAAIQFTE

SEQ ID NO: 49031 - protein, 48 aa, Homo sapiens
MPASFRHIHKRKIHFFPQLTLASVDFFFSCGCCPGWSAVAPSWVHCTS

SEQ ID NO: 49032 - protein, 62 aa, Homo sapiens
  misc_feature (1)...(62): Xaa = X or * as defined in Table 2
HHGPVPFPRGLISXHSLHCPCPTPGGKNVFFFCEYFLKLAGIETTNCSADKRGKKVCCLIPR

SEQ ID NO: 49033 - protein, 143 aa, Homo sapiens
  DOMAIN (75)..(115): Calponin family repeat proteins domain identified by eMATRIX, accession number BL01052C, p-value=8.200e-38, raw score of 18.51
  DOMAIN (21)..(121): Calponin homology (CH) domain identified by PFam, accession name CH, E-value=5.9e-14, PFam score of 59.8
KGPSYGLAAEVKNRLLSKYDPQKEAELRTWIEGLTGLSIGPDFQKGLKDGTILCTLMNKLQPGSVPKINRSMQNWHQLENLSNFIKAMVSYGMNPVDLFEANDLFESGNMTQVQAKTKGLQSGVDIGVKYSEKQERNFDDATM

SEQ ID NO: 49034 - protein, 26 aa, Homo sapiens
MWPGKMEQYKLVGPRREEGWGLLKTY

SEQ ID NO: 49035 - protein, 329 aa, Homo sapiens
  DOMAIN (97)..(137): Calponin family repeat proteins domain identified by eMATRIX, accession number BL01052C, p-value=8.200e-38, raw score of 18.51
  DOMAIN (197)..(267): Calponin family domain identified by PFam, accession name calponin, E-value=8.1e-17, PFam score of 59.2
  misc_feature (1)...(329): Xaa = X or * as defined in Table 2
SSRPVRPRPAARLSAMSSTQFNKGPSYGLSAQVKNRLLSKYDPQKEAELRTWIEGLTGLSIGPDFQKGLKDGTILCTLMNKLQPGSVPKINRSMQNWHQLENLSNFIKAMVSYGMNPVDLFEANDLFESGNMTQVQVSLLALGGKRPKTKGAAEGGLDIGVKYSEKQERNFDDATMKAGQCVIGLQMGTNKCASQSGMTAYGTRRHLYDPKNHILPPMDHSTISLQMGTNKCASQVGMTAPGTRRHIYEYQAGNPTSCDNFSMSLQMGYTQGAQTQSGQVFGPGRPDIXTPSTCPQGTIADGAPSGTGDCPDPGEVPEYPPYYQEEAGY

SEQ ID NO: 49036 - protein, 36 aa, Homo sapiens
DFNGDLIPDIFGITNESNQPQILLGGHTTLNAPHLF

SEQ ID NO: 49037 - protein, 71 aa, Homo sapiens
ITLAGQLSQSAHLALQLPYNVLGLGRSANFLDHLYVGIPRPYKRSQTFFMKNQFHLWPRKIKISSERFHRS

SEQ ID NO: 49038 - protein, 634 aa, Homo sapiens
  misc_feature (1)...(634): Xaa = X or * as defined in Table 2
GAAMAAAGRLPSSWALFSPLLAGVALLGVGPVPARALHNVTAELFGAEAWGTLAAFGDLNSDKQTDLFVLAGKKXLNRLFGRPECTRILNPKXRYLSRITVHXXQVXSLGAYDGDSQMDVLLTYLPKNYAKMNXELLSSGDKIKHXILTIXPYSIGLLQDEPLIMDFNGDLIPDIFGITNESNQPQILLGGDCYHGIQHXPLQVKCEFHIPHAFIDLTEDFTADLFGATLNGTTSTFQFEIWENLDGNFSVSTILEKPQNMMVVGQSAFADFDGDGHMGSFTCQGCGRXKCAKRVPSYLVRSGMKQWVPVLQDFSNKGTLWGFVPFVDEQQPTEIPIPITLHIGDYNMDGYPDALVILKNTSGSNQQAFLLENVPCNNASCEEARRMFKVYWGADRPKSNSKGAMVATFFDIYEDGILDIVVLSKGYTKNDFAIHTLKNNFEADAYFVKVIVLSGLSSNDCPRKITPFGVNQPGTLYHVYNCRCKWVSEKWIRWPNSAQSAHLALQLPYNVLGFRVGSANFLDHLSLGIPRPSWRKIFYGKQEWTAIIPNSQLIVIPYPHNVPPKLGVPNCILYTKLILFWLTAIALIRCLCFQSLAINWHFTLGREKKAGWIEEKRTRKAHRFPFWMAMWTCL

SEQ ID NO: 49039 - protein, 322 aa, Homo sapiens; identical to SEQ ID NO: 41644

SEQ ID NO: 49040 - protein, 337 aa, Homo sapiens; identical to SEQ ID NO: 41645
  DOMAIN (253)..(269): PRO-OPIOMELANOCORTIN SIGNATURE domain identified by eMATRIX, accession number PR00383B, p-value=8.650e-09, raw score of 9.75
  misc_feature (1)...(337): Xaa = X or * as defined in Table 2

SEQ ID NO: 49041 - protein, 175 aa, Homo sapiens
  DOMAIN (58)..(97): DEAD-box subfamily ATP-dependent helicases proteins domain identified by eMATRIX, accession number BL00039A, p-value=1.783e- 16, raw score of 18.44
  DOMAIN (68)..(125): DEAD/DEAH box helicase domain identified by PFam, accession name DEAD, E-value=1.4e-13, PFam score of 45.8
  misc_feature (1)...(175): Xaa = X or * as defined in Table 2
DNELLDYEDDEVETAAGGSMSEAPAKKDVKGSYFSIHSSGFRDFLLKPELLRAIVDCGFEHPSEVQHECIPQAILGMDFLCQAKSGMGKTAVFVLATLQQLEPVTGQVSVLVMCHTRELAFQTRXKTRPFWNVTVCPSGEDTRVGVKETLLPPPLTAPTPWLPSFASPPLLNPHF

SEQ ID NO: 49042 - protein, 33 aa, Homo sapiens
FRKVKLLVNKYQELQSGNRKMLLEHLLCALSYG

SEQ ID NO: 49043 - protein, 88 aa, Homo sapiens
  misc_feature (1)...(88): Xaa = X or * as defined in Table 2
PPHSALLPFPTPFLPPSQLEIFVDDETKLTLHGLQQYYVKLKDNEKNRKLFDLLDVLEFNQVSXTSSRGMSIGALQLXQKPGYXVHFY

SEQ ID NO: 49044 - protein, 306 aa, Homo sapiens
  DOMAIN (76)..(115): DEAD-box subfamily ATP-dependent helicases proteins domain identified by eMATRIX, accession number BL00039A, p-value=6.906e- 11, raw score of 18.44
  DOMAIN (71)..(295): DEAD/DEAH box helicase domain identified by PFam, accession name DEAD, E-value=1.1e-25, PFam score of 84.1
  misc_feature (1)...(306): Xaa = X or * as defined in Table 2
CCCRHTRSPCLVMAENDVDNELLDYEDDEVETAAGGDGAEAPAKKDVKGSYVSIHSSGFRDFLLKPELLRAIVDCGFEHPSEVQHECIPQAILGMDVLCQAKSGSGERQAVFVLATLQHLEPVTGQGVCAGXCCHTRELAFQISKEYERFSKYMPNVKVAVFFGGLSIKKDEEVLKKNCPAYPSVGTPGRILALARNKSLNLKHIKHFILDECDKMLEQLDMRRDVQEIFFRMTPHEKQVMMFSATLSKEIRPVCRKFMQDVNTLLPSLPPLPARCLLPFLALFLRLPCHSSAKKAACAQLGVMTP

SEQ ID NO: 49045 - protein, 500 aa, Homo sapiens
  DOMAIN (91)..(130): DEAD-box subfamily ATP-dependent helicases proteins domain identified by eMATRIX, accession number BL00039A, p-value=6.674e- 16, raw score of 18.44
  DOMAIN (91)..(269): DEAD/DEAH box helicase domain identified by PFam, accession name DEAD, E-value=3.7e-28, PFam score of 91.9
  misc_feature (1)...(500): Xaa = X or * as defined in Table 2
LFTPCFHLFCENPSRSPFPSSPAGPVMAENDVDNELLDYERXMRWETAAGGDGAEAPAKKDVKGSYVSLSHSSGFRDFLLKPELLRAIVDCGFEHPSEVQHECIPQAILGMDVLCQGKSGMGKTAVFVLATLQQLEPVTGQVSVLVMCHTRELAFQISKEYERFSKYMPNVKVAVFFGGLSIKKDEEVLKRRNCPHIVVGTPGRILSLWVRNKSLNLKHIKHFILDECDKMLEQLDMRRDVQEIFRMTPHEKQVMMFQCYLGAKEIRPVCRKFMQDPMEIFRVDDETKLTLHGLQQYYVKLKDNEKNRKLFDLLDVLEFNQVVIFVKSVQRCIALAPAYXWEQNFPAIAIHRGDAPRKERLSRXSSSFKDFPTNEILIGYPTLFGRRHGTSEAGETIAFXFMNMPXGILKTLPCHRVGPEQGRFGHPRGLAITFVSDEEXLPRSCDDVQGSALRVKFSELPDEIGHLPPTLEQDTGRRLAHFGNVDRLFLSGRRDTQGGG

SEQ ID NO: 49046 - protein, 121 aa, Homo sapiens
  DOMAIN (104)..(118): C-type lectin domain proteins domain identified by eMATRIX, accession number BL00615B, p-value=7.000e-12, raw score of 12.25
  DOMAIN (30)..(117): Lectin C-type domain identified by PFam, accession name lectin_c, E-value=0.00075, PFam score of 16.6
SVSWMLLSCLILLCQVQGEETQKELPSPRISCPKGSKAYGSPCYALFLSPKSWMDADGSEPDGDGWEWSSTDVMNYFAWEKNPSTILNPGHCGSLSRSTGFLKWKDYNCDAKLPYVCKFKD

SEQ ID NO: 49047 - protein, 210 aa, Homo sapiens
  DOMAIN (86)..(104): C-type lectin domain proteins domain identified by eMATRIX, accession number BL00615A, p-value=6.571e-12, raw score of 16.68
  DOMAIN (103)..(210): Lectin C-type domain identified by PFam, accession name lectin_c, E-value=5.7e-17, PFam score of 69.8
  misc_feature (1)...(210): Xaa = X or * as defined in Table 2
GTTEGKRQEAVGYLCVLPLTTLPLVTRLPPQVADTMLPPMALPSVSWMLLSCLILLCQVQGEETQKELPSPRISCPKGSKAYGSPCYALFLSPKSWNDADLACQKRPSEKLVSVLSGAEGSFASLLARSISNSYSYIWIGLHDPKKGSEPDGDGXEWSSTDVMNYFAWEKNPSTILNPGHCGSLSRSTGFLKWKDYNCDAKLPYVCKFKD

SEQ ID NO: 49048 - protein, 45 aa, Homo sapiens
  misc_feature (1)...(45): Xaa = X or * as defined in Table 2
QSEVHHGIISYTTGQGENLSEPIWKSWQRSQDLXQENHPEIYSLT

SEQ ID NO: 49049 - protein, 119 aa, Homo sapiens
  misc_feature (1)...(119): Xaa = X or * as defined in Table 2
KQLIKMCYFILLLLILSSHIGKDKAIDKNGILVQYWQEXKLVEPFXKAIWPPCMETLNVDTPFPQPVCLGIYPNEXKLSKCFKPXAPKVYFHGCLXYXNHWEPTETIPPVKGWIKXILF

SEQ ID NO: 49050 - protein, 76 aa, Homo sapiens
SLALSFPFQRRLFPSTFLVSLLLHGAVYNLGLVFCYSLGDALDSSNSMQTIQKTTTRRIVDGKVVSETNDTKVLRH

SEQ ID NO: 49051 - protein, 106 aa, Homo sapiens; identical to SEQ ID NO: 45636
  DOMAIN (70)..(85): Intermediate filaments proteins domain identified by eMATRIX, accession number BL00226A, p-value=8.200e-12, raw score of 12.77
  DOMAIN (71)..(106): Intermediate filament proteins domain identified by PFam, accession name filament, E-value=2.4e-14, PFam score of 57.8

SEQ ID NO: 49052 - protein, 332 aa, Homo sapiens
  DOMAIN (249)..(296): Intermediate filaments proteins domain identified by eMATRIX, accession number BL00226D, p-value=8.154e-28, raw score of 19.10
  DOMAIN (59)..(297): Intermediate filament proteins domain identified by PFam, accession name filament, E-value=3.1e-78, PFam score of 273.3
APSYRARLVRSVASVYAGPGSSGSRISMSRSTSFQGGLGSRSMAAGMAGGLAGMGGIQNEKETMQSLNDRLASYLDRVRSLEMGNWKLESKIWEHLEKKGPQVRDWGHYFKTIEEDLTQIFTSTVDNTCIILQIDNAHLAADDFRVKYETEPATCQSVENDIHGLHKVIDDTSVTQLQLETEIEALKEALLFLKKNHEEESWRHTVQALEIDLDWMKNLEASLENSLKEGVEACYTLQMEQLNGILLHLESELAQTWAEGQGQAQEYQALPNIKVKLEAEIATYRRLLEDGEDFNFGDALDSSNSTQTIQKTPTCRTVDGKVVSETNDTKVL

SEQ ID NO: 49053 - protein, 125 aa, Homo sapiens
  DOMAIN (7)..(22): Intermediate filaments proteins domain identified by eMATRIX, accession number BL00226A, p-value=2.000e-16, raw score of 12.77
  DOMAIN (7)..(125): Intermediate filament proteins domain identified by PFam, accession name filament, E-value=4.3e-59, PFam score of 209.7
GMGGIQNEKETMQSLNDRLASYLDRVRSLETENRRLESKIREHLEKKGPQVRDWSHYFKIIEDLRAQIFANTVDNARIVLQIDNARLAADDFRVKYETELAMRQSVENDIHGLRKVIDDTNITRL

SEQ ID NO: 49054 - protein, 28 aa, Homo sapiens
  DOMAIN (1)..(26): Intermediate filament proteins domain identified by PFam, accession name filament, E-value=0.00022, PFam score of 20.3
IFANTVDNARIVLQIDNARLAADDFRVN

SEQ ID NO: 49055 - protein, 90 aa, Homo sapiens
SLALSFPFLEEEAEGDLEIKVEVRRLFPSTFLVSLLLHGAVYNLGLVFCYSLGDALDSSNSMQTIQKTTTRRIVDGKVVSETNDTKVLRH

SEQ ID NO: 49056 - protein, 439 aa, Homo sapiens
  DOMAIN (168)..(216): Intermediate filaments proteins domain identified by eMATRIX, accession number BL00226B, p-value=1.400e-21, raw score of 23.86
  DOMAIN (69)..(219): Intermediate filament proteins domain identified by PFam, accession name filament, E-value=2.2e-46, PFam score of 167.5
  misc_feature (1)...(439): Xaa = X or * as defined in Table 2
AEKAGGKKGEAPSYRARLVRSVASVYAGPGSSGSRISMSRSTSFQGGLGSRSMAAGMAGGLAGMGGIQNEKETMQSLNDRLASYLDRVRSLEMGNWKLESKIWEHLEKKGPQVRDWGHYFKTIEEDLTQIFTSTVDNTCIILQIDNAHLAADDFRVKYETEPATCQSVENDIHGLHKVIDDTSVTQLQLETEIEALKEALLFLKKNHGEEIKGLSRRQIASSGVDPWRVDAPKSSGPSPKIMGRHPGPKYDELARKRTREELAKYSSQQIEESTTQLVTNTSLLGGLELAETNLHRSXTYKSRSLEDSTLDSIEKSXKAQAWKKQPLKGSWKAPLRPLPDWSKLQTGILACTFESRAGNKTRARGTSAPGPQELXGPLLKHQKVKAGGLRSPTLPARLLEDAEALXSLVDPLDSKQLPCNTIQKTTTPPGXVGLGKVVS

SEQ ID NO: 49057 - protein, 47 aa, Homo sapiens
  misc_feature (1)...(47): Xaa = X or * as defined in Table 2
MIPRRTSASXAPSGLSPLPALSSLCXSWGTSSTVTRLRTGXEAXQEV

SEQ ID NO: 49058 - protein, 256 aa, Homo sapiens
  misc_feature (1)...(256): Xaa = X or * as defined in Table 2
VVQFARREKPSSSKVSQRHPCTEAVREVLHGNQRKSPQRSWETVELQISLKNYDPQEGQSAFSGTRQALSPLPRPKFSCVCPGGTQQHCDEAKARGISPPHGTFEGAXKNLNKEXKNWSKKAGPRKYXLRFFGPQKSLDQSKIPPNPSGPGFKXRAGKFPFPWFTHNENMGGPKLDEGEVPPIQVFQMKERCLCLAVAVGHVKMTDDELVYNIHLGCQLSWVSLLKEKNWQNVRALYIKSTHGQSPKRLIFKAHFE

SEQ ID NO: 49059 - protein, 105 aa, Homo sapiens
MSKSFQQSSLSRDSQGHGRDLSAAGIGLLAAATQSLSMPASLGRMNQGTARLASLMNLGMSSSLNQQGAHSALSSASTSSHNCSLYLTLEERSTPFIFSTPWRCR

SEQ ID NO: 49060 - protein, 864 aa, Homo sapiens
  DOMAIN (514)..(583): RNA recognition motif. domain identified by PFam, accession name rrm, E-value=0.0022, PFam score of 24.7
  misc_feature (1)...(864): Xaa = X or * as defined in Table 2
TRASSTMSKSFQQSSLSRDSQGHGRDLSAAGIGLLAAATQSLSMPASLGRMNQGTARLASLMNLGMSSLLNQQGAHSALSSASTSSHNSQSIFNIGSRGPLPLSSQHRGDADQASNMLASFGLSARDSDELSRYPSDTITPENLRPILLQLKRRRTEEGPTLSYGRDGRSATREPPYRVPRDDWEEKRHFRRDSFDDRGPSLNPVLDYDHGSRSQESGYYDRMDYEDDRLRDGERCRDDSFFGETSHNYHKFDSEYERMGRGPGPLQERSLFEKKRGAPPSSNIEDFHGLLPKGYPHLCSICDLPVHSNKEWSQHINGASHSRRCQLLLEIYPEWNPDNDTGHTMGDPFMLQQSTNPAPGILGPPPPSFHLGGPAVGPRGNLGAGNGNLQGPRHMQKGRVETSRVVHIMGFSTEGKTLRYQLLQLVEPFGVHFKFIXFLNKNLLRAFIEMATTEDCFKAAVDYYTTTPALVFGKPVRVHLSQKYKRIKKPEGKPDQKFDQKQELGRVIHLSNLPHSGYSDSAVLKLAEPYGKIKNYILMRMKSQAFIEMETREDAMAMVDHCLKKALWFQGRCVKVDLSEKYKKLVLRIPNRGIDLLKKDKSRKRSYSPDGKESPSDKKSKTDGSQEAERSTEGKEQEEKSGEDGEKDTKDDQTEQEPNMLLESEDELLVDEEEAAALLESGQFSGETSTDLANLGCMLASDGRKREPSDXSCGKKVGSAFSRQPKKKLKKVDKIEELDQENEAALENGIKNEENTEPGAESSENADDPNKDTSENADGSKVMRTKDDYTIPDEYRIGPYQPNVPVGIDYVIPKTGFYCKLCSLFYTNEEVAKNTHCSSLPHYQKFKEIFWNKLAEERRQKKET

SEQ ID NO: 49061 - protein, 334 aa, Homo sapiens
  DOMAIN (149)..(200): SAR1 family proteins domain identified by eMATRIX, accession number BL01020C, p-value=1.788e-19, raw score of 15.35
  DOMAIN (68)..(263): ADP-ribosylation factor family domain identified by PFam, accession name arf, E-value=1.5e-57, PFam score of 204.6
  misc_feature (1)...(334): Xaa = X or * as defined in Table 2
NCRAAWRAKLEGCLSLRRNACQCFLIWTQTPDREQSYSLDQLPREVLNQEEKSISIWDIYLHLEMGNGLSDQTSILSNLPSFQSFHIVILGLDCAWKRQLSYTRLQFQLNLXNTVPYPKGFNTEKIXRVTLGNSKTVTFHFWDVGGQEKLRPLWKSYTRCTDGIVFVVDSVDVERMEEAKTELHKITRISANRGVPVLIVANKQDLRNSLSLSEIEKLLAMGELSSSTPWHLQPTCAIIGDGLKEGLEKLHDMIIKRRKMLRPTRKRKDEYQFPNIICVGVGFLWSDFDKNRRVSTAGVCLSAPPWMLLKLCFVEQFRCPTRVALWKMSKCSAS

SEQ ID NO: 49062 - protein, 367 aa, Homo sapiens
RETGLITGAVMSIEDYLKGKNCLASPNYDPDDQHSSWREDLPQFKKDREHLTLVNTRRNRTYNTKLNRFDPEYWVVDYNALMVATIIPYGSKSFKVPCQWRTNKDFLGVRWMTEDTFDHHLYRYETDPNYLGLILAFRHNPDEPDKFTVTIQTPEKAYTYRLAPYGFNNKTRRWECLDTKYGTKRTYQADIFVATDEDIPESEMTEVYGTKDYIFILDFADLRTGVAFNGVTINPRNITMISFDCTEAHHGLGKDAYIAAMYNNDDGATFQMEIGGIHTNAALAAGDKLQCIWRYLDVNGNAPAAENEFEVTDGPIKQVDSVKWFTNLTVSGSGRKQLGQRKYPQVVMGMGMTSGFDDGYNLTPERQ

SEQ ID NO: 49063 - protein, 234 aa, Homo sapiens
MTDVHMGALTAQYMPDDFTFEPGIGQIHFNVETSRKVCLDLAKSVLRLVPVYPLPTNKDALDFVSKAQCQILKECQNLGMELYFQIGEPWWWDGSYNTGEGKNAPCIYDPKTMALYKEETGNDVPTPWIKDIFAPVEEHQWPYVDWLCTKLGQSTNYIRDYVKGKFPDAQATLLFFTPQIMSPASELTGRLNFPESEWVFPNYDFVQIEDYDWIIDGRLDLVPLTFDAAVNRLG

SEQ ID NO: 49064 - protein, 580 aa, Homo sapiens
  DOMAIN (23)..(47): Eukaryotic and viral aspartyl proteases proteins domain identified by eMATRIX, accession number BL00141E, p-value=7.088e- 09, raw score of 14.32
MLGNATAGLSNALGDFRNSARQQAGDAIMAEAMRYQDPNEYRNALASGALFAGYDPSLISSRTMENLDNRAGNLLDQASKQQNLDFTRYSNDRTMKVNAATDAAAPALQELALAYQSGDPRKVQAAQAQYGDVLKTLPAGVVMDYMNNLQGQGTAGIGQRRSLFNLGVDIRNDADTQAAMQLLNNIRRGAYSADDARMLAEGTFDQMSPGAVSRALSQLDRAYPGAYTPGTGSASLSPPGTQGTRNGSAYDTTYKFTPTDVPITQMNLGEVVQHQDTMKKTLGASPVGAYQINQDTLKDFAPKVFGEDWQNIPMSPENQDKLGEAIFNARKNGNLKSTWAALPDDTPGAYKNLSWDEMKDYIAQAETGNSINPLQEQAFTSVAGNTVGTRNMQNIGNTLLPEYQAATVDPSTTGQVAKRIIDSNELKGINQGALVRQINEVAKQNAISPAMAGAIIQRSITAVEANAKLATTGTAIEQNARNQLTAQIQSNIYAAQNTLDTALADLREVQRRIQTGQENLRSVLPRYQERVNTAKRLLDGARSAVAADPQNLDIKSLQNIKQEESEANRRSLGRDAGRRL

SEQ ID NO: 49065 - protein, 58 aa, Homo sapiens
  misc_feature (1)...(58): Xaa = X or * as defined in Table 2
RTSTERSHLKTRYQRTSCSSNRXLNSSSSKTSFRCSLTTSLFWRHTIFNMLLINRRLL

SEQ ID NO: 49066 - protein, 95 aa, Homo sapiens
  misc_feature (1)...(95): Xaa = X or * as defined in Table 2
IGILEAXLLRNLPNDSIKALVDAXYKSLLSAVERCSFMVLFGEPMNKPPLAILRIQSGVNRPPVISIMALIGPLVTPSASTYSGVTNADLSSATK

SEQ ID NO: 49067 - protein, 79 aa, Homo sapiens
  misc_feature (1)...(79): Xaa = X or * as defined in Table 2
SCADIHGYHRGNSSNNDSNLIPKQTNRDCLNNGHQNHSCNGDXPQPQRXXQLTLQNLMQHQXKQQYPLPQHQQQEXRTR

SEQ ID NO: 49068 - protein, 565 aa, Homo sapiens
  DOMAIN (9)..(33): Eukaryotic and viral aspartyl proteases proteins domain identified by eMATRIX, accession number BL00141E, p-value=7.088e- 09, raw score of 14.32
DFRNSARQQAGDAIMAEAMRYQDPNEYRNALASGALFAGYDPSLISSRTMENLDNRAGNLLDQASKQQNLDFTRYKKVQAAQAQYGDVLKTLPAGVVMDYMNNLQGQGTAGIGQRRSLFNLGVDIRNDADTQAAMQLLNNIRRGAYSADDARMLAEGTFDQMSPGAVSRALSQLDRAYPGAYTPGTGSASLSPPGTQGTRNGSAYDTTYKFTPTDVPITQMNLGEVVQHQDTMKKTLGASPVGAYQINQDTLKDFAPKVFGEDWQNIPMSPENQDKLGEAIFNARKNGNLKSTWAALPDDTPGAYKNLSWDEMKDYIAQAETGNSINPLQEQAFTSVAGNTVGTRNMQNIGNTLLPEYQAATVDPSTTGQVAKRIIDSNELKGINQGALVRQINEVAKQNAISPAMAGAIIQRSITGKPEGWFSGIRNAFDTDVIDLGGDYQLDKAAVEANAKLATTGTAIEQNARNQLTAQIQSNIYAAQNTLDTALADLREVQRRIQTGQENLRSVLPRYQERVNTAKRLLDGARSAVAADPQNLDIKSLQNIKQEESEANRRSLGRDAGRRL

SEQ ID NO: 49069 - protein, 219 aa, Homo sapiens
MASSIYYNDYILKPGFVKFADVSPAVTEKLVDAGVNTGPARPSRWLQESLNAFSRNGKDYPKIQVDGKVGSGTLSAYKSLQNKRGKVEAWVALGATLFLLGSQHGEKKVQALWDEDKKEYSKELDRVKLAYDQKNREHSYEVGQLTLRLDKAKESYEVVIDSITNQYNSRLLQSEKRAESYKRQASTGTTQCLNLASHAARLDSSLEEGRRLVEELRAT

SEQ ID NO: 49070 - protein, 64 aa, Homo sapiens
  misc_feature (1)...(64): Xaa = X or * as defined in Table 2
PDTLRSILPMLLEQLFCRTFGLLSPXXRDTSLHLGHKTEQHTXLVMGSWFYLLASQQPRCCYAC

SEQ ID NO: 49071 - protein, 68 aa, Homo sapiens
RLGGYPRVMPPYASTFRVTALEGMIRVFTPEIALAVRSALKRSGAVTDTVAVLSVVDAPIIRPSNAIC

SEQ ID NO: 49072 - protein, 93 aa, Homo sapiens
  misc_feature (1)...(93): Xaa = X or * as defined in Table 2
AYRLLLCLVYSEGFYMHLEFQNRLYHQLVFXGRLWHFWKSIKRFSIYXFFWYRWXYICKLNKGRLQDVIGVINTXCHFLSXGLHXTIPGIHRL

SEQ ID NO: 49073 - protein, 37 aa, Homo sapiens
MPPGISYSLPDMSMSGSVKSSPLVTRMFRNLRSLRKL

SEQ ID NO: 49074 - protein, 61 aa, Homo sapiens
ATTAPASSLSKPAPRAPMPSRVLTKPRPTPVAISPSSCPGDLVVTESLNTWVPLPVRAACM

SEQ ID NO: 49075 - protein, 369 aa, Homo sapiens
MSIEDYLKGKNCLASPNYDPDDQHSSWREDLPQFKKDREHLTLVNTRRNRTYNTKLNRFDPEYWVVDYNALMVATIIPYGSKSFKVPCQWRTNKDFLGVRWMTEDTFDHHLYRYETDPNYLGLILAFRHNPDEPDKFTVTIQTPEKAYTYRLAPYGFNNKTRRWECLDTKYGTKRTYQADIFVATDEDIPESEMTEVYGTKDYIFILDFADLRTGVAFNGVTINPRNITMISFDCTEAHHGLGKDAYIAAMYNNDDGATFQMEIGGIHTNAALAAGDKLQCIWRYLDVNGNAQAAENEFEVVSYEGFGTSNFSGKCKGMLPDSVKWFTNLTVSGSGRKQLGQRKYPQVVMGMGMTSGFDDGYTLTPERQ

SEQ ID NO: 49076 - protein, 87 aa, Homo sapiens
  misc_feature (1)...(87): Xaa = X or * as defined in Table 2
MGMGMTSGFDDGYTLTPERQVAIHFMSGAYPDRGYDVFQKYMTETWGINYAGVRPINGTTGSTAVDRACAVNPDSEVFDPTQSSDAX

SEQ ID NO: 49077 - protein, 465 aa, Homo sapiens
QVGKLKPKAIIGGQGDQDATALAYPGDRDPAPSLTRTKQATKKVFEYLRSLYGQIPIFIQELSYAWGITNTDEPNVPIRTGLPSFLAARRNTWGDIEFRWKSYGLDPALAQYRIEIYNPSNLNQILHSFVVSGTQEANGYVYADFTVEDWIPVMMEAVGSPNPWEFMKWRVVCLYQEREIPSAPWSDNIPLDNAGLVKKTILVGINQFGGGHFTDMSDPTATTANGAIGRKDKVSASTLRLTFAEKAGLRPIQVMPINVAADSAATVTVRDKQIQMATANIGFKLGSFVPGSNLYTAYRNVESSWIYYTVEAFHATAIELGEALALNVNRATNPPDWSYLRPPANLQGRKLATRDIKMTWDNRAGITHWKYANRHVTTGAEISSGILTSPEYVFTLNDQQNAYNGDTLNMSFSVSEYAADSGAVGASSSFVGVVQNGSYMQTPSQLKAAKQLNGDIIFTWVGRPS

SEQ ID NO: 49078 - protein, 459 aa, Homo sapiens
MEACMANAVQFLTTKDQAYWNAVTAQVAAITARANLGIIKANFVTAKIQALATKAEYALTKLKLSNESVTYCTAQYNLSSMLPQQLLMLKNQTTQVAEQTKLTTEQINMTKEQKEAQRAQTSDTRTDGTRVAGSVGKQKELYDQQITSYKRDAEVKAAKLFTDAWVTQKTIDEGLSPPNGFTNTSLDSILTALRITTHAGDIHKRPNYFKTTVIGTIVSKSDFSMGDTITNSYLNGPGIRLRRFPGWPAPNYDPSIGIAYGTLSILSQIDPEVVKCQVPQKAGYEVQVQTSRIGFGDFEEWADKFLYENYPGRITEEFEIDIMDDARIVLTATDGSELSFYPENYSQDAMYLYVNYYYIQPTSVADPVVHPAVSVPSADDLPSTSEWTQVSQPHTPKSATLKPVTHIKSVFSDGRPDEESTNTEEEQVSWTNFSDVYEKEFREPSEVGLIIIRKTTMTQ

SEQ ID NO: 49079 - protein, 182 aa, Homo sapiens
MINNVTQDQTAAEQIRNNFVTYAGVMKDGKFKTQDYLNAVQYVTYKHMGYSNKDAYFKTFPNRQAELVARGTSEKDISAYVSAYHRGFVQEALNHQAWLMKNATSEKVQCDAANSILTHLQKPKDAVTNINLDLRENSGLTELKNTLTQLAEAQKAAIEAGTPTKVIAGSTLVREDEDIIDV

SEQ ID NO: 49080 - protein, 81 aa, Homo sapiens
  misc_feature (1)...(81): Xaa = X or * as defined in Table 2
VTLYSEYQHPSVREYGLYLTSHRIEPLECVHRTLXPVLLSMQPSVLEYYEQQGYEAEYXLQEECHHQRTSSLXDLLKQLLQ

SEQ ID NO: 49081 - protein, 560 aa, Homo sapiens
  DOMAIN (109)..(164): Thymidine kinase cellular-type proteins domain identified by eMATRIX, accession number BL00603C, p-value=7.270e-09, raw score of 30.02
DKETGELITEQTVLDYPILFAGESQVAIHFMSGAYPDRGYDVFQKYMTETWGINYAGVRPINGTTGSTAVDRACAVNPDSELFDPTNHPMAVSFGGYCCETLNDPIVDKMIGNAYYVVKFVALRMTFIKNVSDNMTQLLAIHNKLTELSAIYTKLDELQLIHNNLDKLQELYNQLSKLTGLYDNLQALLRVYDNLTPINTVASNIDAVNTVATDIAKVIIVSAQIDKVITVANSITNVNTVAGSIDAVNTVSTNINAIKNVNTNMAALLDLDNHMTELLAVHARLGDLVTIAEQLDTIIADHEKYATAEGAGLIGFNQAQTYAANTVGAMLRQVITMDNDKGGYAVAGKLTSTGGVWSLATGSINMNAPTAGAVANLVLNYKAGKVSGLLVAPSQQMALDGLIMGASTTDNTATVSVTAPLRFKADLTAKAFSGFCARYRLGNTNPHLKFTGGGWAAVSDWDSGTYWAFDTVSGELTVYHSTLIKDSTVTFSLLLPTDGTQLTAQLKSHTDSSFVLKIAKPDGSLLDAPLEGMGIMYSRGMHGIYKVPYGSLIVDVGRVQ

SEQ ID NO: 49082 - protein, 1317 aa, Homo sapiens
VTNPQRMEQPPYQAECEDIIQALNMTFDEGCLFKALWRNAAARLGNGKPGNNAVYDAEKMVHYANRIFIKESAGQKKEAEEPVSAALKKGEEIHMSLSELFTLVTGEAAEDRFTVTIQTPEKAYTYRLAPYGFNNKTRRWECLDTKYGTKRTYQADIFVATDEDIPESEMTEVYGTKDYIFILDFADLRTGVAFNGVTINPRNITMISFDCTEAHHGLGKDAYIAAMYNNDDGATFQMEIGGIHTNAALAAGDKLQCIWRYLDVNGNAQAAENEFEVVSYEGFGTSNFSVKCKGMLPGKFIGCDAFYGKYLQTDGPIKQVDSVKWFTNLTVSGSGRKQLGQRKYPQVVMGMGMTSGFDDGYNLTPERQDKETGELITEQTVLDYPILFAGESQVAIHFMSGAYPDRGYDVFQKYMTETWGINYAGVRPINGTTGSTAVDRACAVNPDSEVFDPTQSSDAGGLWWWDLEADKPGPALLYCVEQVGKLKPKAIIWGQGDQDATALAYPGDRDPAPSLTRTKQATKKVFEYLRSLYGQIPIFIQELSYAWGITNTDEPNVPIRTGLPSFLAARRNTWGDIEFRWKSYGLDPALAQYRIEIYNPSNLNQILHSFVVSGTQEANGYVYADFTVEDWIPVMMEAVGSPNPWEFMKWRVVCLYQEREIPSAPWSDNIPLDNAGLVKKTILVGINQFGGGHFTDMSDPTATTANGAIGRKDKVSASTLRLTFAEKAGLRPIQVMPINVAADSAGMTVGTHKWWNTSSNSPGDALLAINDMVKGLGVKPDYFIEANPWETMYMKDVNSSTWPALMTAFESSNKAMLAWMRTNWGNPNLEIWFQGATTVWFGVAPPNDLNSEATVTVRDKQIQMATANIGFKLGSFVPGSNLYTAYRNVESSWIYYTVEAFHATAIELGEALALNVNRATNPPDWSYLRPPANLQGRKLATRDIKMTWDNRAGITHWKYANRHVTTGAEISSGILTSPEYVFTLNDQQNAYNGDTLNMSFSVSEYAADSGAVGASSSFVGVVQNGSYMQTPTQLKAAKQLNGDIIFTWVGRPSWQHFWVVNTSVNDSKTVIFSKEWSSESLTWTVAEQNEFYGLEEGGATHVIFMVSEYDPSNGLVSIGAQVTGQTEQPSNPMNPVAGLYAVFTGDPGNSNIKIMWDKPSVGGRDVRIRNMHVTSSATISDQFVSDNNLVFTREEQVAAYGFTASSVSVRAQEHDIESGALGLTTEYVAVPETAGTVGQGFAKKDSVGNCTMSWEVGDAVQWQVEIINAENSTVVKTEIVVAPTITWTAEEITAEYGYLTDHMVWRVRPYRADGASN

SEQ ID NO: 49083 - protein, 2148 aa, Homo sapiens
  DOMAIN (1390)..(1437): kw TRANSCRIPTASE REVERSE II ORF2 domain identified by eMATRIX, accession number DM01354V, p-value=1.000e-40, raw score of 12.97
FQFSFLRSSIFSYQILLKVRLAHMTQVADVQEYNIPYIYHLTKTVIQILKQSRLSTSQNGSLDVTEESSAQEMQNVALAAEVAPEKLNPESVNVVLKHAADGRIKLNNRQIAALQNAAAILKGAREYDAEAARLGLRPQDIVSKQIKTDESRTQEGQYSALQHANRIRSAYNSGNFELASAYLNDFMQFAQHMQNKVGALNEHLVTGNADKNKSVHYQALTADREWVRSRTGLGVNPYDTKSVKFAQQVALEAKTVADIANALASAYPELKVSHIKVTPLDSRLNAPAAEVVKAFRQGNRDVAFSQQKADSVNQVKETPVTKQEPVTSTVQTKTPVSEPVKTEPTTKESRPQAIKEPVSQSEKRDVNLTNEDTIKQPTESVKETETSAKESTVTEELREGIDAVYPSLVGTADSKAEGIKNYFKLSFTLPEEQKSRTVGSEAPLKEVAQALSSRARYELFTEKEVANPAFNGEVIKRYKELMEHGEGIADILRSRLAKFLNTKDVGKRFAQGTEANRWVGGKLLNIVEQDGDTFKYNEQLLQTAVLAGLQWRLTATSNTAIKDAKDVAAITGIDQALLPEGLVEQFDTGMTLTEAVSSLAQKIESYWGLSRNPNAPLGYTKGIPTAMAAEILAAFVESTDVVENIVDMSEIDPDNKKTIGLYTITELDSFDPINSFPTAIEEAVLVNPTEKMFFGDDIPPVANTQLRNPAVRNTPEQKAALKAEQATEFYVHTPMVQFYETLGITMEQNTDSMVPLPDPSQATKLTSWKNEPSLQALKADLDAAKPSHTAMMIKVKEWNDLMRIEGKAKPPKVKGRSQVQPKLVRRQAEWRYSALTEPFLGSNKLFKVTPVTWEDVQGARQNELVLNYQFRTKLNRVSFIDNYVRSVVDDGTGIVRVGWNREIRKEKQEVPVFSLFPIQTQEQADALQQALQLRTDNPRGYEENVDEAIKESVRFFDETGQATYAVQTGTTTTEVEVPLANHPTVEMLNPENIIIDPSCQGDINKAMFAIVSFETCKADLLKEKDRYHNLNKIDWQSSAPVNEPDHATTTPQEFQISDPMRKRVVAYEYWGFWDIEGNGVLEPIVATWIGSTLIRLEKNPYPDGKLPFVLIPYMPVKRDMYGEPDAELLGDNQAVLGAVMRGMIDLLGRSANGQRGMPKGMLDALNSRRYREGEDYEYNPTQNPAQMIIEHKFRELPQSALTMATLQNQEAESLTGVKAFAGGVTGESYGDVAAGIRGVLDAASKREMAILRRLAKGMSEIGNKIIAMNAVFLAEHEVVRITNEEFVTIKREDLKGNFDLEVDISTAEVDNQKSQDLGFMLQTIGPNVDQQITLNILAEIADLKPQNLLKLIRNFSIVSGYKISVQKSQAFLYTNNRQTESQIMSELPFTIASKRIKYLGIQLTRDVKDLFKENYKPLLNEIIEDTNKWKNIPCSCVGRTNIVKMAILPKIICRKTMSTLLTKTDIDSALASQFKSSVTDQLVNMINNVTQDQTAAEQIRNNFVTYAGVMKDGKFKTQDYLNAVQYVTYKHMGYSNKDAYFKTFPNRQAELVARGTSEKDISAYVSAYHRGKLVNLIMEQSLIPVWIVNQDLFQEALNHQAWLMKNATSEKVQCDAANSILTHLQKPKDAVTNINLDLRENSGLTELKNTLTQLAEAQKAAIEAGTVTTATSLRHQQRLEQLKLVRVRIQNLDPKKKDLPGDDLTLPDIDMSGSEYDIPGVITRPIYAEIEKLTTEQLTTHQAYWNAVTAQVAAITARANLGIIKANFVTAKIQALATKAEYALTKLKLSNESVTYCTAQYNLSSMLPQQLLMLKNQTTQVAEQTKLTTEQINMTKEQKEAQRAQTSDTRTDGTRVAGSVGKQKELYDQQITSYKRDAEVKAAKLFTDAWVTQKTIDEGLSPPNGFTNTSLDSILTALKNNNALGFPGWAATNYDPSIGIAYGNLSILSQIDPEVVKWQVPQKAGYEVQVQSSRIGFGDFEEWADKFLYENYPDRITEEFEIDIMDDDRIVLTATDGSELSFYPENYSQDAMYLYVNYYYIQPTSVADPVVHPAVSVPSADDLPSTSEWTQVSQNHTPKSATLKTVTHIKSVFSDGRPDEESTNTEEEQVSWTNFSDVYEKEFREPSEVGLIIIRTDWYCIYWFHYKH

SEQ ID NO: 49084 - protein, 1894 aa, Homo sapiens
  DOMAIN (1653)..(1702): TRANSPORT TRANSMEMBRANE PROTEIN domain identified by eMATRIX, accession number PD01825A, p-value=6.418e-09, raw score of 23.38
  misc_feature (1)...(1894): Xaa = X or * as defined in Table 2
SSPYPFTKQSSTNNFVFDGNELFNSRDRLSQRLFYILQSSVHLINRQLEGYVQHHLNLAEIXHHGLGKDAYIAAMYNNDDGATFQMEIGGIHTNAALAAGDKLQCIWRYLDVNGNAPAAENEFEVVSYEGFGTSNFSVKCKGMLPGKFIGCDAFYGKYLQTDGPIKQVDSVKWFTNLTVSGSGRKQLGQRKYPQVVMGMGMTSGFDDGYNLTPERQVKMAYGLGYRDWWTTYIGMSHYWKGLTAFQDKETGELITEQTVLDYPILFAGESQVAIHFMSGAYPDRGYDVFQKYMTETWGINYAGVRPINGTTGSTAVDRACAVNPDSEVFDPTQSSDAGGLWWWDLEADKPGPALLYCVEQVGKLKPKAIIWGQGDQDATALAYPGDRDPAPSLTRTKQATKKVFEYLRSLYGQIPIFIQELSYAWGITNTDEPNVPIRTGLPSFLAARRNTWGDIEFRWKSYGLDPALAQYRIEIYNPSNLNQILHSFVVSGTQEANGYVYADFTVEDWIPVMMEAVGSPNPWEFMKWRVVCLYQEREIPSAPWSDNIPLDNAGLVKKTILVGINQFGGGHFTDMSDPTATTANGAIGRKDKVSASTLRLTFAEKAGLRPIQVMPINVAADSAGMTVGTHKWWNTSSNSPGDALLAINDMVKGLGVKPDYFIEANPWETMYMKDVNSSTWPALMTAFESSNKAMLAWMRTNWGNPNLEIWFQGATTVWFGVAPPNDLNSEATVTVRDKQIQMATANIGFKLGSFVPGSNLYTAYRNVESSWIYYTVEAFHATAIELGEALALNVNRATNPPDWSYLRPPANLQGRKLATRDIKMTWDNRAGITHWKYANRHVTTGAEISSGILTSPEYVFTLNDQQNAYNGDTLNMSFSVSEYAADSGAVGASSSFVGVVQNGSYMQTPTQLKAAKQVNGDIIFTWVGRPSWQHFWVVNTSVNDSKTVIFSKEWSSESLTWTVAEQNEFYGLEEGGATHVIFMVSEYDPSNGLVSIGAQVTGQTEQPSNPMNPVAGLYAVFTGDPGNSNIKIMWDKPSVGGRDVRIRNMHVTSSATISDQFVSDNNLVFTREEQVAAYGFTASSVSVRAQEHDIESGALGLTTEYVAVPETAGTVGQGFAKKDSVGNCTMSWEVGDAVQWQVEIINAENSTVVKTEIVVAPTITWTAEEITAEYGYLTDHMVWRVRPYRADGASNIREIQLQLINEMTDVHMGALTAQYMPDDFTFEPGIGQIHFNVETSRKVCLDLAKSVLRLVPVYPLVSPVKKQHDDYWFVGRLGLDPVSEPEPINMPTMEFYKRFLSLLHERDMKFVNSVAYEILNFFMPDEWKQLNWKGDPALSGWYPPSSFIQPTNKDALDFVSKAQCQILKECQNLGMELYFQIGEPWWWDGSYNTGEGKNAPCIYDPKTMALYKEETGNDVPTPWIKDIFAPVEEHQWPYVDWLCTKLGQSTNYIRDYVKGKFPDAQATLLFFTPQIMSPASELTGRLNFPESEWVFPNYDFVQIEDYDWIIDGRLDLVPLTFDAAVNRLGYPLNVVHYFIGFVLLPEDAKKIWADVDKAWGLALEAGFSMSHESVEVLLARMEERMKTLFENNARDAKSRQDLDDAVRNLQLSINKMDTRLENVEKSLAESVPTIEEFITIKHKVVGAGLFGKWVWAGSGIIIGILAAARREIFAWRIGVAISKKKVGGVGGVIAAIIAAVFAVEGGYVNDPKDPGGETNHGVTIQVAQKHKQELESMYNWDGSMKNLTQEMASSIYYNDYILKPGFVKFADVSPAVTEKLVDAGVNTGPARPSRWLQESLNAFSRNGKDYPKIQVDGKVGSGTLSAYKSLQNKRGKVEACKLILKSLDGKQLNYYLSLNMPEYTTGWIANRIGNVPLERGSSGSYPFSSWFTTW

SEQ ID NO: 49085 - protein, 149 aa, Homo sapiens
  DOMAIN (36)..(53): CAMP RESPONSE ELEMENT BINDING (CREB) PROTEIN SIGNATURE domain identified by eMATRIX, accession number PR00041D, p-value=2.906e- 09, raw score of 7.95
GGIRKWEERKVVMAAIAASEVLVDSAEEGSLAAAAELAAQKREQRLRKFRELHLMRECAARGEDYEKVKLLEISAEDAERWERKKKRKNPDLGFSDYAAAQLRQYHRLTKQIKPDMETYERLREKHGEEFFPTSNSLLHGTHVPSTEEI

SEQ ID NO: 49086 - protein, 246 aa, Homo sapiens
  DOMAIN (23)..(40): CAMP RESPONSE ELEMENT BINDING (CREB) PROTEIN SIGNATURE domain identified by eMATRIX, accession number PR00041D, p-value=2.906e- 09, raw score of 7.95
  misc_feature (1)...(246): Xaa = X or * as defined in Table 2
SQFSLSQVLVDSAEEGSLAAAAELAAQKREQRLRKFRELHLMRNEARKLHHQEVVEEDKRLKLPANWEAKKARLEWELKEEEKKKECAARGEDYEKVKLLEISAEDAERWERKKKRKNPDLGFSDYAAAQLRQYHPVXPKQIKPDMETYERLREKHGEEFFPTSNSLLHGTHVAFHRGKFDRVVLRSGKNQFEKRDKFXARRRPYNDDADIDYINERNAQFNKKAERFYGKYTAEIKQNLERGTAV

SEQ ID NO: 49087 - protein, 44 aa, Homo sapiens
MSKVPSVHTHKICMYWLVVLSPKDQATHQFYNINTWTTLMIRTP

SEQ ID NO: 49088 - protein, 69 aa, Homo sapiens
  DOMAIN (50)..(63): EF-hand calcium-binding domain proteins domain identified by eMATRIX, accession number BL00018, p-value=3.400e-12, raw score of 7.41
  DOMAIN (5)..(69): EF hand domain identified by PFam, accession name efhand, E- value=2e-23, PFam score of 91.3
DSEEEIREAFRVFDKDGNGYISAAELRHVMTNLGEKLTDEEVDEMIREADIDGDGQVNYEEFVQMMTAK

SEQ ID NO: 49089 - protein, 50 aa, Homo sapiens
IFYLPLAKKRKKKKVHLFILFLYSKTECQKYLLSTHTKSACIGWGGRVPQ

SEQ ID NO: 49090 - protein, 342 aa, Homo sapiens
  DOMAIN (171)..(184): EF-hand calcium-binding domain proteins domain identified by eMATRIX, accession number BL00018, p-value=3.400e-12, raw score of 7.41
  DOMAIN (48)..(199): EF hand domain identified by PFam, accession name efhand, E- value=4.4e-11, PFam score of 50.3
  misc_feature (1)...(342): Xaa = X or * as defined in Table 2
QQQQQQQHRRYPRRRSPRAWCSHPRSPLLFLPSLAPWPDQLTEEQIAEFKEAFSLFDKDGDGTITTKELGTVMRSLGQEPNKKLELQDMINESGMLMGNGTHLTFPRIFXLMMARKMKDTDSEEGNLREAFRVFAKDGNGYISAAELRHVMTNLGEKTTRFKKVDEMIREADIDGDGQVNYEEFVQMMTGKMEDLTFQLPFSPPLEESNWNLLLTFLQKKEKKKKVHLFHSCFLYSKTECQKYLLVHTHQNLHVLVGGPCPLKDQATHQFYNINTCTNLNDNGLLKRSILLMINTLFGLASFFHACSFDDWSTSQGLWYLKLENGKNQISKPIPNGVLVHFV

SEQ ID NO: 49091 - protein, 110 aa, Homo sapiens
  misc_feature (1)...(110): Xaa = X or * as defined in Table 2
WVVLKNCVGVGLLIATXMWFISNKYLVQRQSRDYDVEWGYAFDVHLNAFYPLLVILHFIQLFFINPLPFLKNTVILLYPFAPLILLYGLSLALGWNFTHTLCSFYKYRVK

SEQ ID NO: 49092 - protein, 178 aa, Homo sapiens
VPSNSVNSLVQGNGVLNSRDAARHTAGAKRYKYLRRLFRFRQMDFEFAAWQMLYLFTSPQRVYRNFHYRKQTKDQWARDDPAFLVLLSIWLCVSTIGFGFVLDMGFFETIKLLLWVVLIDCVGVGLLIATLMWHCHFWKKQVILLYPFAPLILLYGLSLALGWNFTHTLCSFYKYRVK

SEQ ID NO: 49093 - protein, 92 aa, Homo sapiens
  DOMAIN (16)..(55): CUCUMBER MOSAIC VIRUS RNA 1 PROTEIN domain identified by eMATRIX, accession number DM00749B, p-value=8.515e-09, raw score of 16.13
  misc_feature (1)...(92): Xaa = X or * as defined in Table 2
MFFFHLGRCYRVLSVNSLVAGERSLEFQGMAARHTAGAITLQISGGRLFPLFGQMDFEFAAWQMLYLFTSPQRVYRHFHYLXQTKDQWARDD

SEQ ID NO: 49094 - protein, 377 aa, Homo sapiens
  misc_feature (1)...(377): Xaa = X or * as defined in Table 2
SFTLKNCVLQRVSSILPSNTAEVDFPSWTTQSDWQQTRAQVLLQARARAALRLVLIILRHDGASPPMRTRLSPTATLATGSGASEAPVSGDRKPAATTSGGPRRKMLPSTSVNSLVQGNGVLNSRDAARHTAGAKRYKYLRRLFRFRQMDFEFAAWQMLYLLTSPXRVYRNFHYRKQTKDQWARDDPAFLGFPFKYSGFCVSTIGFGFVLDMGFFETIKLLLWVGLIDCVGVGLLIATLMWFISNKYLVKRQSRDYDVEWGYAFDVHLNAFYPLLVILHFIQLFFINHVNLTDTFIGYLVGNTLWLVAVGYYILRXLSLGYSVGLLFFSSIAHFXKNTVILLYPFAPLXFLPPTGFPLALGWNFTHTLCSFYKYRVK

SEQ ID NO: 49095 - protein, 297 aa, Homo sapiens
  DOMAIN (127)..(171): Ribosomal protein S2 proteins domain identified by eMATRIX, accession number BL00962D, p-value=5.186e-22, raw score of 22.51
  DOMAIN (52)..(194): Ribosomal protein S2 domain identified by PFam, accession name Ribosomal_S2, E-value=5.5e-52, PFam score of 186.1
  misc_feature (1)...(297): Xaa = X or * as defined in Table 2
MPGLLLLRGSQNLKQQAEILCGLGLALVISAVKPLSKKFMLPNPTSMKPESDGIYSINLKRTWEKLLLAGHAIVVIENSADVSVISSRNTGQKAMLKFAAATGATPIAGHFTPGTFTNQIQAAYWEPRLLVVSDPRADHQSLTEASCVNPPAIALCNTDSPLCHVDIAITCNNKGAPSVGQMWXMLAWEVLHMRGTISCNSPWEVMSNLYFYRDPEETEKEEQAAAEKAVTKKEFQGKWTVSAPEFTVTQPEVADWSEGMQICNLGKAQQGQLSSDAEDDFWSLESLDGYSHTVTFR

SEQ ID NO: 49096 - protein, 258 aa, Homo sapiens
  DOMAIN (126)..(170): Ribosomal protein S2 proteins domain identified by eMATRIX, accession number BL00962D, p-value=5.500e-35, raw score of 22.51
  DOMAIN (24)..(195): Ribosomal protein S2 domain identified by PFam, accession name Ribosomal_S2, E-value=4.9e-86, PFam score of 299.2
REIFINVRSLLMACFVKEEDVLKFLAARNPHVGGTNLDFQMEQYIYIRKSDGIYIIRLKRTWEKLLLAARAIVAIENPADVSVISSRNTGQRAVLKFAAATGATPIAGRFTPGTFTNQIQAAFREPRLLVVTDPRADHQPLTEASYVNLPTIALCNTDSPLRYVDIAIPCNNKGAHSVGLMWWMLAREVLRMRGTISREHPWEVMPDLYFYRDPEEIEKEEQAAAEKAVTKEEFQGEWTAPAPEFTATQPEVADWSEG

SEQ ID NO: 49097 - protein, 150 aa, Homo sapiens
  misc_feature (1)...(150): Xaa = X or * as defined in Table 2
DEACGVCCYSPGASPMPPXGRTRKEGRTAGKVRPKERPKTPVNKSGGQGPKRKNWSKRQKFRDKLNNLVLFDKATYDKLCKEVPNYKLITPSLWSPERLKIRGSLAKGKPFQEAPXVKGLIRNLVSKHRAPSNFTPGNYQGWEDAPSLLG

SEQ ID NO: 49098 - protein, 40 aa, Homo sapiens
MAGQFRIYLWDPLLILSQIVLMQTVYYGSLGLWLALVDGL

SEQ ID NO: 49099 - protein, 15 aa, Homo sapiens
  misc_feature (1)...(15): Xaa = X or * as defined in Table 2
XRLSMMSFILNALTX

SEQ ID NO: 49100 - protein, 180 aa, Homo sapiens
  misc_feature (1)...(180): Xaa = X or * as defined in Table 2
RPGHAQTLGSPSLALGMAGQFRSYVWDPLLILSQIVLMQTVYYGSLGLWLAVVDGLLRISPSLDQMFDAEILGFSTPFQGRLSMMSFILNALTCALGFAVISSGEEKQCLDFTVTVHFFHLLGLLGSNSSPFSPSGGXTLVGLGPKPVVALHSLAVIGEYLCMRTELKEIPLNSAPKSNV

SEQ ID NO: 49101 - protein, 270 aa, Homo sapiens
  DOMAIN (112)..(128): CYCLOPHILIN PEPTIDYL-PROLYL CIS-TRANS ISOMERASE SIGNATURE domain identified by eMATRIX, accession number PR00153A, p-value= 3.872e-10, raw score of 12.98
  DOMAIN (111)..(270): Cyclophilin type peptidyl-prolyl cis-tr domain identified by PFam, accession name pro_isomerase, E-value=5.4e-06, PFam score of 24.4
  misc_feature (1)...(270): Xaa = X or * as defined in Table 2
MAELTVMRFHTEPQGSEGLRLPRISGSKPKQMHVTWLEPLENGICNGNTGNAQLLIPPGVIFHKYPSHYVTAMLKSLKWPPLQTELTSSSGQALWGLVGGGSPHRQASTEKLFSEKVPKTAENFPCSELSCFHGENGFGLXGVPCFHRLFPRVYAVRGGDFHTAINGTGGKSHPMGKKFEGXETSSLKHTGPGDLVPWQNAGPNTNGSPVFLTSCTAQELSGLDGKPCGVLAKVKEGMNIVEAMERFGSRNGKTSKKITIADCGTTPNKV

SEQ ID NO: 49102 - protein, 150 aa, Homo sapiens
  DOMAIN (77)..(87): Eukaryotic  RNA-binding region RNP-1 proteins domain identified by eMATRIX, accession number BL00030B, p-value=3.368e- 09, raw score of 7.03
  DOMAIN (43)..(109): RNA recognition motif. domain identified by PFam, accession name rrm, E-value=3.9e-21, PFam score of 83.6
ESWLVLGRRKAGRLIGACGFEPPHFLTLDLEMHRDSCPLDCKVYVGNLGNNGNKTELERAFGYYGPLRSVWVARNPPGFAFVEFEDPRDAADAVRELDGRTLCGCRVRVELSNGEKRSRNRGPPPSWGRRPRDDYRRRSPPPRRRSPRRR

SEQ ID NO: 49103 - protein, 435 aa, Homo sapiens
  DOMAIN (30)..(79): PROTEIN RIBOSOMAL 60S L22 RNA-BINDING HEP domain identified by eMATRIX, accession number PD02785A, p-value=5.629e-22, raw score of 15.23
  DOMAIN (37)..(231): Ribosomal L22e protein family domain identified by PFam, accession name Ribosomal_L22e, E-value=1.3e-08, PFam score of 42.1
  misc_feature (1)...(435): Xaa = X or * as defined in Table 2
MRWACDFTKLLSSTWTLIQYPENAMIIARWALLADCPEKTKALRTTEDGIVDAANFEQFLQERIKVNGKVGNLGGGVVTIEKSKSKITVTSKGPFNSMXIXGSASSFVEKKRLLEFXKLLSSTWTLIQYPENAMIIARWALLADCPEKTKALRTTEDGIVDAANFEQFLQERIKVNGKVGNLGGGVVTIEKSKSKITVTSKGHFQFYVNLRISFLICGKEKAVGILEEIVLNLLIIFSSIDILTVKGTCSGCERGFFLEIYDEVEDSSYDNHLKDDDPKREGPGAEQALSTPPCCPLEKRPINDQTLIISWSGSTNVIEEAGRHSVVQEGWGALGVLRTTLPSLPQITGGAGFVGSHLTDKLMMDGHEVTVVDNFFTGRKRNVEHWIGHENFELINHDVVEPLYIEGRAENQLSHTVPGPVDLSDRIVNGYFLSL

SEQ ID NO: 49104 - protein, 578 aa, Homo sapiens
  DOMAIN (24)..(73): PROTEIN RIBOSOMAL 60S L22 RNA-BINDING HEP domain identified by eMATRIX, accession number PD02785A, p-value=1.000e-40, raw score of 15.23
  DOMAIN (23)..(269): Ribosomal L22e protein family domain identified by PFam, accession name Ribosomal_L22e, E-value=8.4e-33, PFam score of 122.4
  misc_feature (1)...(578): Xaa = X or * as defined in Table 2
RDIWLSASAAAMVPVRKLVAEGGQKTKQVLRFTLGCTHPIEDGIIDAANFEQFLQERIKVNGKVGNLGGGVVTIEKSKSKITVTSKGPFNSMXIXGSASSFVEKKRLLEFXKAENLSSKNWNKTRMPTFTTLTQVAPNPITGYTSKGKKISTLKRYLAFCLRCCHGAREKACGEGGQKTKQVLRFTLGCTHPIEDGIIDAANFEQFLQERIKVNGKVGNLGGGVVTIEKSKSKITVTSKGHFQFYVNLRISFLICGKEKAVGILEEIVLNLLIIFSSIDILTVKGTCSSCERGFFLEICDEVEDSSYDNHLKDEDPKREECRKRDAYAPLKDQGNAEKRRHNVRKSWPLLSAKLLKIRTNLTGTEEAELHANHIQQVPIKCLSYKLTERKNGTQKHLHYALILHVKCDRRETSKFTKFYGTHPLTALFVPRAWDGPPSALPESELAVFLVAYEGNTLLHLFLSGAEQRGNSSLKERAGRARFSHQRKLNEQTIPPDNLTKSSVDLQSSFSAVHPNSQPTVWVDMPAHPLSQYLVPARKTVLPIWYGNSCPDVIFGSLSDSKLSEGKEFALPLKFLNFF

SEQ ID NO: 49105 - protein, 39 aa, Homo sapiens
MIPIFYRVGAIKSELQNLLLFFCPPSPQAFSQEPWRQRS

SEQ ID NO: 49106 - protein, 100 aa, Homo sapiens; identical to SEQ ID NO: 38028

SEQ ID NO: 49107 - protein, 45 aa, Homo sapiens; identical to SEQ ID NO: 38029
  misc_feature (1)...(45): Xaa = X or * as defined in Table 2

SEQ ID NO: 49108 - protein, 43 aa, Homo sapiens; identical to SEQ ID NO: 38030
  misc_feature (1)...(43): Xaa = X or * as defined in Table 2

SEQ ID NO: 49109 - protein, 395 aa, Homo sapiens; identical to SEQ ID NO: 38031
  DOMAIN (28)..(45): GLYCOSYL HYDROLASE FAMILY 20 SIGNATURE domain identified by eMATRIX, accession number PR00738G, p-value=1.000e-20, raw score of 15.05
  DOMAIN (20)..(390): Glycosyl hydrolase family 20 domain identified by PFam, accession name Glyco_hydro_20, E-value=1.6e-59, PFam score of 211.1

SEQ ID NO: 49110 - protein, 61 aa, Homo sapiens
IAMGGPRLILLILGFPCKLHGAAYGKGIYLSPISSISFGYSGKKYSVATLTLFTLPPFVNT

SEQ ID NO: 49111 - protein, 136 aa, Homo sapiens
DSMLKGKLGVPELRVGRLMNRSISCTMKNPKVEVFGYPPSPQVSGHCKNIPTLEYGFLVQIMKYAEQRIPTLNEYCVVCDEQHVFQNGSMLKPAVCTRELCVFSFYTLGVMSGAAKEVATGAKVVDLLVAMCRAAL

SEQ ID NO: 49112 - protein, 673 aa, Homo sapiens
  misc_feature (1)...(673): Xaa = X or * as defined in Table 2
PVYLSIFMSCVGENGGSHIENWHSILRNGLVNASYTKLQDIKGQFWNDDDSEGDNESEEFLYGVQGSCAADLYRHPQLDADIEAVKEIYSENSVSIREYGTIDDVDIALHINISFLDEEVSTAWKVLRTEPIVLRLRFFLSQYLDGPDPSIEVFQPSNKEGFGLGLQLKKILGMFTSQQWKHLSNDFLKTQQEKRHSWFKASGTIKKFRAGLQHSFSPIPKSPSFPYSXQDSMAGKGKLGVPELRVGRLMNRSISCTMKNPKVEVFGYPPSPQAGLLCPQHVGLPPPARTSPLVSGHCKNIPTLEYGFLVQIMKYAEQRIPTLNEYCVVCDEQHVFQNGSMLKPAVCTRELCVFSFYTLGVMSGAAEEVATGAEVVDLLVAMCRAALESPRKSIIFEPYPSVVDPTDPKTLAFNPKKKNYERLQKALDSVMSIREMTQGSYLEIKKQMDKVWIPLAHPLLQWIISSNRSHIVKLPLSRQLKFMHTSHQFLLLSSPPAKEARFRTAKKLYGSTFAFHGSHIENWHSILRGNGLVQWHSYTKLQLHGAAYGKGIYLSPISSISFGYSGMGKGQHRMPSKDELVQRYNRMNTIPQTRSIQSRFLQSRNLNCIALCEVITSKDLQKHGEHLGCCPVFRPMSCTRFLPLXYEDGQVGDAQHYIPHGPQRVHEREISAC

SEQ ID NO: 49113 - protein, 121 aa, Homo sapiens
  misc_feature (1)...(121): Xaa = X or * as defined in Table 2
MDVLKATAEQISSQTGNKVHAIQCDVRDPDMVQNTVSELIKVAGHPNIVINNAAGNFISPTERLSPNAWKTITDIVLNGTAFVTLEIGKQLIKAQKGAAFLSITTIYAETXSGFVVPSASA

SEQ ID NO: 49114 - protein, 178 aa, Homo sapiens
  DOMAIN (110)..(131): GLUCOSE/RIBITOL DEHYDROGENASE FAMILY SIGNATURE domain identified by eMATRIX, accession number PR00081F, p-value=7.188e- 14, raw score of 15.71
  DOMAIN (112)..(142): Short chain dehydrogenase/reductase C-te domain identified by PFam, accession name adh_short_C2, E-value=7.1e-11, PFam score of 44.2
KNAAGNFISPTERLSPNAWKTITDIVLNGTAFVTFLSITTIYAETGSGFVVPSASAKAGVEAMSKSLAAEWGKYGMRFNVIQPGPIKTKGAFSRLDPTGTFEKEMIGRIPCGRLGTVEELANLAAFLCSDYASWINGAVIKFDGGEEVLISGEFNDLRKVTKEQWDTIEELIRKTKGS

SEQ ID NO: 49115 - protein, 117 aa, Homo sapiens
SYMKLPARVFFIFWSRLPCGLAPRRVRRPGARGARTGRLDAQRERTGRHGGLGSEDKASWGAKREDRASRGFGERGQGIPRRREREDRASRGLGERGQGVPGLKERGQGVLERLEST

SEQ ID NO: 49116 - protein, 527 aa, Homo sapiens; identical to SEQ ID NO: 36958
  DOMAIN (65)..(86): GLUCOSE/RIBITOL DEHYDROGENASE FAMILY SIGNATURE domain identified by eMATRIX, accession number PR00081F, p-value=7.188e- 14, raw score of 15.71
  DOMAIN (67)..(93): Short chain dehydrogenase/reductase C-te domain identified by PFam, accession name adh_short_C2, E-value=6.8e-10, PFam score of 40.8

SEQ ID NO: 49117 - protein, 409 aa, Homo sapiens
  DOMAIN (108)..(126): GLUCOSE/RIBITOL DEHYDROGENASE FAMILY SIGNATURE domain identified by eMATRIX, accession number PR00081A, p-value=6.049e- 11, raw score of 10.53
  DOMAIN (107)..(306): short chain dehydrogenase domain identified by PFam, accession name adh_short, E-value=9.6e-05, PFam score of -12.9
  misc_feature (1)...(409): Xaa = X or * as defined in Table 2
RRLGPSPRPIPRRPRQRFQPRELCSFCPAPCGPTACGGFRPEFWRINMKLPAKVFFTLGSRLPCGLAPRRFFSYGTKILYQNTEALQSKFFSPLQKAMLPPNSFQGKVAFITGGGTGLGKGMTTLLSSLGAQCVIASRKMDVLKATAEQISFSNWEIKVHAIQCDVRDPDMVQNTVSELIKVAGHPNIVINNAAGNFISPTERLSPXCWKNQITNIVXNGTAFVTLEMGKHLIKAQKGAAFLSITTIYAETGSGFCRYPSASAQSRVWEAHGASLLQLEWGXNMGLRIPIVDSNQGPIKTKGALYPSGPPTGTFGEKKMIGQKFPCGSPWGLVEELRKSLPAFLCSDYASWINGAVIKFDGGEEVLISGDFNDLRKVTKEQWDTIEELIRKTKRFLRPLWPSSWLQKRE

SEQ ID NO: 49118 - protein, 141 aa, Homo sapiens; identical to SEQ ID NO: 33747
  DOMAIN (48)..(73): Ubiquitin carboxyl-terminal hydrolases family 2 proteins domain identified by eMATRIX, accession number BL00972D, p-value= 7.677e-16, raw score of 22.55
  DOMAIN (46)..(122): Ubiquitin carboxyl-terminal hydrolase family domain identified by PFam, accession name UCH-2, E-value=2.2e-26, PFam score of 101.1

SEQ ID NO: 49119 - protein, 70 aa, Homo sapiens
EIPLDQVDIDKENEMLVTVAHFHKEVFGTFGIPFLLRIHQFKIAIVMMDRHQYINEDEYEVNLKDFEPQP

SEQ ID NO: 49120 - protein, 80 aa, Homo sapiens
MVSYIQRKEVDYRSDRREDYYDIQLSIEGNKNIFESFVNYMAEEQLILVHSRDNHGRHYVVYLNPKGDGKWCKFDDDVVS

SEQ ID NO: 49121 - protein, 243 aa, Homo sapiens
  DOMAIN (21)..(43): Ubiquitin carboxyl-terminal hydrolases family 2 proteins domain identified by eMATRIX, accession number BL00972E, p-value= 5.846e-11, raw score of 20.72
  misc_feature (1)...(243): Xaa = X or * as defined in Table 2
LVHSRDNHGRHYVVYLNPKGDGKWCKFDDDVVSQLVERLXEEKRINAQKVDRRQEVHLYMQAQVASEDQFCGHQGNDMYDEEKVKYTVFKVLKNSSLAEFVQNLSQIMEFPQDQIQLWPMQARSNGTKRPAMLDNEADGNKAMIEVSDNENSWTIFLETVDLELAASGVTLPKFDKAHDVMFFLKMYDPKMRSLNYCGHIYTPISCEIRDLLPVMCNRAGFIQDTSLILYEEVKLNLTERIQD

SEQ ID NO: 49122 - protein, 133 aa, Homo sapiens
  misc_feature (1)...(133): Xaa = X or * as defined in Table 2
KHLFYLFITXEITLYPDKHGCVRDLLEECKKAVELGEKASGKLRLLEIVSYKIIGVHQEDELLECLSPATSRTFRIEEIPLDLLEECKKAVELGEKASGKLRLLEIVSYKIIGVHQEDELLECLSPATSRTFR

SEQ ID NO: 49123 - protein, 99 aa, Homo sapiens
  DOMAIN (18)..(57): MATH domain identified by PFam, accession name MATH, E-value= 0.012, PFam score of 14.2
CVFFADTSWRSEATFQFTVERFSRLSESVLSPPCFVRNLPWKIMVMPRFYPDRPHQKSVGFFLQRNAESDSTEDSLNDATTNPHIVAFHYWKPNLNSLV

SEQ ID NO: 49124 - protein, 1222 aa, Homo sapiens
  DOMAIN (281)..(299): Ubiquitin carboxyl-terminal hydrolases family 2 proteins domain identified by eMATRIX, accession number BL00972A, p-value= 3.483e-17, raw score of 11.93
  DOMAIN (519)..(595): Ubiquitin carboxyl-terminal hydrolase family domain identified by PFam, accession name UCH-2, E-value=2.2e-26, PFam score of 101.1
  misc_feature (1)...(1222): Xaa = X or * as defined in Table 2
YVRVSLPPPPPAAGRPGAAVADDAREEEEEAAPPPPPPPPPRLAAARPPGSQPRPPAAGEAQAAADMNHQQQQQQQKAGEQQLSEPEDMEMEAGDTDDPPRITQNPVINGNVALSDGHNTAEEDMEDDTSWRSEATFQFTVERFSRLSESVLSPPCFVRNLPWKIMVMPRFYPDRPHQKSVGFFLQCNAESDSTSWSCHAQAVLKIINYRDDEKSFSRRISHLFFHKENDWGFSNFMAWSEVTDPEKGFIDDDKVTFEVFVQADAPHGVAWDSKKHTGYVGLKNQGATCYMNSLLQTLFFTNQLRKAVYMMPTEGDGFVLKAFPLALQRVFYELQHSDKPVGTKKFNQSPFGWETLDSLMPHDVQEPCRVLLDNVENKMKGTCVEGTIPKLFRGKMVSYIQCKEVDYRYDRRDDYYDIQLSIKGKKNIFESFVDYVAVEQLDGDNKYDAGEHGLQEAEKGVKFLTLPPVLHLQLMRFMYDPQTDQNIKINDRFEFPEQLPLDEFLQKTDPKDPANYILHAVLVHSGDNHGGHYVVYLNPKGDGKWCKFDDDVVSRCTKEEAIEHNYGGHDDDLSVRHCTNAYMLVYIRESKLSEVLQAVTDHDIPQQLVERLQEEKRIEAQKRKERQEAHLYMQVQIVAEDQFCGHQGNDMYDEEKVKYTVFKVLKNSSLAEFVQSLSQTMGFPQDQIRLWPMQARSNGTKRPAMLDNEADGNKTMIELSDNENPWTIFLETVDPELAASGATLPKFDKDHDVMLFLKMYDPKTRSLNYCGHIYTPISCKIRDLLPVMCDRAGFIQDTSLILYEEVKPNLTERIQDYDVSLDKALDELMDGDIIVFQKDDPENDNSELPTAKEYFRDLYHRVDVIFCDKTIPNDPGFVGTLSNRMNYFQVAKTVAQRLNTDPMLLQFFKSQGYRDGPGNPLRHNYEGTLRDLLQFFKPRQPKKLYYQQLKMKITDFENRRSFKCIWLNSQFREEEITLYPDKHGCVRDLLEECKKAVELGEKASGKLRLLEIVSYKIIGVHSRKVELLGMFYSPATSRTFSIRGNFFWDQVDIDKEIEMLVTVAHFHKEVFGTFGIPFLLRIHQGEHFSRSXXRRIQSLLDIQEKGFLGSFKFCNCKXWGRHQYIKXRPSMKVNLKDFEPQPSNMSHPRPWLGLDHFNKAPKRKRFPYLEKAIKIHNLISKLVCSRPRTGVWGGPLKQPRNFGCTCPLGRSLSARGISLLGV

SEQ ID NO: 49125 - protein, 145 aa, Homo sapiens; identical to SEQ ID NO: 48948
  DOMAIN (85)..(119): IMMUNOGLOBULIN V REGION domain identified by eMATRIX, accession number DM00031B, p-value=2.937e-09, raw score of 15.41

SEQ ID NO: 49126 - protein, 212 aa, Homo sapiens
  DOMAIN (84)..(118): IMMUNOGLOBULIN V REGION domain identified by eMATRIX, accession number DM00031B, p-value=6.013e-09, raw score of 15.41
  DOMAIN (43)..(118): Immunoglobulin domain identified by PFam, accession name ig, E-value=1e-07, PFam score of 29.9
  misc_feature (1)...(212): Xaa = X or * as defined in Table 2
QSGHSMDMRVPAQLLGLLLLRLRGARCDIQMTQSPSSLSASVGDRVTITCRASLDISRWLAWFQLKPGEVPKLLIYAASTLQSGVPSRFSGSGSGTDFTLTISSLQSEDIAMYYCQQYNNWSSAPYTFGPGTKVEIKTKLWAAPSVLHLPGPSDEAVENLGTAFCLCALLEKTSNPQSRPKSTSGRVDNALPNGGKLPQGECSQKQDXTAWT

SEQ ID NO: 49127 - protein, 230 aa, Homo sapiens
GAALIYTSVKENKNIDLVYKYIVQKLYGFPYKIPAVVVEKDAVFIPAGWDNDKKIGILHENFQTLKAEDNFEDIITKPPVRKFVHEKEIMAEDDQVFLMKLQDASPRVPGGSPRTPNRSVSSNVASVSPIPAGSKKIDPNMKAGATSEGVLANFFNSLLSKKTGSPGGPGVSGGSPAGGAGGGSSGLPPSTKKSGQKPVLDVHAELDRITRKPVTVSPTTPTSPTEGEAS

SEQ ID NO: 49128 - protein, 548 aa, Homo sapiens
  DOMAIN (481)..(497): LMBP PROTEIN SIGNATURE domain identified by eMATRIX, accession number PR00960A, p-value=7.556e-09, raw score of 10.63
  misc_feature (1)...(548): Xaa = X or * as defined in Table 2
FPTKMAAVGRVGSFGSSPPGLSSTYTGGPLGNEIASGNGGAAAGDDEDGQNLWSCILSEVSTRSRSKLPAGXNVLLLGEDGAGKTSLIRKIQGIEEYKKGRGLEYLYLNVHEXMTGNDQTRCNVWILDGDLYHKGLLKFSLDAVSLKDTLVMLVVDMSKPWTALDSLQKWASVVREHVDKLKIPPEEMKQMEQKLIREFQEYVERGEDFPASPQRRNTASQEDKDDSVVLPLGADTLTHNLGIPVLVVCTKCDAISVLEKEHDYRDEHFDFFQSHIRKFCLRYGAALIYTSVKENKNIDLVYKYIVQKLYGFPYKIPAVVVEKDAVFIPAGWDNDKKIGILHENFQTFKRQEDNFWKDIITKPPVRKFVHEKEIMAEDDQVFLMKVQSLLSKSKPPTTEAGRPVDASPKESQGGSPPNTKIESVSSXCCQACHPIPCWGQKKIDPNMESWELTSGRAFLGKFSFNSFVXVKRLGSPRRPLVVSGGXPCRVGLGGGSSGLPPSTKKVQAYKPVLDVHAELDRITRXPVTVSPTTPTSPTEGEASLKVTN

SEQ ID NO: 49129 - protein, 287 aa, Homo sapiens
  DOMAIN (32)..(78): Proteasome A-type subunits proteins domain identified by eMATRIX, accession number BL00388A, p-value=7.273e-17, raw score of 23.14
  misc_feature (1)...(287): Xaa = X or * as defined in Table 2
LVCLVRELLGPRRFFLKVFFLPTFPGVPAPVLTATLPFFHPEGRLYQVEYAFKAIXPGGPLPSLAVRGKDWAVIVTQKKSTXPNYLDSSTVTSLFPRXLKNIWCVMTGMTSXPADSQVQRARYEAANWKIQSMGYEIPVDMLCKKNCPIFLQVYHTEMLKMKASLRCCMIFNWVIDEEQGPSRYIRCDPAGYYCGVXKPTASGSXTKLRSTGFLEKKKCKKKFDWTFXTRQWETAITLPCLTVPIQLDFKTFQEIEVGVVTVENPKFRILTEAEIDAQLVAPSKRRD

SEQ ID NO: 49130 - protein, 157 aa, Homo sapiens
PAGRGMALLDLALEGMAVFGFVLFLVLWLMHFMAIIYTRLHLNKKATDKQPYSKLPGVSLLKPLKGVDPNLINNLETFFELDYPKYEVLLCVQDHDDPAIDVCKKLLGKYPRYYISANVTGFKCVTGMSCLMRKDVLHQAGGLIALAQYIAEDYFMA

SEQ ID NO: 49131 - protein, 508 aa, Homo sapiens
MIDKIDAYHKTVFMRMEIVQTFPSEVYQDLVLELFIYSFQVIVYDHIKFISVKRKQTAKCDIFSTVRDKGVGLSKTEIAPDPESTHMTLMPRKQFKKGSSQEASSSEWKKQKSDALGLAACEKDMKAMGTDIWKLQQRCISTQVIPDTLTDMVNQMTEKVGLVHGLPYVADRQGFAATLEQVYFGTSHPRYYISANVTGFKCVTGMSCLMRKDVLDQAGGLIAFAQYIAEDYFMAKAIADRGWRFAMSTQVAMQNSGSYSISQFQSRMIRKTITRMVTQINCEFEEVVPSSNPDSQIEVEEVSLYTHMDYNEVFTPVSCLEKCSALQNQNQEKVKSVGESYELSGGLIKKASISSRDEVRVFSAFIDSTGQMVLVSVTGRDAGSRGLQAGLAANLILRFQPLAAKRYNHDFPEQESPNPLSLPIKTVEPREIYRLIQEQWVSTLICKLPDLPIRELQSENTGLLPRTNSTSVEIRKRSAIVRQCFSGRAWHLRDTNTSFNNMLSVHDA

SEQ ID NO: 49132 - protein, 239 aa, Homo sapiens
  misc_feature (1)...(239): Xaa = X or * as defined in Table 2
RPQRAGPVRRAGVMALLDLALEGMAVFGFVLFLVLWLMHFMAIIYTRLHLNKKATDKQPYSKLPGVSLLKPLKGVDPNLINNLETFFELDYPKPLFFSVAPMKRIEKTQMXXPXCSTYXYEVLLCVQDHDDPAIDVCKKLLGKYPNVDARLFIGGKKVGINPKINNLMPGYEVAKYDLIWICDSGIRGTMEMPMSLEQSYDPNVRDPIYRNNGDADGQHLVLHDFYQQGSGPKCSLINA

SEQ ID NO: 49133 - protein, 56 aa, Homo sapiens
GGTLCFSKLDYAVAWFIRESMTIYIFLSALWDPTISWRTGRYRLRCGGTAEEILDV

SEQ ID NO: 49134 - protein, 42 aa, Homo sapiens
MAVFGFVLFLVLVADAFHGYHLHPITPQQEGNGQTATIASSQ

SEQ ID NO: 49135 - protein, 140 aa, Homo sapiens
  DOMAIN (15)..(37): TRANSFORMING PROTEIN P21 RAS SIGNATURE domain identified by eMATRIX, accession number PR00449A, p-value=6.294e-19, raw score of 13.20
  DOMAIN (16)..(140): Ras family domain identified by PFam, accession name ras, E- value=4.6e-43, PFam score of 156.5
FVGPGPGDPPPSETHKLVVVGGGGVGKSALTIQFIQILDTAGQEEFGAMREQYMRAGHGFLLVFAINDRQSFNEVGKLFTQILRVKDRDDFPVVLVGNKADLESQRQVPRSEASAFGASHHVAYFEASAKLRLNVDEAFE

SEQ ID NO: 49136 - protein, 78 aa, Homo sapiens
SCLTTTPLLRTPTRRSAVWMASQPGWTSGTPGPKLLLNVDEAFEQLVRAVRKYQEQELPPSPPSAPRKKGGGCPCVLL

SEQ ID NO: 49137 - protein, 252 aa, Homo sapiens
  DOMAIN (58)..(80): TRANSFORMING PROTEIN P21 RAS SIGNATURE domain identified by eMATRIX, accession number PR00449A, p-value=6.294e-19, raw score of 13.20
  DOMAIN (59)..(252): Ras family domain identified by PFam, accession name ras, E- value=1.2e-45, PFam score of 165.1
  misc_feature (1)...(252): Xaa = X or * as defined in Table 2
MTPHSALRARGKGGGTGGGSEGSSSGGDMSSGAASGTGRGRPRGGGPGPGDPPPSETHKLVVVGGGGVGKSALTIQFIQSYFVSDYDPTIEDSYTKICSVDGIPARLDILDPAGQEEFGAMREQYMRAGHTGFLLVFAINDRQEFSTRWGKLFHADFCGFKDRDDFPVVLVGNKADLESQRQVPRSEASAFGASHHVAYFEPSAKMRFNVDEGFXRSWCGVVREIPRNKELPPSPPKCPPGRMGGGCPCVLL

SEQ ID NO: 49138 - protein, 134 aa, Homo sapiens
  DOMAIN (50)..(105): Ribosomal protein L18e proteins domain identified by eMATRIX, accession number BL01106B, p-value=2.421e-33, raw score of 27.89
  DOMAIN (1)..(134): Eukaryotic ribosomal protein L18 domain identified by PFam, accession name Ribosomal_L18e, E-value=2.2e-83, PFam score of 290.5
RFLARRTNSTFNQVVLKRLFMSRTNRPPLSLSRMIRKMKLPGRENKTAVVVGTITDDVRVQEVPKLKVCALRVTSRARSRILRAGGKILTFDEVYRHFGKAPGTPHSHTKPYVRSKGRKFERARGRRASRGYKN

SEQ ID NO: 49139 - protein, 335 aa, Homo sapiens
  DOMAIN (67)..(135): PTS HPr component phosphorylation sites domain identified by PFam, accession name PTS-HPr, E-value=0.0038, PFam score of 16.9
  misc_feature (1)...(335): Xaa = X or * as defined in Table 2
PKLRXPEPSRNQVLLTRFQIAVHFLLSRLLQFFPRPARSRAFLSRKPKPGPGKKPMALIVEFIGELPTGVHARPPSHVETLCNTFSSQIEWHNLRTDRKGNAKSALALIGTDTLAGDNCQLLISGADEQEAHQRLSQWLRDEFPHCDAPLAEVKSDELEPLPVSLTNLNPQIIRARTVYSGRAGGIQTPISSLDLNALGNLPAAKGVDAEQSALENGLTLVLKNIEFRLLDSDGATSAILEAHRSLAGDTSLREHLLPVGQCANAASSTNHPFVTKKRQQCFVFRQRLANGRNDSGWQITHAFWFRFHQHSRIMKYLYGFTARLKEHQPKLRHQN

SEQ ID NO: 49140 - protein, 237 aa, Homo sapiens
  DOMAIN (24)..(232): Eukaryotic ribosomal protein L18 domain identified by PFam, accession name Ribosomal_L18e, E-value=2.8e-05, PFam score of -34.1
  misc_feature (1)...(237): Xaa = X or * as defined in Table 2
VCCEFCRAERRHHGEWTIRHNKDRKGSGARDPKEPGFLLXRCCVKLYRFSGPEEPNSNIQPRLWLKRLFMSRTNRPPSVPFSRDESGKMKASLARGKQDRPVVVGGPLTXLMLRVSGRVPKTERYVALRRGPSPGPQAAFLQGQGGKIPSLFDQAWPLGLPLKGLLALVPGSSGSLGKGAREGGTRQFSAKAPKETPQKPHQNPYVRSKGRKFERARGPTGPARGYKKLTLGSYSLI

SEQ ID NO: 49141 - protein, 55 aa, Homo sapiens
SCEQIAVQVNNGDAGREMPCPLPCDEEIISSEDSEGSTDVDEPLEVFISAPRSEP

SEQ ID NO: 49142 - protein, 882 aa, Homo sapiens
  DOMAIN (740)..(761): HIGH MOBILITY GROUP (HMG1/HMG2) PROTEIN SIGNATURE domain identified by eMATRIX, accession number PR00886B, p-value=7.632e- 23, raw score of 9.88
  DOMAIN (598)..(679): SAND domain identified by PFam, accession name SAND, E-value= 1.2e-54, PFam score of 195.0
GGKMAGGGGDLSTRRLNECISPVANEMNHLPAHSHDLQRMFTEDQGVDDRLLYDIVFKHFKRNKVEISNAIKKTFPFLEGLRDRDLITNKMFEDSQDSCRNLVPVQRVVYNVLSELEKTFNLPVLEALFSDVNMQEYPDLIHIYKGFENVIHDKLPLQESEEEEREERSGLQLSLEQGTGENSFRSLTWPPSGSPSHAGTTPPENGLSEHPCETEQINAKRKDTTSDKDDSLGSQQTNEQCAQKAEPTESCEQIAVQVNNGDAGREMPCPLPCDEESPEAELHNHGIQINSCSVRLVDIKKEKPFSNSKVECQAQARTHHNQASDIIVISSEDSEGSTDVDEPLEVFISAPRSEPVINNDNPLESNDEKEGQEATCSRPQIVPEPMDFRKLSTFRESFKKRVIGQDHDFSESSEEEAPAEASSGALRSKHGEKAPMTSRSTSTWRIPSRKRRFSSSDFSDLSNGEELQETCSSSLRRGSGSQPQEPENKKCSCVMCFPKGVPRSQEARTESSQASDMMDTMDVENNSTLEKHSGKRRKKRRHRSKVNGLQRGRKKDRPRKHLTLNNKVQKKRWQQRGRKANTRPLKRRRKRGPRIPKDENINFKQSELPVTCGEVKGTLYKERFKQGTSKKCIQSEDKKWFTPREFEIEGDRGASKNWKLSIRCGGYTLKVLMENKFLPEPPSTRKKRILESHNNTLVDPCEEHKKKNPDASVKFSEFLKKCSETWKTIFAKEKGKFEDMAKADKAHYEREMKTYIPPKGEKKKKFKDPNAPKRPPLAFFLFCSEYRPKIKGEHPGLSIDDVVKKLAGMWNNTAAADKQFYEKKAAKLKEKYKKDIAAYRAKGKPNSAKKRVVKAEKSKKKKEEEEDEEDEQEEENEEDDDK

SEQ ID NO: 49143 - protein, 39 aa, Homo sapiens
RIPFFCAVINNDNPLESNDEKEGQEATCSRPQIVPEPMD

SEQ ID NO: 49144 - protein, 96 aa, Homo sapiens
MPGYDEFLLGLGHSTFELENGFSFFISTSSHRTRELNLGFQWLCKLLPLGLSFITGQPGRASPFQHPPIFTWTSNLFAGLCWLSLLSTLFICLLAS

SEQ ID NO: 49145 - protein, 291 aa, Homo sapiens
  DOMAIN (119)..(291): Ribosome recycling factor domain identified by PFam, accession name RRF, E-value=0.018, PFam score of -40.7
  misc_feature (1)...(291): Xaa = X or * as defined in Table 2
EVLEPRLGVFSNGCFQGLSSVMALGLKCFRMVHPTFRNYLAASIRPVSEVTLKTVHERQHGHRQYMAYSAVPVRHFATKKAKAKGKGQSQTRVNINAALVEDIINLEEVNEEMKSVIEALQGXFQXGLSIXGPHQDPIDKIAVVTAXREALLXTRFSQISMKSPQLNFGXIWASFPECTAAAIKAIRESGMNLNPEVEGTLIRVPHSPKXPESTEKCWVKLGQTEHQQGPKTLLREGFRTQLNEQAGRNPKDNSLQEDTIRLTEKQISQMADDTVAELYRHLAVKTKELLG

SEQ ID NO: 49146 - protein, 129 aa, Homo sapiens
  DOMAIN (69)..(117): L-lactate dehydrogenase proteins domain identified by eMATRIX, accession number BL00064B, p-value=1.000e-40, raw score of 23.57
  DOMAIN (68)..(129): lactate/malate dehydrogenase domain identified by PFam, accession name ldh, E-value=3.3e-27, PFam score of 98.0
DSGSHCHAPPTTARRAFPIPFGSKSNMATLKDQLIYNLLKEEHTPQNKITAVRVGADGMACAITILMKDYNVTANSKLVIITGGARQQQGESRLNLVQRNVNIFKFIIPNVAKYSPNCKLLIRSNPVDI

SEQ ID NO: 49147 - protein, 69 aa, Homo sapiens
MDHTVVLQLAEKNGYVTVSEIKASLKWETERARQVLEHLLKEGLAWLDLQAPGEAHYWLPALFTDLYSQ

SEQ ID NO: 49148 - protein, 390 aa, Homo sapiens
  DOMAIN (56)..(81): L-LACTATE DEHYDROGENASE SIGNATURE domain identified by eMATRIX, accession number PR00086A, p-value=4.000e-26, raw score of 16.12
  DOMAIN (57)..(370): lactate/malate dehydrogenase domain identified by PFam, accession name ldh, E-value=5.9e-41, PFam score of 145.9
  misc_feature (1)...(390): Xaa = X or * as defined in Table 2
ARRPTRPPDLIATRPRRPARRCISRFPFGSKSNYWQPLKDQLIYNLLKEEQTPQNKITVVGVGAVGMACAISILMKDLADELALVDVIEDKLKGEMMDLQHGKPFSFRNTKVLSSGKRLXMXLANSKAGSFITGWGHRQQEGKKAVLILVQAVNVNIFKFIIPNVVKYSPNCKLLIVSNPVDILTYVAWKISGFPKNRVIGSGCNLDSARFRYLMGERLGSSPHXACHGWGPWGEHGRFPVLPVMGVGLNVAGVSLEDFWHPDFRTDKDXEQWKEVHKQVVESAYEVIKLKGYTSLGLIGLSCKPDLAESIMEESFRRVHPSSSHHGLKGLYGNKRMNVSLSVPCILGQNGISDLVKGTLTSEGRGPVGSKSADNNSWGSTKKLPILKSS

SEQ ID NO: 49149 - protein, 88 aa, Homo sapiens
EEGGETEAQKEGSEDVGNLPEAQEKNEEEGETATEEKMEAMKQHFKCLSTNQTQQNTLLEAGTPRVTEDLCCLTWLDVHGGISRIIQN

SEQ ID NO: 49150 - protein, 244 aa, Homo sapiens
GEEPKMPLLLLGETEPLKLERDCRSPVDPWAAASPDLALACLCHCQDLSSGAFPNRGVLGGVLFPTVEMVIKVFVATSSGSIAIRKKQQEVVGFLEANKIDFKELDIAGDEDNRRWMRENVPGEKKPQNGIPLPPQIFNEEQYCGDFDSFFSAKEENIIYSFLGLAPPPDSKGSEKAEEGGETEAQKEGSEDVGNLPEAQEKNEEEGETATEETEEIAMEGAEGEAEEEEETAEGEEPGEDEDS

SEQ ID NO: 49151 - protein, 326 aa, Homo sapiens
  misc_feature (1)...(326): Xaa = X or * as defined in Table 2
GKGPVAAFIDQSNIFLTDPKIFLGQWREEPKMPLLLLGETEPLKLERDCRSPVDPWAAASPDLALACLCHCQDLSSGAFPNRGVLGGVLFPTVEMVIKVFVATSSGSIAIRKKQQEVVGFLEANKIDFKELDIAGDEDNRRWMRENVSXREKPQNGIPLPSQIFNEEQYCGDFDSFFSAKKENIIYSFLGWAPLPDSKGSEKAEEGGETEAQKEGSEDVGNLPEAQEKNEEEGETATEETEEIAMEGAEGEAEEEEETAEGEEEPGEDEDFLGLFMLHFFHFSQKMEAMKQHSNVLSTNQTETEYFGLKPAHPRVTEDIMLPDLIR

SEQ ID NO: 49152 - protein, 142 aa, Homo sapiens
LYFRRRKFQLCADLCTQMLEKSPYDQAAWILKARALTEMVYIDEIDVDQEGIAEMMLDENAIAQVPRPGTSLKLPGTNQTGGPSQAVRPITQAGRPITGFLRPSTQSGRPGTMEQAIRTPRTAYTARPITSSSGRFVRLGTA

SEQ ID NO: 49153 - protein, 207 aa, Homo sapiens
  misc_feature (1)...(207): Xaa = X or * as defined in Table 2
QAAWILKARALTEMVYIDEIDVDQEGIAEMMLDENAIAQVPRPGTSLKLPGTNQTGGPSQAVRPTSHSEKPITGFLRPSTQSGRPGTMEQAIRTPRTAYTARPITSSSGRFVRLGTASMLTSPDGPFINXSRLNLTKYSQKPKMAKALPEYIFHHENDVKTALELAALSTEHSQYKDWWWKVQIEKRYYRLGMYREAEKQLISAMKQ

SEQ ID NO: 49154 - protein, 550 aa, Homo sapiens
  DOMAIN (292)..(464): TPR Domain domain identified by PFam, accession name TPR, E- value=2.5e-17, PFam score of 71.0
  misc_feature (1)...(550): Xaa = X or * as defined in Table 2
MKAEICKSRTVKDWHNHQKLGEGNKTDSPPQPSEGTNTANTLILDFWPLEMIACCWETFPQRLTAELFMNPTHRWHGYKNQSVGALRAPLGQGPSRRGLPGRVGRRQLFTPRPPLSWSAGPSLAAPAAMSSEMEPLLLAWSYFRRRKFQLCADLCTQMLEKSPYDQEPDPELPVHQAAWILKARALTEMVYIDEIDVDQEGIAEMMLDENAIAPSSTPITQAGRPITGFLRPSTQSGRPGTMEQAIRTPRTAYTARPITSSSGRFVRLGRLGMYREAEKQFKSALKQQEMVDTFLYLAKVYVSLDQPVTALNLFKQGLDKFPGEVTLLCGIARIYEEMNNMSSAAEYYKEVLKQDNTHVEAIACIGSNHFYSDQPEIALRFYRRLLQMGIYNGQLFNNLGLCCFYAQQYDMTLTSFERALSLAENEEEAADVWYNLGHVAVGIGDTNLAHQCLRLAVVNSNNHAEAYNNLAVLGDAEGRHVEQARALLQTASSISTPYVXTAFLILQQSLIRFGDLQRSYVAAQKSEAAFPDHVDTQHLIKQLRQHFAML

SEQ ID NO: 49155 - protein, 98 aa, Homo sapiens
SKLSALTAVVPDIPGFRKILPRSDYIIIPKSSLQEDRSCPQLELCVAQNQMSPKGPPLVSNTAPETVPSHAGMAEQCLAVEALAEEVGESLSVVTVMK

SEQ ID NO: 49156 - protein, 1484 aa, Homo sapiens
  DOMAIN (232)..(271): TRANSCRIPTION PROTEIN DNA-BINDIN domain identified by eMATRIX, accession number PD02448A, p-value=4.000e-09, raw score of 9.37
  DOMAIN (227)..(295): HMG (high mobility group) box domain identified by PFam, accession name HMG_box, E-value=1.4e-06, PFam score of 34.3
  misc_feature (1)...(1484): Xaa = X or * as defined in Table 2
MLGLGLLRLRQGSHAVTRCRPLPVRREGRRDGSPWRSVVCRYCRCSRQTGASVTTVSLPSSSSSPGLDPRGPRQASVKKPAEANPVLRPLVRHGTPYRDSEEGKREGLSRLRAVCRRAGPRGRGSFSPRDARASPRLHFLVAAVTTGAASRRQRGARVRQPSPSSSRRAKRLRECERRSLHAPPAMDASYDGTEVTVVMEEIEEAYCYTSPGPPKKKKKYKIHGEKTKKPRSAYLLYYYDIYLKVQQELPHLPQSEINKKISESWRLLSVAERSYYLEKAKLEKEGLDPNSKLSALTAVVPDIPGFRKILPRSDYIIIPKSSLQEDRSCPQLELCVAQNQMSPKGPPLVSNTAPETVPSHAGMAEQCLAVEALAEEVGALTQSGAVQEIATSEILSQDVLLEDASLEVGESHQPYQTSLVIEETLVNGSPDLPTGSLAVPHPQVGESVSVVTVMRDSSESSSSAPATQFIMLPLPAYSVVENPTSIKLTTTYTRRGHGTCTSPGCSFTYVTRHKPPKCPTCGNFLGGKWIPKEKPAKVKVELASGVSSKGSVVKRNQQPVTTEQNSSKENASKLTLENSEAVSQLLNVAPPREVGEESEWEEVIISDAHVLVKEAPGNCGTAVTKTPVVKSGVQPEVTLGTTDNDSPGADVPTPSEGTSTSSPLPAPKKPTGVDLLTPGSRAPELKGRARGKPSLLAAARPMRAILPAPVNVGRGSSMGLPRARQAFSLSDKTPSVRTCGLKPSTLKQLGQPIQQPSGPGEVKLPSGPSNRTSQVKVVEVKPDMFPPYKYSCTVTLDLGLATSRGRGKCKNPSCSYVYTNRHKPRICPSCGVNLAKDRTEKTTKAIEVSSPLPDVLNATEPLSTAQREIQRQSTLQLLRKVLQIPENESELAEVFALIHELNSSRLILSNVSEETVTIEQTSWSNYYESPSTQCLLCSSPLFKGGQNSLAGPQECWLLTASRLQTVTAQVKMCLNPHCLALHSFIDIYTGLFNVGNKLLVSLDLLFAIRNQIKLGEDPRVSINVVLKSVQEQTEKTLTSEELSQLQELLCNGYWAFECLTVRDYNDMICGICGVAPKVEMAQRSEENVLALKSVEFTWPEFLGSNEVNVEDFWATMETEVIEQVAFPASIPITKFDASVIAPFFPPLMRGAVVVNTEKDKNLDVQPVPGSGSALVRLLQEGTCKLDEIGSYSEEKLQHLLRQCGIPFGAEDSKDQLCFSLLGLYESVQNGARSYTGPPRHFTGGKIYKVCPHQVVCGSKYLVRGESARDHVDLLASSRHWPPVYVVDMATSVALCADLCYPELTNQMWGEEPGAVFFSPTEPPVSVSCPELLDQHYTVDMTETEYSIQHPVTKTATRRIRPWQALQPNPGVTPVVGEQFLWALLPXNWAPYATILASIVDSKPNGVRQRPIAFDNATHYYLYNRLMDFLTSREIVNRSRSMDIVQSCQPGEVVILDTLYRLGVAQIKTETEEEGEEEEVAAVAE

SEQ ID NO: 49157 - protein, 236 aa, Homo sapiens
  misc_feature (1)...(236): Xaa = X or * as defined in Table 2
QRRSGCVLRMTEWETAAPAGGQRTPDIKALWGSGAPDDVARSMNISLQDYIASXRRKLCPSYLPHSCQGGYAAKNLSRKAQCPIVERLTNSPMMMHRPQQPARKLMTVRIVQAHAFEIITPCSQAENPLQVLGEPPSINSGPREDSHTHLGAAGTVRRQAVDVSPLRRVEPGPFWVACCTRRLVKGLAFPGTFKTIGXVAWADELINACQGAPSNSYCLXEEGRVAFLEHVAKSNR

SEQ ID NO: 49158 - protein, 121 aa, Homo sapiens
  DOMAIN (28)..(66): G-patch domain identified by PFam, accession name G-patch, E- value=0.062, PFam score of 12.8
DTHFKDSHHRTSTAHLLSLSQGPSPPNLPLGVPISGMGLGPRGEGRANPIPTVLKRDQEGLGYRSAPQPRVTHFPAWDTRAVAGRERPPRVATLSWREERRREEKDRAWERDLRTYMNLEF

SEQ ID NO: 49159 - protein, 75 aa, Homo sapiens
GERKRKLRNGIAEDLKGQADFFFLLQVSEAVVATGSPRAWLTCLILPLPGIIFSVLPKAMSRPLLITFTPATDPS

SEQ ID NO: 49160 - protein, 129 aa, Homo sapiens
ALQSPKLWGYFSGRKVFLNYFFSSQQVSEAVVATGSPRAWLTCLILPLPGIIFSVLPKAMSRPLLITFTPATDPSDLWKDGQQQPQPEKPESTLDGLAAKLFYEALIGDESSAPDSQRSQTEPARERKR

SEQ ID NO: 49161 - protein, 432 aa, Homo sapiens
  misc_feature (1)...(432): Xaa = X or * as defined in Table 2
GVTHLFLFGKRKLRNGIAGRIKGPGWIFFSYCRSLRLWLLTGSPLSLALPCLILPLPGIIFLKFSQKAIVPGPLLITFTPATDPSDLWKDGQQQPQPEKPESTLDGAAARAFYEALIGDESSAPDSQRSQTXTWPEERKRKKRGLLKAPAAEALAEGASGRPVQGRSLEADDPMTYRILTSAQEGDLPXLMRLLEPHEAGGAGGNINARDAFWWTPLMCAARAGQGAAVSYLLGPGAAWVGVCELSGRDAAQLAEEAGFPEVARMVRESHGETRSPENRSPTPSLQYCENCDTHFQDSNHRTSTVHLLSLSQGPQPPQLPLGVPISTPRFXILLLGGVGSPGMGLGPRGEGRANPHPQLILKXGPRKGLGYKISTPSPEVTHFPSFGIPRAVAGRERPPRVATLNWKEERRRREEKDRAWERDLRTYMNLEF

SEQ ID NO: 49162 - protein, 54 aa, Homo sapiens
  misc_feature (1)...(54): Xaa = X or * as defined in Table 2
MPGLANIMLVLDYLLIXXXXXXXXXXXXXXXLMFYRPWEKEFSAKYKNLKHSFL

SEQ ID NO: 49163 - protein, 679 aa, Homo sapiens
  DOMAIN (277)..(324): Poly-adenylate binding protein unique domain proteins. domain identified by eMATRIX, accession number PF00658B, p-value=1.000e- 40, raw score of 28.57
  DOMAIN (27)..(396): RNA recognition motif. domain identified by PFam, accession name rrm, E-value=8.3e-55, PFam score of 195.5
  misc_feature (1)...(679): Xaa = X or * as defined in Table 2
ERSRPVALRAAVPRMNPSTPSYPTASLYVGDLHPDVTEAMLYEKFSPAGPILSIRICRDLITSGSSNYAYVNFQHTKDAEHALDTMNFDVIKGKPVRIMWSQRDPSLRKSGVGNIFVKNLDKSINNKALYDTVSAFGNTLSCKVVCDENGSKGYGFVHFETHEAAERAIEKMNGMLLNDRKVFVGRFKSRKEREAELGARAKEFTNVYIKNFGEDMDDGRLKDLFGKFGPALKCEKLMTDESGKSKGFGFVSFERHEDAQKAVDEMNGKELNGKQIYVGRAQKKVERQTELKRKFEQMKQDRITRYQGVNLYVKNLDDGIDDERLRKEFSPFGTIQLVPKVMDGGLVAAKGLGFVCFSSPEEATKAVTEMNFRIVATEPLYVALAQRKEERQAHLTNQYYGRGMASVTEAVPNPVIQPLPGQAPPFRFTFMGRFSHRFRNRAAYYPPSQIAQTKTKFLRWTGQGARTHPFQNMPGCYPAQLAPRPPIXGTMRPASSQVPRVMPTQRVANTSNTDKWVPRSCSLQAAAAYVLRPAPFPQYKYAAGVRNSQQHLNAQPQVTMQQPCCSMVPRVQGTLWTCLPMVGHLPPPSRSKSQMLGWNGLFPSYSKPMHPYSLLVKSLGMLLEIDNSELLHMLESPESLPFXRVDEAVAGTTSPPQAKRGLAQKAGXQVPTGVPNCLK

SEQ ID NO: 49164 - protein, 323 aa, Homo sapiens
  DOMAIN (101)..(152): Triosephosphate isomerase proteins domain identified by eMATRIX, accession number BL00171B, p-value=1.000e-40, raw score of 26.59
  DOMAIN (42)..(318): Triosephosphate isomerase domain identified by PFam, accession name TIM, E-value=1.2e-50, PFam score of 158.8
  misc_feature (1)...(323): Xaa = X or * as defined in Table 2
MAEDGEEAEFHFAALYISGQWPRLRADTDLQRLGSSAMAPSRKFFVGGNWKMNGRKRRLGELIGTLNAAKVPADTEVVCAPPTAYIDFARQKLDPKIAVAAQNCYKITNGAFTGEISPGMIKDCGQPWVVLGHSERRHVFGESDELIGQKVAHALAEGLGVIRLHLGRSXDERGSLGITEKVVFEQTKVIRRXTXKDWKQVVVLGLMSPVWGLWLLARLATPQQAQEVHRRSSRGWLKSNVSDAVASEPPVTIYGGSVTGATLQRSLAKPSPDVDGLPLWGGASLQARNSWDIIQCHNNEPPSHLSLPLRCQAQGLKQTQKPK

SEQ ID NO: 49165 - protein, 141 aa, Homo sapiens
TGPTHASAAILVPRSLHKMPGEATETVPATEQELPQPQAETGSGTESDSGKSPASDTYIVFGEAKIEDLSQQAQLAAAEKFKVQGEAVSNIQENTQTPTVQEESEEEEVDETGVEVKDIELVMSQANVSRAKAVRALKNNS

SEQ ID NO: 49166 - protein, 120 aa, Homo sapiens
MPGEATETVPATEHELPQPQAETGSGTESDSDESVPELEEQDSTQATTQQAQLAAAAEIDEEPLPNPVLGSISIIDTPGILSGEKQRISRGYDFAAVLEWFAERVDRIILLFDAHKLDIS

SEQ ID NO: 49167 - protein, 153 aa, Homo sapiens
  DOMAIN (114)..(153): TS-N domain identified by PFam, accession name TS-N, E-value= 3.9e-14, PFam score of 60.4
  misc_feature (1)...(153): Xaa = X or * as defined in Table 2
QLGPHGHRQGPGGPAVPHPRGLVPLPPALLPSGPRRGRTQAPRHSGPALXGHPASDTYIVFGEAKIEDLSQQAQLAAAEKFKVQGEAVSNIQDNTQTPTVQEESEEEEVDETGVEVKDIELVMSQANVSRAKAVRALKNNSNDIVNAIMELTM

SEQ ID NO: 49168 - protein, 141 aa, Homo sapiens
  DOMAIN (97)..(136): TS-N domain identified by PFam, accession name TS-N, E-value= 2.2e-09, PFam score of 44.6
RSLCQTGLRQVTGVTKVTIGNLENLFVITKPDVYKSPASDTYIVFGEAKIEDLSQQAQLAAAEKFKVQGEAVSNIQENTQTPTVQEESEEEEVDETGVEVKDIELVMSQANVSRAKAVRALKNNSNDIVNAIMVSVQAFVP

SEQ ID NO: 49169 - protein, 35 aa, Homo sapiens
  misc_feature (1)...(35): Xaa = X or * as defined in Table 2
MNQYQSLEEQDSHPGQPHNKAQAGRQQSEIDEEPX

SEQ ID NO: 49170 - protein, 43 aa, Homo sapiens
KHYLHVHFCTHLVNLEPGTFTIDSPNPFMAATLRILERCRVFF

SEQ ID NO: 49171 - protein, 48 aa, Homo sapiens
  misc_feature (1)...(48): Xaa = X or * as defined in Table 2
SKLDYKSSKRHRKPVSFNFITSFQIWDXFLFFFXLKCQLQPRVFSQPN

SEQ ID NO: 49172 - protein, 201 aa, Homo sapiens
  DOMAIN (66)..(115): PROTEIN RIBOSOMAL 60S L22 RNA-BINDING HEP domain identified by eMATRIX, accession number PD02785A, p-value=1.000e-40, raw score of 15.23
  DOMAIN (65)..(194): Ribosomal L22e protein family domain identified by PFam, accession name Ribosomal_L22e, E-value=1.2e-20, PFam score of 82.0
  misc_feature (1)...(201): Xaa = X or * as defined in Table 2
PFLPEAHLGNQKCQNCNSTSGICRVSVKVCPGPWVHAKLCAPTLMSRDVTLPDAPVKKPCGEGGAKKKKQVLKFTLDCTHPVEDGIMDAAQFXASFCKERIKVNGKAGNLGGGVVDPSKGARGKITVTSEVPFSKRVFXKYLTPKKYLKKNNLRXPGLPRSLPNQPKEKLPNFRYFQINQGRRKEGGRRGFKFPLSGKILL

SEQ ID NO: 49173 - protein, 136 aa, Homo sapiens
  DOMAIN (53)..(108): Ribosomal protein L36e proteins domain identified by eMATRIX, accession number BL01190B, p-value=1.000e-40, raw score of 16.17
  DOMAIN (18)..(126): Ribosomal protein L36e domain identified by PFam, accession name Ribosomal_L36e, E-value=5.1e-34, PFam score of 126.4
  misc_feature (1)...(136): Xaa = X or * as defined in Table 2
AGTHLPPFLPVAVRQPMALRYPIAVGLKQGPTKVTQEPXASPRHHVRRGRLTKHTKFVRDMIREVCGFSPYERRAMELLKVSKDKRALKFIKKRVGTHIRAKRKREELEQQYWPAIEEKLACQERLEPLPLPSPLK

SEQ ID NO: 49174 - protein, 142 aa, Homo sapiens
  DOMAIN (26)..(42): COLD SHOCK PROTEIN SIGNATURE domain identified by eMATRIX, accession number PR00050A, p-value=2.800e-21, raw score of 11.28
  DOMAIN (23)..(63): 'Cold-shock' DNA-binding domain identified by PFam, accession name CSD, E-value=3.7e-16, PFam score of 62.6
EFGPGGLTSAAPAGGDKKVIATKVLGTVKWFNVRNGYGFINRNDTKEDVFVHQGAEAANVTGPGGVPVQGSKYAADRNHYRRYPRRRGPPRNYQQNYQNSESGEKNEGSESAPEGQAQQRRPYRRRRFPPYYMRRPYGRRPQ

SEQ ID NO: 49175 - protein, 375 aa, Homo sapiens
  DOMAIN (131)..(170): 'Cold-shock' DNA-binding domain proteins domain identified by eMATRIX, accession number BL00352B, p-value=1.711e-24, raw score of 23.66
  DOMAIN (104)..(178): 'Cold-shock' DNA-binding domain identified by PFam, accession name CSD, E-value=6.7e-23, PFam score of 86.4
  misc_feature (1)...(375): Xaa = X or * as defined in Table 2
TWGPPARRLPSGSHVPSAASSRLPSHPREEPQLPQPAPVTITATMSSEAETQQPPAAPPGAPALSAADTKPGTTGSGAGSGGPGGLTSAAPAGGDKKVIATKVLGTVKWFNVRNGYGFINRNDTKEDVFVHQTAIKKNNPQKYLRSVGDGETVEFDVVEGEKGAEAANVTGPGGVPVQGSKYAADRNHYRRYPRRRGPPRHYPQNYQNSESGEKNRGIGRVLPEGQAQQRRPYRRRRFPPYYMRRPYGRRPQYSNPPVQGEVMEGADNQGAGEQGRPVRQNMYRGYRPRFRRGPPRQKTAXERAAMEEDKENQGVWDPRFGSPPQRRYRRNFNYRRRRPQKTPKPQDGQKRPKAAGSHPAXEFVPLPEAEQGGAE

SEQ ID NO: 49176 - protein, 217 aa, Homo sapiens
  DOMAIN (189)..(210): Glyceraldehyde 3-phosphate dehydrogenase proteins domain identified by eMATRIX, accession number BL00071E, p-value=9.100e- 18, raw score of 11.48
  DOMAIN (3)..(217): glyceraldehyde 3-phosphate dehydrogenases domain identified by PFam, accession name gpdh, E-value=1.8e-86, PFam score of 291.5
MTAFNSGKVDIVAINDPFIDLNYMVYMFLYDSTHGKFHGTVKAENGTLVINGNPITIFQDQDPSKIKWAPLAKVIHDNFGIIEGFMTTVHTITATQTINGPSGNCHVMAAGLSRTSSLSLLALAKPVGKVIPELNGKLTGMAFHVPTANVSVADLTCRLEKPAKYDDIKKNTHSSTFDAGAAIVLKDHSVKLISWYDNEFGYSNRVVHLMAHNASKE

SEQ ID NO: 49177 - protein, 1754 aa, Homo sapiens
  DOMAIN (847)..(874): Anaphylatoxin domain proteins domain identified by eMATRIX, accession number BL01177E, p-value=3.057e-22, raw score of 20.64
  DOMAIN (25)..(647): Alpha-2-macroglobulin family N-terminal regi domain identified by PFam, accession name A2M_N, E-value=0, PFam score of 1072.6
TRSAPRAASWLEDPREVRSVCLSATFFTLSLQKPRLLLFSPSVVHLGVPLSVGVQLQDVPRGQVVKGSVFLRNPSRNNVPCSPKVDFTLSSERDFALLSLQVPLKDAKSCGLHQLLRGPEVQLVAHSPWLKDSLSRTTNIQGINLLFSSRRGHLFLQTDQPIYNPGQRVRYRVFALDQKMRPSTDTITVMVENSHGLRVRKKEVYMPSSIFQDDFVIPDISEPGTWKISARFSDGLESNSSTQFEVKKYVLPNFEVKITPGKPYILTVPGHLDEMQLDIQARYIYGKPVQGVAYVRFGLLDEDGKKTFFRGLESQTKLVNGQSHISLSKAEFQDALEKLNMGITDLQGLRLYVAAAIIESPGGEMEEAELTSWYFVSSPFSLDLSKTKRHLVPGAPFLLQALVREMSGSPASGIPVKVSATVSSPGSVPEAQDIQQNTDGSGQVSIPIIIPQTISELQLSVSAGSPHPAIARLTVAAPPSGGPGFLSIERPDSRPPRVGDTLNLNLRAVGSGATFSHYYYMILSRGQIVFMNREPKRTLTSVSVFVDHHLAPSFYFVAFYYHGDHPVANSLRVDVQAGACEGKLELSVDGAKQYRNGESVKLHLETDSLALVALGALDTALYAAGSKSHKPLNMGKVFEAMNSYDLGCGPGGGDSALQVFQAAGLAFSDGDQWTLSRKRLSCPKEKTTRKKRNVNFQKAINEKLGQYASPTAKRCCQDGVTRLPMMRSCEQRAARVQQPDCREPFLSCCQFAESLRKKSRDKGQAGLQRALEILQEEDLIDEDDIPVRSFFPENWLWRVETVDRFQILTLWLPDSLTTWEIHGLSLSKTKGLCVATPVQLRVFREFHLHLRLPMSVRRFEQLELRPVLYNYLDKNLTVSVHVSPVEGLCLAGGGGLAQQVLVPAGSARPVAFSVVPTAAAAVSLKVVARGSFEFPVGDAVSKVLQIEKEGAIHREELVYELNPLDHRGRTLEIPGNSDPNMIPDGDFNSYVRVTASDPLDTLGSEGALSPGGVASLLRLPRGCGEQTMIYLAPTLAASRYLDKTEQWSTLPPETKDHAVDLIQKGYMRIQQFRKADGSYAAWLSRDSSTWLTAFVLKVLSLAQEQVGGSPEKLQETSNWLLSQQQADGSFQDPCPVLDRSMQGGLVGNDETVALTAFVTIALHHGLAVFQDEGAEPLKQRVEASISKANSFLGEKASAGLLGAHAAAITAYALSLTKAPVDLLGVAHNNLMAMAQETGDNLYWGSVTGSQSNAVSPTPAPRNPSDPMPQAPALWIETTAYALLHLLLHEGKAEMADQASAWLTRQGSFQGGFRSTQDTVIALDALSAYWIASHTTEERGLNVTLSSTGRNGFKSHALQLNNRQIRGLEEELQFSLGSKINVKVGGNSKGTLKVLRTYNVLDMKNTTCQDLQIEVTVKGHVEYTMEANEDYEYDELPAKDDPDAPLQPVTPLQLFEGRRNRRRREAPKVVEEQESRVHYTVCIWRNGKVGLSGMAIADVTLLSGFHALRADLEKLTSLSDRYVSHFETEGPHVLLYFDSVPTSRECVGFEAVQEVPVGLVQPASATLYDYYNPERRCSVFYGAPSKSRLLATLCSAEVCQCAEGKCPRQRRALERGLQDEDGYRMKFACYYPRVEYGFQVKVLREDSRAAFRLFETKITQVLHFTKDVKAAANQMRNFLVRASCRLRLEPGKEYLIMGLDGATYDLEGHPQYLLDSNSWIEEMPSERLCRSTRQRAACAQLNDFLQEYGTQGCQV

SEQ ID NO: 49178 - protein, 482 aa, Homo sapiens
  DOMAIN (366)..(387): Glyceraldehyde 3-phosphate dehydrogenase proteins domain identified by eMATRIX, accession number BL00071E, p-value=4.600e- 24, raw score of 11.48
  DOMAIN (50)..(419): glyceraldehyde 3-phosphate dehydrogenases domain identified by PFam, accession name gpdh, E-value=2.3e-74, PFam score of 251.1
  misc_feature (1)...(482): Xaa = X or * as defined in Table 2
PRSAPRAASWLEDPREVRSVCLSAPPVRQSAAIFFCVASRATSLRTPMGKVKVGVNGFGRIGHLVTRAAFNSGKVDIVAINDPFIDLNYMVYMFQYDSTHGKFHGTVKAENGKLVINGNPITIFQERDPSKIKWGDAGAEYVVESTGVFNQPWRKAGAHLQGGAKRVIISAPSGXMPPMFVMGVNHEEVXQTAFKIISNASCTNQLAXQPLAKGXFHDNFGXSWEGLMTTVPWPSLGNPRKTVDGPSRGNCGPWMGRGGFSRNIFLCLYWALPRAVGKGHPXAXTGKLTGMAFPVSPTANVVSGWTLTCRFRKNLPKYDDIKEGWXKQAFGGAPSKGIPGLQLSHQVVSSDFNSDTHSFHPFDAGAGIALNDHFVKLISWYDNEFGYSNRVVDLIGPHGLQGSKTPWTTEPQARSKKGKERPSLLGSPCHTQTPTTLNLPSSQLPCRPLEEGRGLWEPHLVMYPSNKVSLCSTKKKKKKKKP

SEQ ID NO: 49179 - protein, 121 aa, Homo sapiens
STVINIHSETSVPDHVVLVPVQHPLLERCCLGFIAFAYSVKSRDRKMVGDVTGAQALCLHRQVPEHLGPDSGHPHDHWIHPVTGIRLCDSLPYYVTDNTGKTGLLVAAHSLQPLHSTVQCW

SEQ ID NO: 49180 - protein, 217 aa, Homo sapiens
  misc_feature (1)...(217): Xaa = X or * as defined in Table 2
PDRRWSSLGHHESHCPNHSSLLSTVASPPNYEDAQGRXSREVAVLGAPHNPAPPTSTVIHIRQSRPPWPDHVVWSRVQHPLQXTPACLGFIAFAYSVKSRGQGRWLGDVTGAQGLMPPPAKVPETIWGPDFWGILNDHFVHRHPQWLIFPGHGIDQGRHHWRPGALPIVTCIPRLLPTSIPRPAPRSPKSCISPYILTRFSTMAFNKSARVSGKKKK

SEQ ID NO: 49181 - protein, 294 aa, Homo sapiens
  misc_feature (1)...(294): Xaa = X or * as defined in Table 2
SNLILRNLFCPHLALASSAFDKCQEEETVEKTELLAERRGLTENHPGNPITAGHHEPHCANLLSCQQRPRLPNYEMLKEEQEVAMLGAPQKPCLPECPPVIHYPQARPPWPDHVRLGPCFNNPLQXTTCCPGLSLGISAYFRGSFRGTGKMVGDVEPGPQGLMPPTAQVAPXTSGAPDFLGSLHEPILAHQSSPPKCWVVPGPAIDQEASLRPGALPVTCIPRTLSSIPSPLPPEARELLPFDLYSTYSTFHSSPCPHSRVLHQPFILTRFSTMAFNKVYMFLVKKKKKKKKKV

SEQ ID NO: 49182 - protein, 176 aa, Homo sapiens
  DOMAIN (145)..(164): GLYCERALDEHYDE-3-PHOSPHATE DEHYDROGENASE SIGNATURE domain identified by eMATRIX, accession number PR00078B, p-value=4.349e- 17, raw score of 7.45
  DOMAIN (10)..(171): glyceraldehyde 3-phosphate dehydrogenases domain identified by PFam, accession name gpdh, E-value=2.8e-47, PFam score of 160.5
  misc_feature (1)...(176): Xaa = X or * as defined in Table 2
VSESTDLVSIGRLVTRAAFNSGKVDIVAINDPFIDLNYMVYMFQYDSTHGKFHGTVKAENGKLVINGNPITIFQERDPSKIKWGDAGAEYVVESTLGVFTTMEKAGGSFCRGGAKRVIHLLPPLAXCPPCFVMGVNHEKDDNTLKIISNASCTTNCLAPLASTGAAKGCGQGHPEA

SEQ ID NO: 49183 - protein, 103 aa, Homo sapiens
QRAGSPHSPRLLSPPPLPGLLLWRHLRSPSAHRCTVGAPFWAGQGRVGVGLAGPALGAAGQPKPPTHSKGSCAARASSTSTTPCSTAPSPIDHPRAEECKRTV

SEQ ID NO: 49184 - protein, 93 aa, Homo sapiens
VLQLLRWRVWSCLFHPGGLVVLLGSGVKLQIFAPLGGRWDWAPWSRGWCSSGRLGPHRSPWSGWEAQAWRAAGPQPCPAGRQLRPGEKSSSAP

SEQ ID NO: 49185 - protein, 61 aa, Homo sapiens
QRAGSPHSPRSLSEPLLPGLPLWRHLRSPSVHHCTVGAPFWAGQGRSPLPQRRCALFLAGP

SEQ ID NO: 49186 - protein, 110 aa, Homo sapiens
GVTACWQSSQPWLALGASSAWAPTLAALEEPFSPPLHCGSPFLGWPRPEPTPSAAPWAPVRPEPPRRVPPPAPGHPVPSTTQGLRSASTRRGTGGLAGSSTCSPGAGSTG

SEQ ID NO: 49187 - protein, 70 aa, Homo sapiens
  misc_feature (1)...(70): Xaa = X or * as defined in Table 2
RLLRVRGPPSPRPPGTPAGRQARHTAPVPARASPSTPPRKLKERAPALASPERGSHSAAEGXRAPQVPPK

SEQ ID NO: 49188 - protein, 266 aa, Homo sapiens
ITTPSPATEQNWMENEFDELTEVGFRRWVINSELQEDIQTKGKEVENFEKNLEECITRITNTEKCLKELMELKTKARELREECRSLRSRCDQLEERVSVMEDEMNEMKHEEKFREKRIKRNEQSLQEIWDYVKRQNLRLIGVPESDGENGTKLENTLQDIIQENFPNLARQANIQIQEIQRTPQRYPLRRATPRHIIVRFTKIEMKKKMLRAAREKASPTSATPCSTAPSPIDREGTNNPRAEECGRTAPGLAGSSIYLQPRCGTH

SEQ ID NO: 49189 - protein, 154 aa, Homo sapiens
  misc_feature (1)...(154): Xaa = X or * as defined in Table 2
VSCPFTVIIFCYNFCRGGFSTTAVMARAKSMFLMLKGKAGPDFGIRFTASSGWFTXFEDRYALHNVNMNAESVGADVKAAEDFGSLIMEEIYLPTQFFNMEEPSLFWKQMPERTFVICPKGFFPDHCNKERPWHFCKRKSLTDTRVATPCGRLS

SEQ ID NO: 49190 - protein, 59 aa, Homo sapiens
GWRTHLNMWNPNAVIVDKKMQKKMKKAHKKMHKHQKHHKYHKHGKHSSSSSSSSSSDSD

SEQ ID NO: 49191 - protein, 172 aa, Homo sapiens
  DOMAIN (71)..(86): WILM'S TUMOUR PROTEIN SIGNATURE domain identified by eMATRIX, accession number PR00049D, p-value=4.966e-09, raw score of 0.00
  misc_feature (1)...(172): Xaa = X or * as defined in Table 2
CILSKMLRSPQELARLPGGQRQLTRWXQRWPLWTIALVLVLWRVKSGPXSXRVPSPSPPVEPWVTLNMAGAPHGNPAFPPGGPPHPVPQPGYPGCQPLGPYPPPYPPPAPGIPPVNPLAPGMVGPAVIVDKKMQKKMKKAHKKMHKHQKHHKYHKHDKHSSSSSSSSSSDSD

SEQ ID NO: 49192 - protein, 218 aa, Homo sapiens
  DOMAIN (80)..(101): 1 HERPESVIRUS GLYCOPROTEIN H domain identified by eMATRIX, accession number DM01803A, p-value=7.072e-09, raw score of 10.51
  misc_feature (1)...(218): Xaa = X or * as defined in Table 2
CEPLRISGRPTRPGERSKPRRRLERXWGWRTHLNMWNPNAGQPGPNPYPPNIGCPGGSNPAHPPPINPPFPPGPCPPPPGAPHGNPAFPTGGPPHPVPQPGYPGCQPLGPYPPPYPPPAPGIPPVNPLAPGMVGTKQLISRQEDCRRKLKKASXKRCHKAHQKHHKYHKHGKHFLLFPPPSFQAVISGLEYRALDPSLKSHQFCSPIKLQMPCCTGGM

SEQ ID NO: 49193 - protein, 137 aa, Homo sapiens
  DOMAIN (17)..(39): Armadillo/beta-catenin-like repeat proteins domain identified by eMATRIX, accession number PF00514D, p-value=6.538e-18, raw score of 19.10
  DOMAIN (1)..(116): Armadillo/beta-catenin-like repeats domain identified by PFam, accession name Armadillo_seg, E-value=3.7e-29, PFam score of 110.3
QTQVVIDAGALAVFPSLLTNPKTNIQKEATWTMSNITASRQDQIQQVVNHGLVPFLVSDLSKDFETQKEAVWAGGTVEQIVYLVHCGIIEPLMNLLPAKDTKIILVILDAISNIFQAAEKLGETEKLSIMIEECGGV

SEQ ID NO: 49194 - protein, 89 aa, Homo sapiens
  misc_feature (1)...(89): Xaa = X or * as defined in Table 2
VLGPHGLGDHLGQFHSCQSRAEPPIAGEDIHAGLDEPDCLTKDFLRIXLQLSTQLHAGQEEEDQNVVPETTSEGYTFQVQDGAPGTFNF

SEQ ID NO: 49195 - protein, 215 aa, Homo sapiens
  DOMAIN (115)..(137): Armadillo/beta-catenin-like repeat proteins domain identified by eMATRIX, accession number PF00514D, p-value=6.538e-18, raw score of 19.10
  DOMAIN (16)..(106): Importin beta binding domain identified by PFam, accession name IBB, E-value=9.7e-18, PFam score of 72.4
DIPAFSLCLITMSTNENANTQAAHLHRSKNKGKDSTETRRHRIEVNVELRKAKKDDQMLKRRNVSSFPDDATSPLQENCNNQTSALRAIGNIVTGTDEQTQVVIDAGALAVFPSLLTNPKTNIQKEATWTMSNITASRQDQIQQVVNHGLVPFLVSDLSKAAEKLGETEKLSIMIEECGGVDKIEALQNHENESVYKASLSLTEKYFSVEVSNGW

SEQ ID NO: 49196 - protein, 583 aa, Homo sapiens
  DOMAIN (170)..(208): Armadillo/beta-catenin-like repeat proteins domain identified by eMATRIX, accession number PF00514A, p-value=5.114e-19, raw score of 31.30
  DOMAIN (149)..(475): Armadillo/beta-catenin-like repeats domain identified by PFam, accession name Armadillo_seg, E-value=3e-34, PFam score of 127.2
  misc_feature (1)...(583): Xaa = X or * as defined in Table 2
TQSALQPLIPPASPSPWKAQARFGAFSLCLITMSTNENANTPACPVVHRFKNKGKDSTEMRRRRIEVNVELRKAKKDDQMLKRERLXAHFLDDATSPLQENRNNQGTLLNWSVDDIVKGINSSNVENQLQATQAARKLLSREKQPPIDNIIRAGLIPKFVSFLGRTDCSPIQFESAWALTNIASGTSGQTKAVVDGGAIPAFIFSGWASSHAHISEQAVWALGNIAGDGSVFRDLVIKYGAVDPLLALLASSXXCQSLACGYLRNLTWTLSNLCRNKNPAPPIDAVEQILPTLVRLLHHDDPGSVRQDTCWGYFPTLLDGSKWNGIGHGWVVKQGVVPQLVKLLGASELPIVTPALKSPXGNNWHLGTDEQTQVVDIDAGALAVFPSLLTNPKTNIQKEATWTMSNITAGRQDQIQQVVXNHGLVPFPLSVFLSKADFKTQKEAVWAVTNYTSGGTSXTELVYLVHCGIIEPLMNLFYCKRLPRIILLILDANFKISFQPAENLVDLEKPSINLEECGGLRPKLKALPKPMKMESVYKASVKAXFEKYFPCRGKEGRIKTVVPETTSEGYTFPSSRMGPPGTF

SEQ ID NO: 49197 - protein, 83 aa, Homo sapiens
  DOMAIN (16)..(62): Argininosuccinate synthase proteins domain identified by eMATRIX, accession number BL00564F, p-value=2.108e-21, raw score of 19.09
  DOMAIN (1)..(77): Arginosuccinate synthase domain identified by PFam, accession name Arginosuc_synth, E-value=2.9e-30, PFam score of 98.0
KVTNVKDGTTHQTSLELFMYLNEVAGKHGVGRIDIVENRFIGMKSRGMNVQGDYEPTDATGFININSLRLKEYHRFQSKVTVK

SEQ ID NO: 49198 - protein, 296 aa, Homo sapiens
  DOMAIN (52)..(89): Argininosuccinate synthase proteins domain identified by eMATRIX, accession number BL00564A, p-value=2.161e-31, raw score of 19.93
  DOMAIN (53)..(296): Arginosuccinate synthase domain identified by PFam, accession name Arginosuc_synth, E-value=1.9e-101, PFam score of 324.1
MPSEKRVLAAALVEVVLEKTLAQVVHCTVKTDSRCRELVPPIPDAMSSKGSVVLAYSGGLDTSCILVLLKEQGYDIIAYVANTGQKEDFEEARKKALKLGGKKVFIEEVSKEFVKEFIWLAIQSSALYEDHYLLGTSLTRPCIARKQVEIAQQERAKMPKFYNRFKVRNDLMEHTKQHGIPIPVTPKNLWNMDENLMQISNEAGILENPKNQAFPGVPMKVTNVKDGTTHQTSLELFLYLNEDVGKYSLGRIDIKENHFTGMKSPGIYETPADTIVYHAHLDIRAFTMDREVCKIK

SEQ ID NO: 49199 - protein, 385 aa, Homo sapiens
  DOMAIN (7)..(44): Argininosuccinate synthase proteins domain identified by eMATRIX, accession number BL00564A, p-value=1.231e-27, raw score of 19.93
  DOMAIN (8)..(333): Arginosuccinate synthase domain identified by PFam, accession name Arginosuc_synth, E-value=7.7e-145, PFam score of 461.9
MSSKGSMVLAYSGGLNTSCILVWLKEQGYDVTAYLANTGQKEDFEEARKKALKLGAKKVFIEDVSREFVEEFIWAAIQSSALYEDHYLLGTSLTRPCIAHKKVETVQRVGAKYEGPWRAPWRMPEFYNWFKGRSDLMEYAKQHGIPILVTPKNLWSIDKNLMHISYKAGILENPKNQVPPGLYTKIQDPAKAPNTPDILKIQFKKGVPVRVTSVKDGTTHQTSLELFMYLNEVAGKHGVGYIAIVENIFTRQRPSPECEFVRPCIAKSQEPAEGKVQVPVLKGQVYILGWESPLSLYNEELMSVNVQGDYEPIDDTGFININSLRLKEYHCLQSLLEFAGCRLQTLFAWVSPAGAAEQQRLLPVPSSGNFIPEGHLPDASWSSPV

SEQ ID NO: 49200 - protein, 332 aa, Homo sapiens
  DOMAIN (7)..(44): Argininosuccinate synthase proteins domain identified by eMATRIX, accession number BL00564A, p-value=1.000e-25, raw score of 19.93
  DOMAIN (8)..(248): Arginosuccinate synthase domain identified by PFam, accession name Arginosuc_synth, E-value=1.8e-45, PFam score of 146.3
  misc_feature (1)...(332): Xaa = X or * as defined in Table 2
MSSKGSVVLAYSGGLDTSCILVWLKEQGYDVIAYLGQAVKGNQLLPVSLVKRKTTPGAQYANRLSPRVGRFINAAGTTGFPTGKRAGNDQVRFELSCYSLAPQIKEMGSLKVRNELQEVSTVPMPASTQLPADTQCKLAELSAPVKKXTLGLSKTXQTQVMSSQSADSMPRAWYRNXLFTNPTVRRLGNSPVTGSSLPRLPGRGIYETPAGTILYHAHLDIEAFTMDREVRKIKQGLGLKFAELVYTGAECKLLVASVPEPWRGRGGVEEGGRDIKEVQEHGSDSAESSTHPPASRPGEGCLACIFCGKWRHLNTPLSCERYPRHSRDHRPH

SEQ ID NO: 49201 - protein, 238 aa, Homo sapiens
  DOMAIN (7)..(44): Argininosuccinate synthase proteins domain identified by eMATRIX, accession number BL00564A, p-value=1.462e-27, raw score of 19.93
  DOMAIN (8)..(237): Arginosuccinate synthase domain identified by PFam, accession name Arginosuc_synth, E-value=2.3e-114, PFam score of 365.1
  misc_feature (1)...(238): Xaa = X or * as defined in Table 2
MSSKGSLVLAYSGGLNTSCILVWLKEQGYDVTAYLANTGQKEDFEEARKKALKLGAKKVFIEDVSREFVEEFIWAAIQSSALYEDHYLLGTSLTRPCIAHKKVETVQRVGAKYEGPWRAPWRMPEFYNWFKGRSDLMEYAKQHGIPILVTPKNLWSIDKNLMHISYKAGILENPKNQVPPGLYTKIQDPAKAPNTPDILKIQFKKGVPVRVTSVKDGTTHQTSLELFMYLNEVAGKHX

SEQ ID NO: 49202 - protein, 487 aa, Homo sapiens
  DOMAIN (23)..(60): Argininosuccinate synthase proteins domain identified by eMATRIX, accession number BL00564A, p-value=2.800e-37, raw score of 19.93
  DOMAIN (24)..(272): Arginosuccinate synthase domain identified by PFam, accession name Arginosuc_synth, E-value=6.4e-68, PFam score of 217.6
  misc_feature (1)...(487): Xaa = X or * as defined in Table 2
KQIPDAGNSRLQSQTLLSSKGSVVLAYSGGLDTSCILVWLKEQGYDVIAYLANIGQKEDFEEARKKALKLGAKKVFIEDVSREFVEEFIWPAIQVQAHLYEDRYLPGHLSLPGPCIARKQVGNSPSGRGAKYVVPTGATGKGNEQVRFELSCYSLAPQIKVIAPWRMPEFYNRFKGRNDLMEYGKATLGFPIPVTPKNPWSMDENLMHISYEAGILENPKNQAPPGLYTKTQGPSQKPPTPLDILGDSSFKKGVPVEGGPTFKDGTTHQTFLELFMYLNEVAGKHGRRAVFDIVENRFIGNXSPRGILRRTPAGHHSFYHAHLDIRGLSPWDRGSCGKIKQGPGAWKFAELVYTGFPAQAPECEFCPPTGIAKVPRKPSGKGKVQVVRSFKGPQVYILSGREIPHCLLLTMRELVKHGTCKGDYWRPIDGHRGSSKHQIPFKAEGNYHRLPRAKVTCQIDPVYNEELGPPQFSGSPQVTGANCCDNL

SEQ ID NO: 49203 - protein, 184 aa, Homo sapiens
  DOMAIN (48)..(184): Glycine cleavage H-protein domain identified by PFam, accession name GCV_H, E-value=2.1e-24, PFam score of 94.5
  misc_feature (1)...(184): Xaa = X or * as defined in Table 2
GRARTPANMALRVVRSVRALLCSLRALWAPAVPCLPRPWQLGAGAIWTLLTGPVLLWVCKFTEKHEWITTENGIGTVGINNFANEALGDVVYCSLSEVGTKIXTKPSWSLVLLESVKAASELFSPLSGEVPDFNEALAENPGLVTKSRYEDGWLIKMTLSNPFRTXMHLMSEEAYEKYIKSIEE

SEQ ID NO: 49204 - protein, 34 aa, Homo sapiens
HERDKALQDYRKKLLEHKEIDGRLKECECTFLSI

SEQ ID NO: 49205 - protein, 281 aa, Homo sapiens; identical to SEQ ID NO: 35942
  DOMAIN (120)..(142): AAA-protein family proteins domain identified by eMATRIX, accession number BL00674B, p-value=5.235e-25, raw score of 4.46
  DOMAIN (123)..(249): ATPases associated with various cellular act domain identified by PFam, accession name AAA, E-value=3e-38, PFam score of 140.5

SEQ ID NO: 49206 - protein, 386 aa, Homo sapiens
  DOMAIN (206)..(249): AAA-protein family proteins domain identified by eMATRIX, accession number BL00674C, p-value=9.308e-35, raw score of 22.60
  DOMAIN (188)..(385): ATPases associated with various cellular act domain identified by PFam, accession name AAA, E-value=1.6e-66, PFam score of 234.4
  misc_feature (1)...(386): Xaa = X or * as defined in Table 2
LLIMADPRDKALQDYRKKLLEHKEIDGRIKELREQLKELTKQYEKSENDLKALQSVGQIVGEVLKQLTEEKFIVKATNGPRYVVGCRRQLXQKVSLKPGTRVALDMTTLTIMEDILPREVDPLVYNMSHEDPGDVSYSEIGGLSEQIRGIXGEVIGLPLYKPQSYFQRVGIIPPKGCLLYGPPGTGKNTLLARAVASQLDCNFLKVVSSSIVDKYIGESARLIREMFNYARDHQPCIIFMDEIDAIGGRRFSEGTSADREIQRTLMELLNQMDGFDTLHRVKMIMATNRPDTLGPALLRPGRLDRKIHIDLPNEQARLDILKIHAGPITKHGEIDFESNCXSFRMGFNGADLRNVCTXSQACSPIRADPXFCXYREDFMKAVRKVA

SEQ ID NO: 49207 - protein, 73 aa, Homo sapiens
  misc_feature (1)...(73): Xaa = X or * as defined in Table 2
VNMRDRFGQIMIENLRRRQCELAGVETCKSLESRIESLEFLDEMXLLEQLMRHYCLCWATKGGNELGLKEITY

SEQ ID NO: 49208 - protein, 215 aa, Homo sapiens; identical to SEQ ID NO: 45777

SEQ ID NO: 49209 - protein, 399 aa, Homo sapiens
  misc_feature (1)...(399): Xaa = X or * as defined in Table 2
AAPAEPGRALPSSVAFSLWLAPSPAARRPRFHVPGGAQLPGTVHARWPARQRESSITSCCSTSSCDADDEGVRGTCEDASLCKRFAVSIGYWHDPYIQDLVRLSKQRKAPEINRGYFARVHGCSVQLIKAFLRKTECHCSNCSNLGGQGMGSPPFWRLKDEDLSSQVNIFEVDFPMIVTRKLHSIKWLAFPLSSPILELHSEDTLQMASDCICDGHILDSKRYAVIGADLRDLSELEEKLKKCNMNTQLPTPXIAECVLVYMTPEQSANLLKWAANSFERAMFIYYQQVNMGDLFGQIMIENLRGRPVCDLAGVETCKSLESQKERLLSNGWENKHRPVRTXLEFVPPGLPSKLKXSRIESLEILDENWELLEQLIPHYCLCWATQRRKXSLGLKEITY

SEQ ID NO: 49210 - protein, 168 aa, Homo sapiens
  misc_feature (1)...(168): Xaa = X or * as defined in Table 2
TEANTLNXRGLQNMEARLAERKFMNPFNMPNLYQKLESDPRTRTLLSDPTYRELIEQLRNKPSDLGTKLQDPRIMTTLSVLLGVDLGSMDEEEEIATPPPPLPSSSMSLSPAPSCCLGCSPIVGFFFIWGSGHVMGRGGGSSSLRSQLSHVVYSASPSPIKQASWAWL

SEQ ID NO: 49211 - protein, 356 aa, Homo sapiens
  DOMAIN (109)..(142): TPR Domain domain identified by PFam, accession name TPR, E- value=3.7e-06, PFam score of 33.9
MGFRYVGQAALELLTSGEGAGLAGGPGMLGAVGSSFLASGSPLPSLPVLMTAYPAAGKSMLILSWADLMSGVQGTVRNVSSWSRPSVKRCKEQPWALRLDNAPPFLFVVKGYTRKAAALEAMKDYTKAMDVYQKALDLDSSCKEAADGYQRCMMAQYNRHDSPEDVKRRAMADPEVQQIMSDPAMRLILEQMQKDPQALSETLPPPGLPTLHAPTPVCSLERPLSCAELVADVPCSTEVHILGQGITELFCPNPEAYQGLPTLPPSTLSVAAAAAMAGMKTASGDYIDSSWELRVFVGEEDPEAESVTLRVTGESHIGGVLLKIVEQISSGTAVLLQELQDQVDLAPVPNIPPGSG

SEQ ID NO: 49212 - protein, 319 aa, Homo sapiens
  DOMAIN (272)..(293): PROTEIN REPEAT DOMAIN TPR NUCLEA domain identified by eMATRIX, accession number PD00126A, p-value=9.571e-12, raw score of 22.53
  DOMAIN (13)..(298): TPR Domain domain identified by PFam, accession name TPR, E- value=1.8e-21, PFam score of 84.8
CYSEAIKLDPHNHVLYSNRSAAYAKKGDYQKAYEDGCKTVDLKPDWGKGYSRKAAALEFLNRFEEAKRTYEEGLKHEANNPQLKEERKFMNPFNMPNLYQKLESDPRTRTLLSDPTYRELIEQLRNKPSDLGTKLQDPRIMTTLSVLLGVDLGSMDEEEEIATPPPPPPPKKETKPEPMEEDLPENKKQALKEKELGNDAYKKKDFDTALKHYDKAKELDPTNMTYITNQAAVYFEKGDYNKCRELCEKAIEVGRENREDYRQIAKAYARIGNSYFKEEKYKDAIHFYNKSLAEHRTPDVLKKCQQDLKVTAESTDFSP

SEQ ID NO: 49213 - protein, 629 aa, Homo sapiens
  DOMAIN (339)..(360): PROTEIN REPEAT DOMAIN TPR NUCLEA domain identified by eMATRIX, accession number PD00126A, p-value=7.577e-10, raw score of 22.53
  DOMAIN (36)..(512): TPR Domain domain identified by PFam, accession name TPR, E- value=1.5e-12, PFam score of 55.1
  misc_feature (1)...(629): Xaa = X or * as defined in Table 2
PVASSMFQKAARAVGNAERTDSIQRCSGPRCAMEQVNELKEKGIKALSVGNIDDALQCYSEAIXRLDPHNHVLYSNRSAAYAKKGDYQKAYEDGCKTVDLKPDWGKGYSRKAAALEFLYRFEEAKRTYEEGLKHEANNPQLKEGLQNMEARLAKRKFMNPFNMPNLYQKLESDPRTRTLLSDPTYRELIEQLRNKPSDLGTKLQDPRIMTTLSDLLGVDLGSMDEEEEIATPAPPPPAKKETKPEPMEEDLPENKKQALKEKELGNDAYKKKDFDTALKHYDKAKELDPTNMTYITNQAAVWFEKGDYNKCRELCEKAIEVGRESREDYRQIAKAYARIGNSYFKEEKYKDSIHFYNKSLAEHRTPDVLKKCQQAEKILKEQERLAYINPDLALEEKNKGNECFQKGDYPQAMKHYTEAIKRNPKDAKLYSIRAACYTKLLEFQLALKDWEEWYQLEPTFIKGYTRKAAALEAMKDYTKAMDVYQKALDLDFSCKEAADGYQRCIMAQYNRHDSPEDVKRRAMADPEVQQFMSDPAMRFILKQMQKDPQALSEHLXRNPLLPREIQKLMDVGSDCKFGDDLFIPAFLCPSCGKRSWDRGEQAARSGRESSTERKGEQGERRPSSPYIYT

SEQ ID NO: 49214 - protein, 97 aa, Homo sapiens; identical to SEQ ID NO: 42987

SEQ ID NO: 49215 - protein, 44 aa, Homo sapiens; identical to SEQ ID NO: 47454
  misc_feature (1)...(44): Xaa = X or * as defined in Table 2

SEQ ID NO: 49216 - protein, 133 aa, Homo sapiens
  DOMAIN (47)..(69): THYROID HORMONE RECEPTOR SIGNATURE domain identified by eMATRIX, accession number PR00546G, p-value=5.979e-09, raw score of 8.68
PEVGELIEKVRKAHQETFPALCQLGKYTTNNSSEQRVSLDIDLWDKFSELSTKCIIKTVEFAKQLPGFTTLTIANLSHPRAPSLPRRTGLQGGLPSPLHPQLGELALPRPPSPGVGAPSPGARGCTCYCWAFH

SEQ ID NO: 49217 - protein, 547 aa, Homo sapiens
  DOMAIN (173)..(206): Nuclear hormones receptors DNA-binding region proteins domain identified by eMATRIX, accession number BL00031A, p-value=4.000e- 35, raw score of 19.55
  DOMAIN (171)..(424): Zinc finger, C4 type (two domains) domain identified by PFam, accession name zf-C4, E-value=2.3e-57, PFam score of 195.0
VLRGCSLEQRSFISVRLLSYLSACRHPMEDSMDMDMSPLRPQNYLFGCELKADKDYHFKVDNDENEHQLSLRTVSLGAGAKDELHIVEAEAMNYEGSPIKVTLATLKMSVQPTVSLGGFEITPPVVLRLKCGSGPVHISGQHLVAIETQSSSSEEIVPSPPSPPPLPRIYKPCFVCQDKSSGYHYGVSACEGCKGFFRRSIQKNMVYTCHRDKNCIINKVTRNRCQYCRLQKCFEVGMSKESVRNDRNKKKKEVPKPECSESYTLTPEVGELIEKVRKAHQETFPALCQLGKYTTNNSSEQRVSLDIDLWDKFSELSTKCIIKTVEFAKQLPGFTTLTIADQITLLKAACLDILILRICTRYTPEQDTMTFSDGLTLNRTQMHNAGFGPLTDLVFAFANQLLPLEMDDAETGLLSAICLICGDRQDLEQPDRVDMLQEPLLEALKVYVRKRRPSRPHMFPKMLMKITDLRSISAKGAERVITLKMEIPGSMPPLIQEMLENSEGLDTLSGQPGGGGRDGGGLAPPPGSCSPSLSPSSNRSSPATHSP

SEQ ID NO: 49218 - protein, 134 aa, Homo sapiens
QNYLFGCELKADKDYHFKVDNDENEHQLSLRTVSLGAGAKDELHIVEAEAMNYEGSPIKVTLATLKMSVQPTVSLGGFEITPPVVLRLKCGSGPVHISGQHLVAVEEDAESEDEEEEDVKLFKYIWKAVCPWRW

SEQ ID NO: 49219 - protein, 819 aa, Homo sapiens
  DOMAIN (445)..(478): Nuclear hormones receptors DNA-binding region proteins domain identified by eMATRIX, accession number BL00031A, p-value=4.000e- 35, raw score of 19.55
  DOMAIN (443)..(696): Zinc finger, C4 type (two domains) domain identified by PFam, accession name zf-C4, E-value=2.3e-57, PFam score of 195.0
LPFSFSSRTPRSKPRIETKLGSMEPAPARSPRPQQDPARPQEPTMPPPETPSEGRQPSPSPSPTERAPASEEEFQFLRCQQCQAEAKCPKLLPCLHTLCSGCLEASGMQCPICQAPWPLGADTPALDNVFFESLQRRLSVYRQIVDAQAVCTRCKESADFWCFECEQLLCAKCFEAHQWFLKHEARPLAELRNQSVREFLDGTRKTNNIFCSNPNHRTPTLTSIYCRGCSKPLCCSCALLDSSHSELKCDISAEIQQRQEELDAMTQALQEQDSAFGAVHAQMHAAVGQLGRARAETEELIRERVRQVVAHVRAQERELLEAVDARYQRDYEEMASRLGRLDAVLQRIRTGSALVQRMKCYASDQEVLDMHGFLRQALCRLRQEEPQSLQAAVRTDGFDEFKVRLQDLSSCITQGKAIETQSSSSEEIVPSPPSPPPLPRIYKPCFVCQDKSSGYHYGVSACEGCKGFFRRSIQKNMVYTCHRDKNCIINKVTRNRCQYCRLQKCFEVGMSKESVRNDRNKKKKEVPKPECSESYTLTPEVGELIEKVRKAHQETFPALCQLGKYTTNNSSEQRVSLDIDLWDKFSELSTKCIIKTVEFAKQLPGFTTLTIADQITLLKAACLDILILRICTRYTPEQDTMTFSDGLTLNRTQMHNAGFGPLTDLVFAFANQLLPLEMDDAETGLLSAICLICGDRQDLEQPDRVDMLQEPLLEALKVYVRKRRPSRPHMFPKMLMKITDLRSISAKGAERVITLKMEIPGSMPPLIQEMLENSEGLDTLSGQPGGGGRDGGGLAPPPGSCSPSLSPSSNRSSPATHSP

SEQ ID NO: 49220 - protein, 470 aa, Homo sapiens
  DOMAIN (93)..(126): Nuclear hormones receptors DNA-binding region proteins domain identified by eMATRIX, accession number BL00031A, p-value=4.000e- 35, raw score of 19.55
  DOMAIN (91)..(359): Zinc finger, C4 type (two domains) domain identified by PFam, accession name zf-C4, E-value=2.3e-57, PFam score of 195.0
  misc_feature (1)...(470): Xaa = X or * as defined in Table 2
LWPLGMASNSSSCPTPGGGHLNGYPVPPYAFFFPPMLGGLSPPGALTTLQHQLPVSGYSTPSPATIETQSSSSEEIVPSPPSPPPLPRIYKPCFVCQDKSSGYHYGVSACEGCKGFFRRSIQKNMVYTCHRDKNCIINKVTRNRCQYCRLQKCFEVGMSKESVRNDRNKKKKEVPKPECSESYTLTPEVGELIEKVRKAHQETFPALCQLGKYTTNNSSEQRVSLDIDLWDKFSELSTKCIIKNGEGRQGRLPGFTTLTIADQITLLKAACLDILILRICTRYTPEAGTPXPSWDGLTLNRTQMHNAGFGPLTDLVFAFANQLLPLEMDDARETGLLSAICLICGDRQDLEQPDRVDMLQEPLLEALKVYVRKRRPSRPHMFPKMLMKITDLRSISAKGAERVITLKMEIPGSMPPLIQEMLENSEGLDTLSGQPGGGGRDGGGLAPPPGSCSPSLSPSSNRSSPATHSP

SEQ ID NO: 49221 - protein, 668 aa, Homo sapiens
  DOMAIN (291)..(324): Nuclear hormones receptors DNA-binding region proteins domain identified by eMATRIX, accession number BL00031A, p-value=4.000e- 35, raw score of 19.55
  DOMAIN (302)..(555): Zinc finger, C4 type (two domains) domain identified by PFam, accession name zf-C4, E-value=2.3e-57, PFam score of 195.0
  misc_feature (1)...(668): Xaa = X or * as defined in Table 2
LTHSSTWLGRSCNHDRRQMGSKVMSYVVAGRGTCAQETPIYTTIRYLEDKEQYGGSLGVDSVLARLFSGASVLFISGPPFSSYLSGVPPGHPMEDSMDMDMSPLRPQNYLFGCELKADKDYHFKVDNDENEHQLSLRTVNLGGLVAKGXVAHLLKAEAIEFTEASPNLKVTTWATLKMSVPAQRVFPLGGLLKITPTRWVLKGLKVWVQGPVHISGTALXXLWEGRCQSPEDEEEEDVNRVLFMKPKGRGLKHMFGDLVCSWKLAAIETQSSSSEEIVPSPPSPPPLPRIYKPCFVCQDKSSGYHYGVSACEGCKGFFRRSIQKNMVYTCHRDKNCIINKVTRNRCQYCRLQKCFEVGMSKESVRNDRNKKKKEVPKPECSESYTLTPEVGELIEKVRKAHQETFPALCQLGKYTTNNSSEQRVSLDIDLWDKFSELSTKCIIKTVEFAKQLPGFTTLTIADQITLLKAACLDILILRICTRYTPEQDTMTFSDGLTLNRTQMHNAGFGPLTDLVFAFANQLLPLEMDDAETGLLSAICLICGDRQDLEQPDRVDMLQEPLLEALKVYVRKRRPSRPHMFPKMLMKITDLRSISAKGAERVITLKMEIPGSMPPLIQEMLENSEGLDTLSGQPGGGGRDGGGLAPPPGSCSPSLSPSSNRSSPATHSP

SEQ ID NO: 49222 - protein, 108 aa, Homo sapiens
  misc_feature (1)...(108): Xaa = X or * as defined in Table 2
ILPTSLFFLFCFVFFVCFXDRVLLLSPGWSAVARSWLYCNLSLRGFKGFSCLSLLSNWDYRCTPLRSANFVFLCRDRVSPCWPTSVSNSXPQVIHPPWPPKVLGITRV

SEQ ID NO: 49223 - protein, 220 aa, Homo sapiens
  misc_feature (1)...(220): Xaa = X or * as defined in Table 2
GRRRLLRDAEGPEETVRLWPAARAAMDAAEVEFLAEKELVTIIPNFSLDKIYLIGGDLGPFNPGLPVEVPLWLARLNLKQRQKCRLLPPEWMDVEKLEKMRDHERKEETFTPMPKPFTTWELTKLLLNHASDNIPKGRTEFRDPGSRVFWGHSYXAKFRVFGDSFVRQQEAHAKLDXLGPWMGDQQPAVTFLTQALNPHVTNSRTNPPSPLESTSVLRTS

SEQ ID NO: 49224 - protein, 201 aa, Homo sapiens
  DOMAIN (1)..(167): Ham1 family domain identified by PFam, accession name Ham1p_like, E-value=0.00025, PFam score of -50.5
  misc_feature (1)...(201): Xaa = X or * as defined in Table 2
VAQKIDMPEYQGEPDEISIQKCQEAVRQVQGPVLVEDTCLSFNALGGLPGPYIKVWFLEKLKPEGLHQLLAGFEDKSAYALCTFCTQAPGDPSQPVRLVSGGRDLRGRIRWHPEGCQDFGWDPCFQPDGYEQTYAEMPXGGRRNAVSHRFRAPCWEPAREYFWQVWPSLTSASWKEGPSRPGDLGKGLAPKPSPHRGRAPP

SEQ ID NO: 49225 - protein, 98 aa, Homo sapiens
  misc_feature (1)...(98): Xaa = X or * as defined in Table 2
TAEKMAVLAPLIALVYSVPRLSRWLAQPYYLLSALLSAAFLLVRKFPPLCHGLPTQREDGNPCDFDWREVEILMFLSAILMMKNRRSSTKXAHPTRRR

SEQ ID NO: 49226 - protein, 40 aa, Homo sapiens
  misc_feature (1)...(40): Xaa = X or * as defined in Table 2
ETEAXRINDLLXLLEFFCNIXQNXPXIRPTVIRSSLKYNT

SEQ ID NO: 49227 - protein, 40 aa, Homo sapiens; identical to SEQ ID NO: 49226
  misc_feature (1)...(40): Xaa = X or * as defined in Table 2

SEQ ID NO: 49228 - protein, 40 aa, Homo sapiens; identical to SEQ ID NO: 49226
  misc_feature (1)...(40): Xaa = X or * as defined in Table 2

SEQ ID NO: 49229 - protein, 40 aa, Homo sapiens; identical to SEQ ID NO: 49226
  misc_feature (1)...(40): Xaa = X or * as defined in Table 2

SEQ ID NO: 49230 - protein, 40 aa, Homo sapiens; identical to SEQ ID NO: 49226
  misc_feature (1)...(40): Xaa = X or * as defined in Table 2

SEQ ID NO: 49231 - protein, 77 aa, Homo sapiens
KTVMVKKPLCDCFERLVIWTLLKLLPGQAVKGNQLLPVSLVKRKTTLAPNTQTASPRALADSLMQLARQVSRLESGQ

SEQ ID NO: 49232 - protein, 40 aa, Homo sapiens; identical to SEQ ID NO: 49226
  misc_feature (1)...(40): Xaa = X or * as defined in Table 2

SEQ ID NO: 49233 - protein, 40 aa, Homo sapiens; identical to SEQ ID NO: 49226
  misc_feature (1)...(40): Xaa = X or * as defined in Table 2

SEQ ID NO: 49234 - protein, 103 aa, Homo sapiens
MAVLAPLIALVYSVPRLSRWLAQPYYLLSALLSAAFLLVRKLPPLCHGLPTQREDGNPCDFDWREVEILMFLSAIVMMKNRRSTLSFLLPPCCGGWDASSMIF

SEQ ID NO: 49235 - protein, 40 aa, Homo sapiens; identical to SEQ ID NO: 49226
  misc_feature (1)...(40): Xaa = X or * as defined in Table 2

SEQ ID NO: 49236 - protein, 41 aa, Homo sapiens
AAALRWLMSPRTLLCCFTSTLTQPWNRCGGKRKRKKSEVPE

SEQ ID NO: 49237 - protein, 40 aa, Homo sapiens; identical to SEQ ID NO: 49226
  misc_feature (1)...(40): Xaa = X or * as defined in Table 2

SEQ ID NO: 49238 - protein, 90 aa, Homo sapiens
PTCSAASPATVSAGAARRQPLQPTRALSSSPSCPAVTPVRALPASPPRLSAAICPAVTALYSCVHWPCTPGQTRWSLFPSSFPREAMAGA

SEQ ID NO: 49239 - protein, 40 aa, Homo sapiens; identical to SEQ ID NO: 49226
  misc_feature (1)...(40): Xaa = X or * as defined in Table 2

SEQ ID NO: 49240 - protein, 628 aa, Homo sapiens
  DOMAIN (23)..(38): WILM'S TUMOUR PROTEIN SIGNATURE domain identified by eMATRIX, accession number PR00049D, p-value=1.000e-09, raw score of 0.00
  DOMAIN (360)..(396): DHHC zinc finger domain identified by PFam, accession name zf -DHHC, E-value=0.0013, PFam score of 0.5
MENFTALFGAQADPPPPPTALGFGPGKPPPPPPPPAGGGPGTAPPPTAATAPPGADKSGAGCGPFYLMRELPGSTELTGSTNLITHYNLEQAYNKFCGKKVKEKLSNFLPDLPGMIDLPGSHDNSSLRSLIEKPPILSSSFNPITGTMLAGFRLHTGPLPEQCRLMHIQPPKKKNKHKHKQSRTQDPVPPGTYIFPAQCGFAALTENVSYRVEPREQEALFSWPATHRKITHSHTSTSTRTRKEVDSHGVKQASLVRERRGMAGPRFAYLGNKLIVFGQVCTAVDTAVSAVTAGQIAAESLGGEAGRARTGVTAGHDGLEDNALVGWRGWRRAAPAETVAAEEDEDKEDDFRAPLYKTVEIKGIQVRMKWCATCRFYRPPRCSHCSVCDNCVEVFGETKEREDIVIRPPFLRPEVSDGQITVKIMDNGIQGELRRTKASRPSRDLDRDRQISHQSSNMPAESGKRFKPSKYVPVSAAAIFLVGATTLFFAFTLQLATLLEAPDSGTVGADFILATDTGIPFQDYTLYLDQVDIQKVVGCPGLSLYVSPAVPIYNAIMFLFVLANFSMATFMDPGIFPRDFSMLSRWTSLLEGHTRHVEEPSCPGVMAEATEDQSSPNQPNNYTLQMYE

SEQ ID NO: 49241 - protein, 226 aa, Homo sapiens
  misc_feature (1)...(226): Xaa = X or * as defined in Table 2
RILPGGQQNSSWNFSEDTVISILNTINEVIAENLEAAKKLRETQGIEKLVLINKSGNRSEKEVRAAALVLQTIWGYKELRKPLEKEGWKKSDFQVNLNNASRSQSSHSYDDSTLPLIXPGPKNQIRNLIGKKFRXAIWDQTQNHXITDYSTPNERGDHNRTLDRSGDLGDMEPLKGTTPLMQDEGQESLEEELDVLVLDDEGGQVSYPSMVCPSVTPKIVLEEGGS

SEQ ID NO: 49242 - protein, 40 aa, Homo sapiens; identical to SEQ ID NO: 49226
  misc_feature (1)...(40): Xaa = X or * as defined in Table 2

SEQ ID NO: 49243 - protein, 40 aa, Homo sapiens; identical to SEQ ID NO: 49226
  misc_feature (1)...(40): Xaa = X or * as defined in Table 2

SEQ ID NO: 49244 - protein, 444 aa, Homo sapiens
  DOMAIN (74)..(114): Armadillo/beta-catenin-like repeats domain identified by PFam, accession name Armadillo_seg, E-value=0.0084, PFam score of 22.7
MIGEEVPSDQYYWAPLAQHERGSLASLDSLRKGGPPPPNWRQPELPEVIAMLGFRLDAVKSNAAAYLQHLCYRNDKVKTDVRKLKGIPVLVGLLDHPKKEVHLGACGALKNISFGRDQDNKIAIKNCDDEVIIPHSGWEREPNEDCKPRHIEWESVLTNTAGCLRNVSSERSEARRKLRECDGLVDALIFIVQAEIGQKDSDSKLVENCVCLLRNLSYQVHREIPQAERYQEAAPNVANNTGPHAASCFGAKKGKGKKPIEDPANDTVDFPKRTSPARERLYNELKRDLPHFVRTVLLPKSGGVVERSKDFRRECRDERIREYFYGFRGCFYPHAFNVKFSDVKIYKVGAPTIPDSCLPLGMSQEDNQLKLVPVTPGRDMVHHLLSVSTAEGTEENLSETSVAGFIVVTSVDLEHQVFTVLSPAPRPLPKNFLLIMDIRFMDLK

SEQ ID NO: 49245 - protein, 462 aa, Homo sapiens
YGRYIRSALRQEKALSAIADLLTNEHERVVKAASGALRNLAVDARNKELIGKHAIPNLVKNLPGGQQNSSWNFSEDTVISILNTINEVIAENLEAAKKLRETQGIEKLVLINKSGNRSEKEVRAAALVLQTIWGYKELRKPLEKEGWKKSDFQEAVAGVEAFLVRSRVRLGAVVAFRELHPGLEAVRLRYSPIAVVMVGEAGRDLRRRRAVAVTAEKMAVLAPLIALVYSVPRLSRWLAQPYYLLSALLSAAFLLVRKLPPLCHGLPTQREDGNPCDFDWVVHVRGELAGKVEGKPVKQRLKGGLLARRARFLQPEPNVTLNSAQEPHEELKTKERALADDVAPMAASVPVGFSLWKMVEAASAPGGRNTDSLALAPEAWIGCQPVMPSCDPGPGPACLPTKTFRSYLPRCHRTYSCVHCRAHLAKHDELISKEQAFETSQKYKEGKYIIEMSHMVKDNGWD

SEQ ID NO: 49246 - protein, 40 aa, Homo sapiens; identical to SEQ ID NO: 49226
  misc_feature (1)...(40): Xaa = X or * as defined in Table 2

SEQ ID NO: 49247 - protein, 40 aa, Homo sapiens; identical to SEQ ID NO: 49226
  misc_feature (1)...(40): Xaa = X or * as defined in Table 2

SEQ ID NO: 49248 - protein, 344 aa, Homo sapiens
  misc_feature (1)...(344): Xaa = X or * as defined in Table 2
GVRLRYSPIAVVMVGEAGRDLRRRRAVAVTAEKMAVLAPLISLSVYSVPRLSRWLAQPYYLLSALLSAAFLLVRKLPPLCHGLPTQREDGNPCDFDWREVEILMFLSAIVMMKNRRSITVEQHIGNIFMFKSKVANTILFFRLDIRMGLLYITLCIVFLMTCKPPLSPYMGPEYIKYFNDKPFDEELERDNRVNWILLEFFGNWSNDWQSFAPIYADLSLKYNCTGLNFGKVDVGRYTDVSTRYKVSTSPLTKQLPTLILFQGGQGGQCGRPQIXQGKGRALFSWDLLXGTXKEGQENVIREFNLNELYQRAKKLSKAGDNIPEEQPVASTPTTVSDGENKKDK

SEQ ID NO: 49249 - protein, 368 aa, Homo sapiens
  misc_feature (1)...(368): Xaa = X or * as defined in Table 2
MESTGEDAVNIVEMVTEDLVYRLVVLKSLQVWLSPGDFMGSEGTECMLIGPWVAMGRPSESTLSSHSGPRSPHGTGSPAPRLQAVHVLKCPKSRGVQGGWGLASQCLPEHRHTQLSCDSTQAWPQLCSAQSLRHNRSGQGAGAVTSEPAGAGGLPRPPRTQGCLGAESPAGQLHSQQRGGPEEGRLLSDVDHPDLSSSQQRGPEGPQVAGGWCVSAAWSSTHLAGPQQRWDQEEARQWEQIPLSLLMMGDPPGYSRAPGDPGPQPQPRQLQLCLGSSHPTNSXGAELPPVPGSAECAALTVLPSLHLPQWWQVGRPGPTXVDPRVGLPGQQAPEQRVYSLTHPEQLPVLQVPLLIYRYSSTYNGVPSC

SEQ ID NO: 49250 - protein, 96 aa, Homo sapiens
MQISPPPGHTQNQPYLLFSIASRKCLHPVLLVHYFFQLFLIPIIHSIFFKFFISCINVNTSLFTFSLQSQVMGELPLISFSTLSLLEESTYYRLGI

SEQ ID NO: 49251 - protein, 64 aa, Homo sapiens
  misc_feature (1)...(64): Xaa = X or * as defined in Table 2
LYWQKRKGKLLNNLTQGIVADPVRXKKFHFKCPSNCPKIHNTESAYAVSFMKYSAHVLGSLYEM

SEQ ID NO: 49252 - protein, 87 aa, Homo sapiens
  DOMAIN (18)..(45): Protamine P1 proteins domain identified by eMATRIX, accession number BL00048, p-value=1.000e-09, raw score of 6.39
LPSGPEYSAGLSTSRLKARHRGSRSPERRSGRPRGPRRSRAAAEKPSPKCARDAKPGAVATSPAPARRPVPGPRLRAPKLAGRSLLG

SEQ ID NO: 49253 - protein, 156 aa, Homo sapiens
  DOMAIN (103)..(132): Integrins alpha chain proteins domain identified by eMATRIX, accession number BL00242E, p-value=1.375e-26, raw score of 9.03
  DOMAIN (125)..(139): Integrin alpha cytoplasmic region domain identified by PFam, accession name integrin_A, E-value=0.0013, PFam score of 25.5
MFLLVGAPKANTTQPGIVEGGQVLKCDWSSTRRCQPIEFDATELHRELKENQNHSYSLKSSASFNVIEFPYKNLPIEDITNSTLVTTNVTWGIQPAPMPVPVWVIILAVLAGLLLLAVLVFVMYRMGFFKRVRPPQEEQEREQLQPHENGEGNSET

SEQ ID NO: 49254 - protein, 1061 aa, Homo sapiens
  DOMAIN (1008)..(1037): Integrins alpha chain proteins domain identified by eMATRIX, accession number BL00242E, p-value=1.375e-26, raw score of 9.03
  DOMAIN (59)..(496): FG-GAP repeat domain identified by PFam, accession name FG- GAP, E-value=7.1e-75, PFam score of 262.2
LPLPAWRPARTSAMAFPPRRRLRLGPRGLPLLLSGLLLPLCRAFNLDVDSPAEYSGPEGSYFGFAVDFFVPSASSRMFLLVGAPKANTTQPGIVEGGQVLKCDWSSTRRCQPIEFDATGNRDYAKDDPLEFKSHQWFGASVRSKQDKILACAPLYHWRTEMKQEREPVGTCFLQDGTKTVEYAPCRSQDIDADGQGFCQGGFSIDFTKADRVLLGGPGSFYWQGQLISDQVAEIVSKYDPNVYSIKYNNQLATRTAQAIFDDSYLGYSVAVGDFNGDGIDDFVSGVPRAARTLGMVYIYDGKNMSSLYNFTGEQMAAYFGFSVAATDINGDDYADVFIGAPLFMDRGSDGKLQEVGQVSVSLQRASGDFQTTKLNGFEVFARFGSAIAPLGDLDQDGFNDIAIAAPYGGEDKKGIVYIFNGRSTGLNAVPSQILEGQWAARSMPPSFGYSMKGATDIDKNGYPDLIVGAFGVDRAILYRARPVITVNAGLEVYPSILNQDNKTCSLPGTALKVSCFNVRFCLKADGKGVLPRKLNFQVELLLDKLKQKGAIRRALFLYSRSPSHSKNMTISRGGLMQCEELIAYLRDESEFRDKLTPITIFMEYRLDYRTAADTTGLQPILNQFTPANISRQAHILLDCGEDNVCKPKLEVSVDSDQKKIYIGDDNPLTLIVKAQNQGEGAYEAELIVSIPLQADFIGVVRNNEALARLSCAFKTENQTRQVVCDLGNPMKAGTQLLAGLRFSVHQQSEMDTSVKFDLQIQSSNLFDKVSPVVSHKVDLAVLAAVEIRGVSSPDHIFLPIPNWEHKENPETEEDVGPVVQHIYELRNNGPSSFSKAMLHLQWPYKYNNNTLLYILHYDIDGPMNCTSDMEINPLRIKISSLQTTEKNDTVAGQGERDHLITKRDLALSEGDIHTLGCGVAQCLKIVCQVGRLDRGKSAILYVKSLLWTETFMNKENQNHSYSLKSSASFNVIEFPYKNLPIEDITNSTLVTTNVTWGIQPAPMPVPVWVIILAVLAGLLLLAVLVFVMYRMGFFKRVRPPQEEQEREQLQPHENGEGNSET

SEQ ID NO: 49255 - protein, 50 aa, Homo sapiens
VCKHFLEAIENNKYGWFWVCPGGGDICMYRHALPPGFVFNKDKKKEEKKD

SEQ ID NO: 49256 - protein, 303 aa, Homo sapiens
  DOMAIN (141)..(152): Zinc finger C-x8-C-x5-C-x3-H type (and similar) domain identified by eMATRIX, accession number PF00642, p-value=4.436e-09, raw score of 11.59
  DOMAIN (128)..(153): Zinc finger C-x8-C-x5-C-x3-H type domain identified by PFam, accession name zf-CCCH, E-value=0.035, PFam score of 13.6
  misc_feature (1)...(303): Xaa = X or * as defined in Table 2
RCWRPRTLGFASPPTRPCSPTHAPGCEMTPRDWHRVLSFASPLRIEEIFQGYDKTFGLKNKKGAKQQKFIKAVTHQVKFGQSKSTSGSTEXSWKRKLKKDDKKKELQELNELFKPVVAAQKIRVKGADPKSVVCAFFKQGQCTKGDKCKFSHDLTLGEKMEKRSVYIDARDEELEKETKSSLIQADTMDNWDEKKLEEVVNKKHGEAEKKKPKTQIVCKHFLEAIENNKYGWFWVCPGGGDICMYRHALPPGFVLKKDKKKEEKEDEISLEDLIERERSALGPNVTKITLESFLAWKKRKRQV

SEQ ID NO: 49257 - protein, 107 aa, Homo sapiens
  DOMAIN (6)..(20): L-LACTATE DEHYDROGENASE SIGNATURE domain identified by eMATRIX, accession number PR00086E, p-value=8.364e-18, raw score of 11.21
  DOMAIN (1)..(103): lactate/malate dehydrogenase domain identified by PFam, accession name ldh, E-value=3.4e-35, PFam score of 125.9
SSCHGWILGEHGDSSVAVWSGVNVAGVSLQELNPEMGTANDSENWKEVHKMVVESAYEVIKLKGYTNWAIGLTSVINQKLKDDEVAQLKKSADTLWDIGCRNLKTTM

SEQ ID NO: 49258 - protein, 512 aa, Homo sapiens
  DOMAIN (77)..(124): Malate dehydrogenase proteins domain identified by eMATRIX, accession number BL00068C, p-value=3.089e-17, raw score of 29.08
  DOMAIN (25)..(379): lactate/malate dehydrogenase domain identified by PFam, accession name ldh, E-value=4.7e-144, PFam score of 492.0
  misc_feature (1)...(512): Xaa = X or * as defined in Table 2
MGKAKEEVFLADELVHAKTNRNKECDYSVTANSKIVVVTAGVRQQEGESRLNLVQRNVNVFKFIIPQIVKYSPDCIIIVVSNPVDILTYVTWKLSGLPKHRVIGSGCNLDSARFRYLMAEKLGIHPSSCHGWILGEHGDSSDHPGRPRPHPVPIKPPETLPGRDTSSWTSRGAHWRRNTQAAGRREHIDRHQQAIDRWNNVGFGRGGQRRARLLSDLTPTGKPSSYSVSLLAPPSAESYFHSIKPCIHSPSXCMQRPIEIKNRDYSVTANSKIVVVTAGVRQQEGESRLNLVQRNVNVFKFIIPQIVKYSPDCIIIVVSNPVDILTYVTWKLSGLPKHRVIGSGCNLDSARFRYLMAEKLGIHPSSCHGWILGEHGDSSDHPGRPRPHPVPIKPPETLPGRDTSSWTSRGAHWRRNTQAAGRREHIDRHQQAIDRWNNVGFGRGGQRRARLLSDLTPTGKPSSYSVSLLAPPSAESYFHSIKPCIHSPSPREIQFFGYTKARNPRVQKAFCP

SEQ ID NO: 49259 - protein, 445 aa, Homo sapiens
  DOMAIN (159)..(184): L-LACTATE DEHYDROGENASE SIGNATURE domain identified by eMATRIX, accession number PR00086B, p-value=2.385e-25, raw score of 13.67
  DOMAIN (109)..(444): lactate/malate dehydrogenase domain identified by PFam, accession name ldh, E-value=2.5e-161, PFam score of 549.3
MEKPKRLRWLWGPAPSSLLAEPAPEETHAADFVFSARLLQRSPEPSLSWGGRALAEEQKAEGSSCGSAERLVAFAAKTRPYLSLCKMATLKEKLIAPVAEEEATVPNNKITVVGVGQVGMACAISILGKSRAMEHTTAGAPYTPRQQTCQCNMMSLADELALVDVLEDKLKGEMMDLQHGSLFLQTPKIVADKDYSVTANSKIVVVTAGVRQQEGESRLNLVQRNVNVFKFIIPQIVKYSPDCIIIVVSNPRDILTYGTWKLSGLPKHRVIGSGCNLDSARFRYLMAEKLGIHPSSCHGWILGEHGDSSVAVWSGVNVAGVSLQELNPEMGTDNDSENWKEVHKMVVESAYEVIKLKGYTNWAIGLSVADLIESMLKNLSRIHPVSTMVKGMYGIENEVFLSLPCILNARGLTSVINQKLKDDEVAQLKKSADTLWDIQKDLKDL

SEQ ID NO: 49260 - protein, 88 aa, Homo sapiens
MEFNKIQPHLNPNSPSWGYPFSLDDFIGTFQPPSLCTSFPFFTIIVSSHFWDSIPGEKHLPHSHHSNTKPHLSRHVPPKIPSMGSCLG

SEQ ID NO: 49261 - protein, 345 aa, Homo sapiens
  misc_feature (1)...(345): Xaa = X or * as defined in Table 2
MSGSFLMFLPKADMPAPMLVQPAERFDSWVWAGPEQLHSNQLPGDADALLLGRNLTKGTRRLCTEEQVKIPQPEPGPPQKLCVLSAAGGQACLVLTFPRWTVWEEPPPPGLVGVKACARWWGKGEPDRKAPAPPPPPPGTEKVDQTSEERGTLIQRPPAPALPGWVRKTGRPPPPATGRLQQVPLLGASTQPEPPGRGVPPGVSPGLGEDVENDGMSLSYLAEXPQATSQRAPXGENTVALSGRLGRNSSSYTCRPAGERNFHPRGGPSSTAALHLRKMPGTPQCEGRRAVPRALPETXMLQGPGTTRXTPPGPLAFSPPSSPTGPQKVKSLGNSSARTILPPKW

SEQ ID NO: 49262 - protein, 70 aa, Homo sapiens
CDCTEKLQNKFDFLRSQLNDISSFKNIYRYAFDFARQSKYRVMNKDQWYNVLEFSRTVHADLSNYDEDGA

SEQ ID NO: 49263 - protein, 141 aa, Homo sapiens
PTRPAAVAEDGGLKKCKISSYCRSQPPARLISGEEHFSSKKCLAWFYEYAGPDEVVGPEGMEKFCEDIGVEPENCDCTEKLQNKFDFLRSQLNDISSFKNIYRYAFDFARDKDQRSLDIDTAKSMLALLLGRTWPLFSVFY

SEQ ID NO: 49264 - protein, 264 aa, Homo sapiens
  misc_feature (1)...(264): Xaa = X or * as defined in Table 2
GASKRTGTPFPGFPAHPAREGRKMPVKKKRKSPGVAAAVAEDGGLKKCKISSYCRSQPPARLISGEEHFSSKKCLAWFYEYAGPDEVVGPEGMEKFCEDIGVEPENIIMLVLAWKLEAESMGFFTKEEWVKGMTSLQCNLHRKGYKPNFDFFAAHSXIDISSFKNIYRYAFDFARDKDQRSLDNDTAKSMLALLLGEGHGPLFSVFYQVPGGQSKYRVMNKDQWYNVSEFSRTVHADLSNYDEDGAWPVLLDEFVEWQKVRQTS

SEQ ID NO: 49265 - protein, 123 aa, Homo sapiens
GRAGSRAMKPPGGESSNLFGSPEEATPSSRPNRMASNIFGPTEEPQNIPKRTNPPGGKGSGIFDESTPVQTRQHLNPPGGKTSDIFGSPVTATSRLAHPNKPKDHVFISFCPNERGGKRVSLM

SEQ ID NO: 49266 - protein, 137 aa, Homo sapiens
  misc_feature (1)...(137): Xaa = X or * as defined in Table 2
GRAGSRKWLLLTGSLASTSPSLLSGQGPWAPLQRAMKPPGGESSNLFGFPEEATPSSRPNRMSSNIFGPTEEPQNILKRTNPPGVXGSGIFDESTPVQTRQHLNPPGGKTSDIFGSPVTATSRLAHPNKPKDHVFLM

SEQ ID NO: 49267 - protein, 228 aa, Homo sapiens
  DOMAIN (52)..(91): DEAD-box subfamily ATP-dependent helicases proteins domain identified by eMATRIX, accession number BL00039A, p-value=3.667e- 25, raw score of 18.44
  DOMAIN (46)..(224): DEAD/DEAH box helicase domain identified by PFam, accession name DEAD, E-value=1.5e-44, PFam score of 143.8
MSGGSMDYNRERGSPEGMDPDGAIESNWNEIVDNFDDMNLKESLLWGIYAYDFEKSSAIQQRAIITCMKGYDVIAQAQSGTGKTATFAISILQQLETQALMLAPTRELAPQIQKVILALGDYMGATCHACIGGTNVQTEMQKLQAEAPHIVVGTLGRVFDMLNRRYLFPKWIKMLVLDEADEMLSHGFKDEIYEIFQKLNTSIQVVLLSATMPTDVLEVTKKFMRDPI

SEQ ID NO: 49268 - protein, 25 aa, Homo sapiens
GIDVQQVSLVINYDLPTNRENYIHR

SEQ ID NO: 49269 - protein, 155 aa, Homo sapiens
  DOMAIN (75)..(137): Cystatin domain identified by PFam, accession name cystatin, E-value=4.2e-12, PFam score of 45.9
ARGRNPFLAEEFSRRASSNWNEIVDNFDDMNLKESLLRGIYAYGFEKPSAIQQRAIIPCIKAEGPVVTAQYDCLGCVHPISTQSPDLEPILRRGIQYFNSNTQHSSLFMLNEVKRAQRQRGGEGTGYFVDFSVRNCPRHHFPRHPNVRIRNVCER

SEQ ID NO: 49270 - protein, 74 aa, Homo sapiens
LVILELRLINLQHGDMDQKERDVIMREFRSGSSRVLITTDLLVSLLMLFKNLPKVSFLGGRLLSNLCQLGLYAR

SEQ ID NO: 49271 - protein, 441 aa, Homo sapiens
  DOMAIN (359)..(405): DEAD-box subfamily ATP-dependent helicases proteins domain identified by eMATRIX, accession number BL00039D, p-value=1.000e- 40, raw score of 21.67
  DOMAIN (330)..(411): Helicases conserved C-terminal domain identified by PFam, accession name helicase_C, E-value=1.4e-34, PFam score of 128.3
  misc_feature (1)...(441): Xaa = X or * as defined in Table 2
SPQLISSASRPAVRNSRHDATRPVVFQIMSGGSADYNSREHGGPEGMDPDGVIESNWNEIVDNFDVTMNLKESLLRGIYAYGFEKPSPIQQKAIIPCIKGYXCGLLKLQSGTGKTATFSLISILQPVGRLSFKETQSTSYWAPTRELAQQIQKVILALGDYMGATCHACIGGTNVRNEMQKLQAEAPHIVVGTPGRVFDMLNRRYLSPKWIKMFVLDEADEMLSRGFKDQIYEIFQKLNTSIQVVFASATMPTDVLEVTKKFMRDPIRILVKKEELTLEGIKQFYINVEREEWKLDTLCDLYETLTITQAVIFLNTRRKVDWLTEKMHARDFTVSALHGDMDQKERDVIMREFRSGSSRVLITTDLLARGIDVQQVSLVINYDLPTNRENYIHRIGRGGRFGRKGVAINFVTEEDKRFLRDIETFYNTTVEEMPMNVADLI

SEQ ID NO: 49272 - protein, 154 aa, Homo sapiens
ACCFRPRYAVLCGQLAEHESIQRRIQSGFSFKEHVDKAIALQPENPMAHFLLGRWCYQVSHLSWLEKKTATALLESPLSATVEDALQSFLKAEELQPGFSKAGRVYISKCYRELGKNSEARWWMKLALELPDVTKEDLAIQKDLGRTWKSFYRD

SEQ ID NO: 49273 - protein, 252 aa, Homo sapiens
  misc_feature (1)...(252): Xaa = X or * as defined in Table 2
RWGERILLTWRKRQLQVPPSALEAGGSSGLEDVLPLLQQADELHRGDEQGKREGFQLLLTQQAWCMEAGRTFLWRLARAYSDMCELTEEVSEKKSYALDGKEEAEAALEKGDEESLTCHLWYAGALWSAGXAMRASRRRIQELALTFKEHCGQKPFALQPKTPMAHFLLGRWCYQVSHLSWLEKKTATALLESPLSATVEDALQSFLKCYRELGKNSEARWWMKLALELPDVTKEDLAIQKDLEELEVILRD

SEQ ID NO: 49274 - protein, 118 aa, Homo sapiens
  misc_feature (1)...(118): Xaa = X or * as defined in Table 2
GTERRTGKLPALLTPNLVQLRRLLFPGIQTIXVPAQGRGHLLQRPAAARPRTRSAPPAAAAAPPQVEARPPXLQPTRQEEAAELQTARAGLWELWAGPQSPRDLNSLESIRITCSPTP

SEQ ID NO: 49275 - protein, 168 aa, Homo sapiens
  DOMAIN (17)..(55): Ribosomal L29e protein family domain identified by PFam, accession name Ribosomal_L29e, E-value=0.0028, PFam score of 24.3
  misc_feature (1)...(168): Xaa = X or * as defined in Table 2
FWGGRSGTVGYGADMGKFKNNTTNNQSXKXYRNTSRNPDHKDXFLKGMDPKFPKNMHFAXKHNEKGLEKMQDNNMRAEAIKALPKPMEVQPRVPKSASRKLDLAYTAHPKAGKHARAHIATGLRLCWPKAKAKDQTKAQASASAAAPASVLAPAQASKGAQAPMKALE

SEQ ID NO: 49276 - protein, 316 aa, Homo sapiens
  DOMAIN (22)..(69): ESCHERICHIA COLI RIBOSOMAL PROTEIN L18 domain identified by eMATRIX, accession number DM01191B, p-value=9.654e-10, raw score of 16.75
RQEGTLIGVFIPAAAAAAAVAAAAAAAAAAVAAAAAAAAAAVAAAAAAAAAAVAAAVAAAAAAVGTSFSKPHKLMKEHKEKPSKDSREHKSAFKEPSRDHNKSSKESSKKPKENKPLKEEKIVPKMAFKEPKPMSKEPKPDSNLLTITSGQDKKAPSKRPPISDSEELSAKKRKKSSSEALFKSFSSAPPLILTCSADKKQIKDKSHVKMGKVKIESETSEKKKSTLPPFDDIVDPNDSDVEENISSKSDSVPGQSPVTNIFFTSSSTPTILKSYQLDNSDQQGAQEASDKQIEGYFSGEVPAYRQGELILVASRQ

SEQ ID NO: 49277 - protein, 264 aa, Homo sapiens
  DOMAIN (17)..(54): PROTEIN RIBOSOMAL L14 PROBABLE 60 domain identified by eMATRIX, accession number PD02808A, p-value=9.471e-12, raw score of 12.03
  DOMAIN (16)..(100): Ribosomal protein L14 domain identified by PFam, accession name Ribosomal_L14e, E-value=0.081, PFam score of -9.7
  misc_feature (1)...(264): Xaa = X or * as defined in Table 2
GAERLPEGPGKRMVFRRFVEVGRVAYVSFGPHARKMWVAIVDVFXSEQGLLVEXPCTQVRRQAMPFRCMQLNXFHPSRFPNSAQPESMFRQAWQKADINTKWGSPHDGAKKIEAQRKGKPKDDQIFDRFKVMEGQKKMREQEXSKEXSXRSFKRAALLEKLSPKKKHLGTXGYCCLLLLLAAAAAAAAAAAACCLLACCLKVPSKKRSPAASKKAPAQKVPAQKATGQKAAPAPKAQKGQKAPAQKAPAPKASGQESISGNHKK

SEQ ID NO: 49278 - protein, 314 aa, Homo sapiens
  misc_feature (1)...(314): Xaa = X or * as defined in Table 2
SLNEGIMYAQPVTNTKEVKWQKVLYERQPFSLDKLWWDRRFLGRSSGKNIHAPENTQYWGCGXFESSVVIQQLCSVCVFVVIRWYMDEGLLAPHWLVGTGLASSLIGYVLFDLIDGGEGRKKSGQTRWADLXELPXSFITFTYGFSPVLKTLTEFCSALTPIYAMSVFMLLRHLIFFDYGANAAIVSSTLLVNMAIFASVCWASRLPRSLHAFIMVAFAIQIFCPGGPMLQKKLKACTPRSYVGVTLLFAFSAVGGLLSISAVGAVLLALLLMSISCLCPFYLHFACSLFKENIHMGPWDEAEIKEDLSPGSLS

SEQ ID NO: 49279 - protein, 103 aa, Homo sapiens
  DOMAIN (28)..(51): MITOCHONDRIAL CARRIER PROTEIN SIGNATURE domain identified by eMATRIX, accession number PR00926F, p-value=6.824e-24, raw score of 17.75
  DOMAIN (1)..(93): Mitochondrial carrier proteins domain identified by PFam, accession name mito_carr, E-value=8.7e-28, PFam score of 98.2
AYFGIYDTAKGMLPDPKNTHIVISWMIAQTVTAVAGLTSYPFDTVRRRMMMQSGRKGTDIMYTGTLDCWRKIARDEGGKAFFKGAWSNVLRGISPCEQACCII

SEQ ID NO: 49280 - protein, 136 aa, Homo sapiens
  DOMAIN (55)..(78): MITOCHONDRIAL CARRIER PROTEIN SIGNATURE domain identified by eMATRIX, accession number PR00926F, p-value=6.824e-24, raw score of 17.75
  DOMAIN (1)..(136): Mitochondrial carrier proteins domain identified by PFam, accession name mito_carr, E-value=8.1e-42, PFam score of 146.3
TSLCFVYPLDFARTRLAADVGIIIYRAAYFGIYDTAKGMLPDPKNTHIVISWMIAQTVTAVAGLTSYPFDTVRRRMMMQSGRKGTDIMYTGTLDCWRKIARDEGGKAFFKGAWSNVLRGMGGAFVLVLYDEIKKYT

SEQ ID NO: 49281 - protein, 298 aa, Homo sapiens
  DOMAIN (110)..(129): MITOCHONDRIAL CARRIER PROTEIN SIGNATURE domain identified by eMATRIX, accession number PR00926D, p-value=3.250e-23, raw score of 10.53
  DOMAIN (24)..(216): Mitochondrial carrier proteins domain identified by PFam, accession name mito_carr, E-value=7.4e-37, PFam score of 129.3
  misc_feature (1)...(298): Xaa = X or * as defined in Table 2
VLTRLIRKRERRKAQSQRERCRCVLAKDFLAGGVTAAISKMAVAPTERVKLLLQVQSASKQITADKQYTGVVDCMVRIPKEQGVLSLWHGIQFWHKFAGSLASGGAPGATSLCFVYPLDFARTRLAADVGKAGAEREFRGLGXPAGLRIYKSDGKLRGLYQGFNVSVQGIIIYRAAYFGIYDTAKGMLPDPQNTHIVISWMIAQTVTAVARVDFPIPFDTVRRRNEXMQSRAPKELTIHVHQARFDCWAEGLLRDEGGKAFFKGAWVPMFLRGHGVGAFCALSLYGWKSKEGTHKLIS

SEQ ID NO: 49282 - protein, 80 aa, Homo sapiens
  misc_feature (1)...(80): Xaa = X or * as defined in Table 2
TERKKKGILPGNGNGFMSLRRTIRVWRNTPNYLGTNAVSPRQDXIGKKGVCQRKQAGPCPPSNIQGILEWRKHRISETKP

SEQ ID NO: 49283 - protein, 135 aa, Homo sapiens
DNEHRLTDVGSVKRVTSGPSLGSLPPAAMESMESLRLKDKNEPVQNLPIQKSIDDVDSKLKGIGKPRKFSKFSLYKQLHRHHLHDADSISSIDSTSNTGSIRSLQTGVGELHGETRFWHGKDYCNFVFKDWVQLD

SEQ ID NO: 49284 - protein, 436 aa, Homo sapiens
  DOMAIN (73)..(126): Clathrin light chain proteins domain identified by eMATRIX, accession number BL00224B, p-value=2.731e-10, raw score of 16.94
MTQHAGKRDSELPVIVQDTETVPSVMDGKEYQAGRFARGLRLQCFRRRRRRRRTRRRRRKEEEEEEEEEEEEEEEEVEEEGMKKEEEGRRRKKKKKKKAEEEEEKKKKEEEEKKRRRREEPPRPRNDDDARRRRKEEEEGRRRSMLGKRDSELPVIVQDTETVPSVMDGKEYQAGRFARGLRLQCFRRRRRRRRTRRRRRKEEEEEEEEEEEEEEEEVEEEGMKKEEEGRRRKKKKKKKAEEEEEKKKKEEEEKKRRRREEPPRPRNDDDARRRRKEEEEGRRRSMKKEEEEEEEEEEEEEEEEEEEEEEEKKKRRIGPASKMMGGFEELRRGLNVGPTMAIFFLQSAALAPAILYFCPSLKSNISKCNFQFLMFCQLLGRVTIPFLVSQRSRIEVGRHSLSTLNAETAHELYLGRTEPDECGKTAGLGTGLDLKV

SEQ ID NO: 49285 - protein, 126 aa, Homo sapiens
NQFFISCADDKVVFNKIGDAIAQRILKAHRENQKYRVYVVIPLLPGFEGDISTGGGNALQAIMHFNYRCQNSKWSILSFRSCIISMIILKANSCSNQGENQQPSSHWREQIRVKAPMSHSSHIVII

SEQ ID NO: 49286 - protein, 1125 aa, Homo sapiens
  DOMAIN (922)..(942): Phospholipase D Active site proteins motifs. domain identified by eMATRIX, accession number PF00614B, p-value=5.680e- 16, raw score of 14.45
  DOMAIN (105)..(235): PX domain identified by PFam, accession name PX, E-value=5.3e -28, PFam score of 106.5
  misc_feature (1)...(1125): Xaa = X or * as defined in Table 2
ESAANAQVLAAPSPCSPFAFTLSKVNMSLKNEPRVNTSALQKIAADMSNIIENLDTRELHFEGEEVDYDVSPSDPKIQEVYIPFSAIYNTQGFKEPNIQTYLSGCPIKAQVLEVERFTSTTRVPSINLYTIELTHGEFKWQVKRKFKHFQEFHRELLKYKAFIRIPIPTRRHTFRRQNVREEPREMPSLPRSSENMIREEQFLGRRKQLEDYLTKILKMPMYRNYHATTEFLDISQLSFIHDLGPKGIEGMIMKRSGGHRIPGLNCCGQGRACYRWSKRWLIVKDSFLLYMKPDSGAIAFVLLVDKEFKIKVGKKETETKYGIRIDNLSRTLILKCNSYRHARWWGGAIEEFIQKHGTNFLKDHRFGSYAAIQENALAKWYVNAKGYFEDVANAMEEANEEIFITDWWLSPEIFLKRPVVEGNRWRLDCILKRKAQQGVRIFIMLYKEVELALGINSEYTKRTLMRLHPNIKVMRHPDHVSSTVYLWAHHEKLVIIDQSVAFVGGIDLAYGRWDDNEHRLTDVGSVKRVTSGPSLGSLPPAAMESMESLRLKDKNEPVQNLPIQKSIDDVDSKLKGIGKPRKFSKFSLYKQLHRHHLHDADSISSIDSTSSYFNHYRSHHNLIHGLKPHFKLFHPSSESEQGLTRPHADTGSIRSLQTGVGELHGETRFWHGKDYCNFVFKDWVQLDKPFADFIDRYSTPRMPWHDIASAVHGKAARDVARHFIQRWNFTKIMKSKYRSLSYPFLLPKSQTTAHELRYQVPGSVHANVQLLRSAADWSAGIKYHEESIHAAYVHVIENSRHYIYIENQFFISCADDKVVFNKIGDAIAQRILKAHRENQKYRVYVVIPLLPGFEGDISTGGGNALQAIMHFNYRTMCRGENSILGQLKAELGNQWINYISFCGLRTHAELEGNLVTELIYVHSKLLIADDNTVIIGSANINDRSMLGKRDSEMAVIVQDTETVPSVMDGKEYQAGRFARGLRLQCFRVVLGYLDDPSEDIQDPVSDKFFKEVWVSTAARNATIYDKVFRCLPNDEVHNLIQLRDFNNQGPYLAXGKIPHRAEEELKKIRGFLVQFPLLFLCLKKALLPFLLGPKEAHSAPLKVWTLRDIHWQLQRLPPWRPHCTQ

SEQ ID NO: 49287 - protein, 37 aa, Homo sapiens
MEEEHELPVDMETINLDRDAEDVDLNHYRIGKIEGFE

SEQ ID NO: 49288 - protein, 85 aa, Homo sapiens
  DOMAIN (45)..(59): LEUCINE-RICH REPEAT SIGNATURE domain identified by eMATRIX, accession number PR00019B, p-value=5.320e-09, raw score of 11.36
  DOMAIN (25)..(68): Leucine Rich Repeat domain identified by PFam, accession name LRR, E-value=0.0036, PFam score of 24.0
METINLDRDAEDVDLNHYRIGKIEGFETLCLRQNLIKCIENLEELQSLRELDLYDNQIKKIENLDALTELEILDISFNLLRNIEG

SEQ ID NO: 49289 - protein, 412 aa, Homo sapiens
  DOMAIN (138)..(301): Leucine Rich Repeat domain identified by PFam, accession name LRR, E-value=7.3e-13, PFam score of 56.2
  misc_feature (1)...(412): Xaa = X or * as defined in Table 2
HASGGRAANMAADRGAVQQQSQDMMEVDRRVESEESGDEEGKKHSSGIVADLSEQSLKDGEEPGEEDPEEEHELPVDMETINLDRDAEDFDLNHYRIGKIEGFEVLEESXRLSCLRQNLIKCLENLGRELPESFRELDLYDNQIKKIENLEALTELEILDISFNLLRNIEGVDKLTRLKKLFLVNNKISKIENLSNLHQLRMLGAGDLNRIRGQFSKYPTTLTNLESWFLGKKTKITNFQNPGCASPNLTVLSMQSNRLTKIEGLQNLVNLRELYFSHNGIEVIEGLENNNKLTMLDIASNRIKKIXKISAHLTELQEFWDGTTIPLKSWSDLDELEGEPGALEDSVPWGGNPLARRTPKYRRKVMLALPSVRQDRCPRSVRFLKSFLGSLMWSLSSEELPSHGVFNPPCCS

SEQ ID NO: 49290 - protein, 142 aa, Homo sapiens
  DOMAIN (22)..(55): PROLINE-RICH PROTEIN 3 domain identified by eMATRIX, accession number DM00215, p-value=8.554e-10, raw score of 19.43
  misc_feature (1)...(142): Xaa = X or * as defined in Table 2
YREVMVSESXETPAGARGRPYYFSAPGTAPPAINVHPPPPSLSATPHPPQPQPPPPHQHNAKARVATIRTKRTSNCRIRSRKVRKSPPEKWVGFNRRPKASCPSPPGAARVDVGGETERREQAAAPGEMGKWARPGEEYFHS

SEQ ID NO: 49291 - protein, 60 aa, Homo sapiens
  DOMAIN (31)..(45): PMP-22 / EMP / MP20 family proteins domain identified by eMATRIX, accession number BL01221B, p-value=8.636e-12, raw score of 13.29
  misc_feature (1)...(60): Xaa = X or * as defined in Table 2
ENESRFSDRNQASAGLGYLSDSLXQWIVGNGHATDLWQNCSTSSSGNVHHCFSSSPNGSG

SEQ ID NO: 49292 - protein, 168 aa, Homo sapiens
  DOMAIN (7)..(35): PMP-22 / EMP / MP20 family proteins domain identified by eMATRIX, accession number BL01221A, p-value=2.250e-22, raw score of 17.26
  DOMAIN (7)..(168): PMP-22/EMP/MP20/Claudin family domain identified by PFam, accession name PMP22_Claudin, E-value=5.4e-44, PFam score of 159.6
  misc_feature (1)...(168): Xaa = X or * as defined in Table 2
AELAARMLLLLLSIIVLHVAALVLLFVSTIVSQWIVGNGHATDLWQNCSTSSSGNVHHCFSSSPNEWLQSCSRGTMDPVDSSFSILSLFLFFCQLFTLTKGGRFYITGIFQILAGLCVMSAAAIYTVRHPEWNLNSGYSXRFAXILAWVAFPLALLSGVIYVILRKRE

SEQ ID NO: 49293 - protein, 164 aa, Homo sapiens
  DOMAIN (74)..(98): Glycosyl transferases group 1 domain identified by eMATRIX, accession number PF00534B, p-value=4.857e-09, raw score of 14.47
  DOMAIN (77)..(131): Glycosyl transferases group 1 domain identified by PFam, accession name Glycos_transf_1, E-value=0.022, PFam score of 13.2
FPASRLVTLCSEPEDAAMERSAFMELDAGSRLVMHLREWPALLVSSTGWTEFEQLTLDGHNLPSLVCVITGSVDLGVCLHMSSSGLDLPMKVVDMFGCCLPVCAVNFKCLHELVKHEENGLVFEDSKELAALQMFFSHFPDPAGKLNQFWKDLRESQQLRWDES

SEQ ID NO: 49294 - protein, 67 aa, Homo sapiens
ESSHSQGKRFHMGKLIKLSLDWNVWRMLISKSGTTNCPLIRHRLSKRVGAPFLPAVLVLKEIAITQT

SEQ ID NO: 49295 - protein, 90 aa, Homo sapiens
IRGRLRTKSLSFHQGAPRGRRELQVHLLLLQEIPLPTGCLDELLKAAECPAAGSVDLGVCLDTSSSGLDLPMKVVDMFRSCLPACAVNFK

SEQ ID NO: 49296 - protein, 131 aa, Homo sapiens
  misc_feature (1)...(131): Xaa = X or * as defined in Table 2
XPEDAAMERSAFMELDAGSRLVMHLREWPALLVSSTGWTGSVDLGVCLHMPPSGPGLPHEGGGHVRVLFACKLNQFWKNLRELQQLRWDESWVQTVLPLVMDTQLLGQRLKPRDPCCPSRSFFSESQSKPF

SEQ ID NO: 49297 - protein, 52 aa, Homo sapiens
PETVSLQRALGDGKAEPHTVGLTHDSNGIVRIKSLSWEEFLYGKADKTFIGL

SEQ ID NO: 49298 - protein, 59 aa, Homo sapiens
MLSGNFPVCPTFPHLVPWSTFRPLHDVRSPVSTLLSASGQHSPTHLWVTRGCWCSFQPC

SEQ ID NO: 49299 - protein, 85 aa, Homo sapiens
  misc_feature (1)...(85): Xaa = X or * as defined in Table 2
ESSQSHGKNFYMGKRIKLSLYWNVWRMLNSKSETTNCPLIRHRLSKRVGAPFLPAVLVLTKITIYQTXKFQIRNHKLPSNKTSAI

SEQ ID NO: 49300 - protein, 478 aa, Homo sapiens
  DOMAIN (285)..(446): Glycosyl transferases group 1 domain identified by PFam, accession name Glycos_transf_1, E-value=0.00068, PFam score of 18.6
  misc_feature (1)...(478): Xaa = X or * as defined in Table 2
RHVVAVVLGDVGRSPRMQYHALSLAMHGFSVTLLGFCNSKPHDELLQNNRIQIVGLTELQSLAVGPRVFQYGVKVVLQAMYLLWKLMWREPGAYIFLQNPPGLPSIAVCWFVGCLCGSKLVIDWHNYGYSIMGLVHGPNHPLVLLAKWYEKFFGRLSHLNLCVTNAMREDLADNWHIRAVTVYDKPASFFKETPLDRTHRLFTKLTNMHSPFRARSEPEDPVTERSAFTERDAGSGLVTRLRERPALLVSSTSWTEDEDFSILLAALESRVXTTDSSIGHNLPSLVCVITGKGPPREYYSRLIHQKHFQHIQVCTPWLEAEDYPRILGSVDLGVCLHTSCSGLDLPMKVVDMFGCCLPVCAVNFKWQEQNPNLSGDSFTDPPLRRKQCRASCPQXGPAPGLHELVKHEENGLVFEDSEELAAQLQVLFSNFPDPAGKLNQFRKNLRESQQLRWDXSWGSATPNPMMSSCRTTEFRLWG

SEQ ID NO: 49301 - protein, 485 aa, Homo sapiens
  DOMAIN (336)..(402): Glycosyl transferases group 1 domain identified by PFam, accession name Glycos_transf_1, E-value=0.02, PFam score of 13.3
  misc_feature (1)...(485): Xaa = X or * as defined in Table 2
XAVVLGDVGRSPRMQYHALSLAMHGFSVTLLGFCNSKPHDELLQNNRIQIVGLTELQKSCSWAPSFPNPPRLPSIAVCWFVGCPCGSKLVIDWHNYGYSIMGLVHGPNHPLVLLAKWCTSSLRVHVQLLRVLPALGHWLAVAFALIVCSLAVVTAAANSLVEQMEQNGQWYEKFFGRLSHLNLCVTNAMREDLADNWHIRAVTVYDKPASFFKETPLDLQHRLFMKLGSMHSPFRARVFFCSFISEPEDPATERLAFTERDAGSRLVTLLHERPALLVSSTSWTEDEDFSILLAALESKGPLREYYSRLIHQKHFQHIQGRRTWVSVCTRPPSGLDLPMKVVDMFGCCLPVCAVNLKCLHELVKHEENGLVFEDSEELAAQLQMLFSNFPDPAGKLNQFRKNLRESQQLRWDESWVQTVLPLVMDTHQRAPEVYVAFTVRNPETCQLFTTELGRAGIRWEVEACHDQKLFPYKEHLEMAMLNLIL

SEQ ID NO: 49302 - protein, 155 aa, Homo sapiens
MASNVTNKTDPRSMNSRVFIGNLNTLVVKKSDVEAIFSNAPRTVTCVRKHFTKGAKVASILRVDSGDLSKSGKLKGDDLQAIKKELTPDKTKKWILFWENLEKMEKEQSKQAVEMKNDKSEEEQSSSSVKKDETNVKMESEGGADDSAEEGDLLG

SEQ ID NO: 49303 - protein, 373 aa, Homo sapiens
  misc_feature (1)...(373): Xaa = X or * as defined in Table 2
AVVAALPTSSSSRHSLTQKPGSRRLRIESLLPPSSCEIFLIFSYIFRLCEKPYHQTRSASNVTNKTDPRSMNSRVFIGNLNTLVVKKSDVEAIFSKYGKIVGCSVHKGLCLSVQVMLMRRNAPGLLXQGEDGRMIALGQVLDINLAAEPKVNREKSSVKRSAAEMYGSQXQNTLLRPLYFSSSFDLDYDFQRDYYDRMYSYPARVPPPPPIARAVVPSKRQRVSGNTSRSGPRGFNSKEWNSGVSSKFWKRXKGDDLQAIKEELTQINQKVDSLLENLEKIEKATGANKQLEMKNDKSEEEQSSSSREGKMRTNVKDGVXGGVPDDSAEGGGPTWMNDDNVKSGGMTSWELIKDDEKEAEEGEDDRDSANGGG

SEQ ID NO: 49304 - protein, 71 aa, Homo sapiens
  misc_feature (1)...(71): Xaa = X or * as defined in Table 2
QARAFLSINILNESKALMNRAAHNFAILRKDCLHIQISLTTRVLRFPMNTREFMERGSVLLVTLLAIVFDX

SEQ ID NO: 49305 - protein, 82 aa, Homo sapiens
PTRPPTRPPTRPEETKTERLWPRCRPPAAVGFSTQNPGVGDSESNLFSLPFLVSGEGGRREGAGFFGKREGVWERRCGNPSP

SEQ ID NO: 49306 - protein, 122 aa, Homo sapiens
MIAGQVLDINLAAEPKVNRGKAGVKRICKRRCTGSSYDLDYDFQRDYYDRMYSYPARVPPPPPIARAVVPSKRQRVSGNTSRRGKSGFNSKSGQRGSSKSGKLKGDDLQAIKKELTPDKTKN

SEQ ID NO: 49307 - protein, 355 aa, Homo sapiens
  misc_feature (1)...(355): Xaa = X or * as defined in Table 2
SGLFLFLFFYSEIFLIFSYIFRLCEKPYHQTRSASNVTNKTDPRSMNSRVFIGNLNTLVVKKSDVEAIFSKYGKIVGCSCFIKGFAFPFKXCXXEEMPRACCSGRRVGRIDLLGQVLDIXPGLAEPKVNPREKPGVETILPAGDVRGQXQNTLLRPLYFSSSFDLDYDFQRDYYDRMYSYPARVPPPPPIARAVVPSKRQRVSGNTSRRGKSGFNSKEWNSGVSSKFWKRXKGDDLQAIKEELTQINQKVDSLLENLEKIEKATGANKQLEMKNDKSEEEQSSSSREGKMRTNVKDGVXGGVPDDSAEEGGPTWMNDDNVKSGGMTSWELIKDDEKEAEEGEDDKRQGPMARNDS

SEQ ID NO: 49308 - protein, 273 aa, Homo sapiens
  DOMAIN (88)..(120): Phosphoglycerate mutase family phosphohistidine proteins domain identified by eMATRIX, accession number BL00175C, p-value= 5.000e-25, raw score of 23.75
  DOMAIN (16)..(229): Phosphoglycerate mutase family domain identified by PFam, accession name PGAM, E-value=4.7e-44, PFam score of 159.8
  misc_feature (1)...(273): Xaa = X or * as defined in Table 2
KRLGSSAISMSKYKLIMLRHGEGAWNKENRFCSWVDQKLNSEGMEEARNCGKQLKALNFEFDLVFTSVLNRAIPTARLILEELGQEWVPVESSWRLNERHYGALIGLNREQMALNHGEEQVRLWRRSYNVTPPPIEESHPYYQEIYNRPGGIKVCDVPLDQLPRSESLKDVLERFLPYWNERIAPEVLRGKTILISAHGKXAVGALLKHLGRYPSGLKTSINIYSFLLGVPILLELDENLRAVGPHQFLGDQEAIQAAIKKVEDQGKVKQAKK

SEQ ID NO: 49309 - protein, 171 aa, Homo sapiens
  misc_feature (1)...(171): Xaa = X or * as defined in Table 2
SASWVGVAMASRVLSAYVSRLPARFAPXPRVRMLAVARHLSTALCSEGTQTRLGTLQPALVLAQVPWXELHMLCRQYSDMPPRLTLEGIQDRVRLAXLKTLSDKVDPREAFQXILHFMKDLGLDSLDPKWKIIMALEDEFGFEIPDIDAEKLMTPPRKLVDLHCQDKKDGI

SEQ ID NO: 49310 - protein, 169 aa, Homo sapiens
  DOMAIN (73)..(92): GLUTAREDOXIN SIGNATURE domain identified by eMATRIX, accession number PR00160A, p-value=3.681e-11, raw score of 18.93
  DOMAIN (76)..(141): Glutaredoxin domain identified by PFam, accession name glutaredoxin, E-value=0.001, PFam score of 25.8
  misc_feature (1)...(169): Xaa = X or * as defined in Table 2
IRALTMIWRRALLAGTRLVWSRSGSAGWLDRAAGLRDCGTAASGMESNTSSSLENLATAPVNQIQETISDNCVVIFSKTSCSYCTMAKKLFHDMNVNYKVVELDLLEYGNQFQDASLQKXLVERTVPRIFVNGTFIGGATDTHRLHKEGKLLPLVHQCYLKKSKRKEFQ

SEQ ID NO: 49311 - protein, 85 aa, Homo sapiens
  misc_feature (1)...(85): Xaa = X or * as defined in Table 2
KRKIHQNFHKLSLKKAIEKDYSESGSSVNQYKRIRPTDNVVIKQYWPGAVAHTCNSSTSVGQGRWITXGQEFETSLANVVKPHLY

SEQ ID NO: 49312 - protein, 116 aa, Homo sapiens
RQVPFPFSRRCSSPLICAGLFTTSFTSCSTESVCRVLRAQTRSTRVCWTCLPRGPLGLWVAPLVAVYAVATPFVTPALRKVCLPFVPATTKQIENVVKMLRCRRGSLVDIGSGDGR

SEQ ID NO: 49313 - protein, 248 aa, Homo sapiens
  misc_feature (1)...(248): Xaa = X or * as defined in Table 2
FKNAVGNLAMEGGGGIPLETLKEESQSRHVLPASFEVNSLQKSNWGFLLTGLVGGTLVAVYAVATPFVTPALRKVCLPFVPATTKQIENVVKMLRCRRRDPLWDIGSGGRDGIVHRRLRRKGFTAVGFMEFKPMGXFWVFPRYRAWREGVHGSAKFYISDLWKVTFSQYSNVVIFGVPQMMLQLEKKLERELEDDARVIACRFPFPHWTPDHVTGKGIDTVWAYDASTFRGREKRPCTSMHFQLPIQA

SEQ ID NO: 49314 - protein, 220 aa, Homo sapiens
  DOMAIN (41)..(64): HIGH MOBILITY GROUP (HMG1/HMG2) PROTEIN SIGNATURE domain identified by eMATRIX, accession number PR00886A, p-value=9.357e- 27, raw score of 10.08
  DOMAIN (7)..(180): HMG (high mobility group) box domain identified by PFam, accession name HMG_box, E-value=0.0011, PFam score of 8.4
  misc_feature (1)...(220): Xaa = X or * as defined in Table 2
TWGKGDPKKPRGKMSSYAFFVQTCRGGHKKKHPDASVNFSEFSKKCSERWKTMSAXREKGKFEDMAKADKARYEREMKTYIPPQRGRQKRKFKDSQLHPRRPPSGLLSSSCSEYRPKIKGEHPGLSIGDVAKKLGRDVGINTAADDKQPYEKKAAKLKEKYEKDIAAYRAKGKPDAAKKGVVKAEKSKKKKEEEEDEEDEEDEEEEEDEEDEEDEEEDDG

SEQ ID NO: 49315 - protein, 60 aa, Homo sapiens
  misc_feature (1)...(60): Xaa = X or * as defined in Table 2
GHLSHAWCGTYKPWPSPKEQSRAWKKDGLLFPPPPPLFPTGLKVRGRESFXSVELIRPQG

SEQ ID NO: 49316 - protein, 386 aa, Homo sapiens
  DOMAIN (233)..(276): 1 kw MIND INHIBITOR DIVISION CONTROL domain identified by eMATRIX, accession number DM01756B, p-value=4.822e-15, raw score of 22.91
  DOMAIN (198)..(312): ParA family ATPase domain identified by PFam, accession name ParA, E-value=2.7e-28, PFam score of 107.5
MKTLPNISDLCLRDVPPVPTLADIAWIAADEEETYARVRSDTRPLRHTWKPSPLIVMQRNASVPNLRGSEERLLALKKPALPALSRTTELQDELSHLRSQIAKIVAADAELQWNGKQRPPHGTRECEEKRMKEDFTDCSCCCKKHLRQLVWEPQITHLHIHAEDTLLPFYLGEKDDVTYAIKPTCWPGLDIIPSCLALHRIETELMGKFDEGKLPTDPHLMLRLAIETVAHDYDVIVIDSAPNLGIGTINVVCAADVLIVPTPAELFDYTSALQFFDMLRDLLKNVDLKGFEPDVRILLTKYSNSNGSQSPWMEEQIRDAWGSMVLKNVVRETDEVGKGQIRMRTVFEQAIDQRSSTGAWRNALSIWEPVCNEIFDRLIKPRWEDR

SEQ ID NO: 49317 - protein, 21 aa, Homo sapiens
KEKPPWRPIRKPPLPARWPIH

SEQ ID NO: 49318 - protein, 325 aa, Homo sapiens
  misc_feature (1)...(325): Xaa = X or * as defined in Table 2
YEGVTTSRLPELPRGCLVLQEQELVQMSGMEATVTIPIWQNKPHGCSLRSVVRRIGTNLPLKPCARASFETLPNISDLCLKRCAPSSLPWLAWLGFLAEXKGSQKARVRSDTRPLRHTWKPSPLIVMQRNASVPNLRGSEERLLALKKPALASPKAALLSCRTSXATLRTKICKDSGKLMQLRLHXRQISYLQEVQMSLLPLPCFGSSFHSTTSFCHXXPSPRRQRWRSLSFHQSPCFVLPALNVANQNTKLPAVRLKRMTASLCPRPAALQDMMGILKGLFTGMKQSQDLNRSLLKEEDPAVLISEVLRRKFALKEEDISRKGN

SEQ ID NO: 49319 - protein, 417 aa, Homo sapiens
  misc_feature (1)...(417): Xaa = X or * as defined in Table 2
GQASCPPPALGQQTPASSYTVQIQTYAPSSPHPRQGPGQGSSDPRGLRGAIPRGRQGQGVXQQGPRCRPPSSPVLPHIPQLSCCGHDGRDPEEGLGILELTLLHHAHPWSPNSWXKDSPSPHGEFPAHSEPHSRDQTSPMATTKHEVQPLPQASLSQPSLGIGCLVDWLRQLRTTQGSPQDAAQDSTWERPXDASGKPWLLXPGVPTPGPPCQAKERKPPFMGNCPLXSRVPWPSRLPEELPAMPLAPPVAGEAAGPASSHQSLSPSQDPTPLPGADRREKERGGEEGSSWPQTPRLTTHTTSPPPEKQQQIESPPIRLSSFKTGFHLASSGHSYAIKPNSKTKAEKVGQVRVPRSHTIREQRQGKRPGEHHRRTERDAKPQGEEDHQATVVSQKLGTDRRLIKKQRTSVLSATAES

SEQ ID NO: 49320 - protein, 236 aa, Homo sapiens
  misc_feature (1)...(236): Xaa = X or * as defined in Table 2
GSVGSGTTLNQLGFWSSPGTSPLEPPCPWLDSHIFPVPFWKDVAFGEGVCLPPGAPQPRRICPRRGQQPEFQQEEPETIPERTPADPGVLPPAFPGICLPRRLRAPPDPGPAAXAVPPVADAXGSVGSGTTLNQLGFWSSPGTSPLEPPCPWLDSHIFPVPFWKDVAFGEGVCLPPGAPQPRRICPRRGQQPEFQQEEPETIPERTPADPGVLPPAFPGICLPRRLRAPPDPGPAA

SEQ ID NO: 49321 - protein, 131 aa, Homo sapiens
  misc_feature (1)...(131): Xaa = X or * as defined in Table 2
IPLASLHLALPGHQRGPPPGRLPSCSSQGTVPPPRAGPYQAGCPGTAPAPAAPASAPWSAPQASATGGTAHAAGPGSGGARSLPPARAHPPARCWQGRPLRSLLLXPSSVPETGGPEKARLVKALSPNTAP

SEQ ID NO: 49322 - protein, 235 aa, Homo sapiens
  DOMAIN (68)..(112): Synapsins proteins domain identified by eMATRIX, accession number BL00415N, p-value=9.277e-09, raw score of 4.29
  misc_feature (1)...(235): Xaa = X or * as defined in Table 2
LEESTGRITHFKATLHCTMSNNLAWGGTKWLQESRVFFHIRRLPSDASAGPGCVYRVVPDGGSQGRPQGAPPXAAQAGTPRGRPPPGAPSALLPPPPSGTSVGPGGLQQRRPPTGQEDSPTEPGFWKPRLWRSHLATSLATRCTMQGEPARAHPPGGRGPAASEERHQRGPPPGGCFAALRYCATPRPDLSGRCPGTAPAPAAPASAPWTRLRHQPLAAQLMQPGQVWWGPAASW

SEQ ID NO: 49323 - protein, 387 aa, Homo sapiens
MELKAKARELREECRSLRSRCDQLEERVSVMENEMNEMKREGKFREKRIKRNEQSLQEIWDYVKRPNLHLIGVPESDGENGTKLENTLQDIIQENFPNLARQANIQIQEIQRTPQRYSSRRATPRHIIVRITKVEMKEKMLRAAREKGRVPHKGKPIRLTADLSSETLQARREWGPIFNILKRIFSFPQRGGTGGRRMVKLTAELIEQAAQYTSAVRDRELDLRGYKIPVIENLGATLDQFDAIDFSDNEIRKLDGFPLLRRLKTLLVNNNRICRVLDFQKVKLKERQEAEKMFKGKRGAQLAKDIARRSKTFNPGAGLPTDKKKGGPSPGDVEAIKNAIANASTLAEVERLKGLLQSGQIPGRERRLGPTDDGEEEMEEDTVTNGS

SEQ ID NO: 49324 - protein, 143 aa, Homo sapiens
  DOMAIN (11)..(59): Leucine Rich Repeat domain identified by PFam, accession name LRR, E-value=0.01, PFam score of 22.5
RKLDGFPLLRRLKTLLVNNNRICRIGEGLDQALPCLTELILTNNSLVELGDLDPLASLKSLTYLSILRNPVTNKKHYRLYVIYKVPQVRVLDFQKVKLKFNPGAGLPTDKKKGGPSPGDVEAIKNAIANASTLAEVERLKGLL

SEQ ID NO: 49325 - protein, 70 aa, Homo sapiens
  misc_feature (1)...(70): Xaa = X or * as defined in Table 2
NCFLVFSPARSTVGEFASMSSEECIXMHVVFLFPLTLCVVSLYERQEAEKMFKGKRGAQLAKDIARRSKT

SEQ ID NO: 49326 - protein, 28 aa, Homo sapiens
LLLLWWFPLGPTDDGEEEMEEDTVTNGS

SEQ ID NO: 49327 - protein, 290 aa, Homo sapiens
  misc_feature (1)...(290): Xaa = X or * as defined in Table 2
ARNPWSTHASGWREATGFPQRGGTAGCTMGKLTAELIEQAAQYTNAVRDRELDLRGYKIPVIENLGATLDQFDAIDFSDNEIRKLDGFPLLRRLKTLLVDTTRICGIGEGLDQALPCLTELILTNNSLVELGDLDPLASLKSVAYLTYLRNPVTHKKHYRLYAIYKAPHVRVLDFQNVKLKERQKAEKMSKGKRGAQLAKDIARRSKTFXFPGAGLPNXPKRKGGPSLPGDVEAIQECPXQNAFNSGLKVERLKGVCCKSGQIPGRERRSGPTDDGEEEMEEDTSHQTGS

SEQ ID NO: 49328 - protein, 131 aa, Homo sapiens
AINYNEKIYELRVMETKPDKAVSIIECDMNVDFDAPLGYKEPERQVQHEESTEGEADHSGYAGELGFRAFSGSGNRLDGKKKGVEPSPSPIKPGDIKRGIPNYEFKLGEAGGRFVAFSGEGQSLRKKGRKP

SEQ ID NO: 49329 - protein, 369 aa, Homo sapiens
GTRKSGRRGFFVALPERSGVCQVVSIMFSFNMFDHPIPRVFQNRFSTQYRCFSVSMLAWPNDRSDVEKGGKIIMPPSALDQLSRLNITYPMLFKLTNKNSDRMTHCGVLEFVADEGICYLPHWMMQNLLLEEDGLVQLETVNLQVATYSKSKFCYLPHWMMQNLLLEEGGLVQVESVNLQVATYSKFQPQSADFLDITNPKAVLENALRNFACLTTGDVIAINYNEKIYELRVMETKPDKAVSIHECDMNVDFDAPLGYKEPERQVQHEESTEGEADHSGYAGELGFRAFSGSGNRLDGKKKGVEPSPSPIKPGDIKRGIPNYEFKLGKITFIRNSRPLVKKVEEDEAGGRFVAFSGEGQSLRKKGRKP

SEQ ID NO: 49330 - protein, 114 aa, Homo sapiens
GSLFLVKRREPERQVQHEELTEGEADHSGYAGELGFRAFSGSGNRLDGKKESPSPIKPGDIKRGIPNHEFKLGKTPFIRNACPLVKKFEEDEAGGRFVAFSGEGQSLSKKGRKP

SEQ ID NO: 49331 - protein, 365 aa, Homo sapiens
  misc_feature (1)...(365): Xaa = X or * as defined in Table 2
RLGAAAAAAAAGRAVGGVSSLHCPERSGVCQVVSIMFSFNMFDHPIPRVFQNRFSTQYRCFSLSMLAGPNDRSSIGEKEGKIIMPPLGPGTKLSRLXHYRIPMLFKLTNKNSGPHGRHCGVAGSLWAXXGASAYLPHWDDGRTYSLGRKAAWVQGGRSVNLSSGPLISNFQPQSPDFLDITNPKAVFENALRNFALSXPPGDVIAINYNEKILRNCVVMETQTPTRPVSHHXSVNHXTVELXLLPPGATKEPRKDQVQPXGVRTEGESRPHSGYAWKSLGFPRFSRGSGNRLDGKKKGVEPSPSPIKPGDIKRGIPNYEFKLGKITFVSRNSRPLVKKVEEDEAGGRFVAFSGEGQSLRKKGRKP

SEQ ID NO: 49332 - protein, 137 aa, Homo sapiens
  DOMAIN (80)..(109): TROPOMYOSIN SIGNATURE domain identified by eMATRIX, accession number PR00194C, p-value=1.900e-35, raw score of 6.38
  DOMAIN (28)..(137): Tropomyosins domain identified by PFam, accession name Tropomyosin, E-value=1.8e-54, PFam score of 172.2
SGGGRNRSATGSWVGTMAGITTIEAVKRKIQVLQQQADDAEERAERLQREVEGERRARERGMKVIENRALKDEEKMELQEIQLKEAKHIAEEADRKYEEVARKLVIIEGDLERTEEPSLSWQESKCSELEEELKNVT

SEQ ID NO: 49333 - protein, 140 aa, Homo sapiens; identical to SEQ ID NO: 41929
  DOMAIN (11)..(37): TROPOMYOSIN SIGNATURE domain identified by eMATRIX, accession number PR00194E, p-value=1.000e-30, raw score of 8.74
  DOMAIN (1)..(59): Tropomyosins domain identified by PFam, accession name Tropomyosin, E-value=2.4e-36, PFam score of 115.8

SEQ ID NO: 49334 - protein, 106 aa, Homo sapiens
  DOMAIN (65)..(83): TROPOMYOSIN SIGNATURE domain identified by eMATRIX, accession number PR00194A, p-value=5.500e-22, raw score of 7.86
  DOMAIN (29)..(106): Tropomyosins domain identified by PFam, accession name Tropomyosin, E-value=9.6e-46, PFam score of 145.0
PSGGGRNRSASSSWVGTMAGITTIEAVKRKIQVLQQQADDAEERAERLQREVEGERRAREQAEAEVASLNRRIQLVEEELDRAQERLATALQKLEEAEKAADESER

SEQ ID NO: 49335 - protein, 444 aa, Homo sapiens
  DOMAIN (391)..(417): TROPOMYOSIN SIGNATURE domain identified by eMATRIX, accession number PR00194E, p-value=6.559e-25, raw score of 8.74
  DOMAIN (233)..(444): Tropomyosins domain identified by PFam, accession name Tropomyosin, E-value=3.2e-133, PFam score of 417.4
MNAGRRGFWCLAQGASARQRKVGGEMEKYRDTWEREKWLRGDVEGRYVMQESQARVTEVQGGKRGRNRNAREAFTEIDKQRGRSCKKEAGVEKWTETMGRERRERKDWNSLESLEEDRKMRESLEHARDLLNCCDQNADHHMDSEVQAEVVSEGDEELIGKWSKAYCHRCEQKDDLKWELIFKREAEHKSLEILQPDHVVEKKNPGGGRNQSTSSSWVGTVAEITTIEAVKCKIQVLQQQADDAEERAEHLQREVEGERQAREEAEAEVASLNRRIQLVEEELDHAQEYLATALQKLEEAEKAADESEREAKHIAEEADRKYEEVAHKLVIIEGDLEGTEERAELGESRCQEMDEQIRLMDQNLKCLSAAEEMYSQKEDKYEEEIKILTDKLKEAETSAEFAERSVAKLEKTIDDLEDKLKRTKEEHLCTQRMLDQTLIDLNEM

SEQ ID NO: 49336 - protein, 145 aa, Homo sapiens
  DOMAIN (89)..(138): Tropomyosins proteins domain identified by eMATRIX, accession number BL00326B, p-value=1.000e-40, raw score of 7.68
  DOMAIN (14)..(145): Tropomyosins domain identified by PFam, accession name Tropomyosin, E-value=2.6e-56, PFam score of 177.9
AYQQPLLMMEAIKKKMQMLKLDKENALDRAEQAEAEQKQAEERSKQLEDELAAMQKKLKGTEDELDKYSEALKDAQEKLELAEKKAADAEAEVASLNRRIQLVEEELDRAQERLATALQKLEEAEKAADESERGMKVIENRALKD

SEQ ID NO: 49337 - protein, 263 aa, Homo sapiens
  DOMAIN (55)..(73): TROPOMYOSIN SIGNATURE domain identified by eMATRIX, accession number PR00194A, p-value=5.500e-22, raw score of 7.86
  DOMAIN (19)..(263): Tropomyosins domain identified by PFam, accession name Tropomyosin, E-value=1.3e-74, PFam score of 234.9
  misc_feature (1)...(263): Xaa = X or * as defined in Table 2
AVSWVGTMAGITTIEAVKRKIQVLQQQADDAEERAERSQREFREERRAREQAEAEVASLNRRIQLVEEELDRAQERLGHCPCKKLXRSXKKLADESERRYXRLFENRALKRLKEKIGTSREIPTSKKPKHHCRKEADRKYEEVARKLGDHLKEDLERTEERAELAESRCXEIDEQIRLIDQNLQCLSAAEDKYSQKEDKWEEEMKILTDNLKEAETHAELAERSVAKLEKTIDDLEDKLKCTKEEHLCTQRMLDQTLLDLNEM

SEQ ID NO: 49338 - protein, 271 aa, Homo sapiens
  DOMAIN (161)..(204): 'Homeobox' domain proteins domain identified by eMATRIX, accession number BL00027, p-value=2.286e-31, raw score of 26.43
  DOMAIN (147)..(203): Homeobox domain identified by PFam, accession name homeobox, E-value=4.7e-31, PFam score of 116.6
GREVMASPSKGNDLFSPDEEGPAVVAGPGPGPGGAEGAAEERRVKVSSLPFSVEALMSDKKPPKEASPLPAESASAGATLRPLLLSGHGAREAHSPGPLVKPFETASVKSENSEDGAAWMQEPGRYSPPPRHTSPTTCTLRKHKTNRKPRTPFTTSQLLALERKFRQKQYLSIAERAEFSSSLNLTETQVKIWFQNRRAKAKRLQEAELEKLKMAAKPMLPSSFSLPFPISSPLQAASIYGASYPFHRPVLPIPPVGLYATPVGYGMYHLS

SEQ ID NO: 49339 - protein, 338 aa, Homo sapiens
  DOMAIN (223)..(242): Eukaryotic  RNA-binding region RNP-1 proteins domain identified by eMATRIX, accession number BL00030A, p-value=9.438e- 12, raw score of 14.39
  DOMAIN (223)..(290): RNA recognition motif. domain identified by PFam, accession name rrm, E-value=1.5e-08, PFam score of 41.8
MWDAELEYIWSPEGHCLTPARCCDRAGTVTRSSKGHSAFLSSQLLRYDGEHEGHGPGPLLSVPVGPVDTEADVCVSVSLCRGAHGAHDLCPQLACSSVGHACIYIYTWPFTPFLMDKAVSISYTVMTPMLNPMIYTLRNQDMKAAMRRLGKCLVICRELNFKVQGSSQDGWDLWVCGQDRKKQVFPRPVCLVGRPVLESALFVTAMSGGGVIRGPAGNNDCRIYVGNLPPDIRTKDIEDVFYKYGAIRDIDLKNRRGGPPFAFVEFEDPRRLSSAIRAKREEPFLFTGTSGHGISAHQKASVGAHTLQEASGKLAEPPRSSLGVGKTESKDVIKCKTK

SEQ ID NO: 49340 - protein, 549 aa, Homo sapiens
  DOMAIN (438)..(481): 'Homeobox' domain proteins domain identified by eMATRIX, accession number BL00027, p-value=7.750e-17, raw score of 26.43
  DOMAIN (42)..(288): 7 transmembrane receptor (rhodopsin family) domain identified by PFam, accession name 7tm_1, E-value=4.9e-28, PFam score of 91.2
  misc_feature (1)...(549): Xaa = X or * as defined in Table 2
MGFHHVGQAALELLTSGFSQTQELQKFLFLLFLLVYVTTIVGNLLIMVTVTFDCRLHTPMYFLLRNLALIDLCYSTVTSPKMLVDFLHETKTISYQGCMAQIFFFHLLGGGTVFFLSVMAYDRYIAISQPLRYVTIMNTQLCVGLVVAAWVGGFVHSIVQLALILPLPFCGPNILDNFYCDVPQVLRLACTDTSLLEFLMISNSGLLVIIWFLLLLISYTVILVMLRSHSGKARRKAASTCTTHIIVVSMIFIPCIYIYTWPFTPFLMDKAVSISYTVMTPMLNPMIYTLRNQDMKAAMRRLGKCLKGPAVAVGPGPGPGDAEAAAEERRVKVSSLPYSVDALVSDKKPPKEASPVPAKSASSGATLRLLLLPGHGAREAHSPGPLIKPFETASVKWENSQDGAAWMQEPCXYSPPPRHKHKTNPKPRTAFTTSQLLALEGKLLQKQYLSIAEGADFSSSPNLTETQVKILFQNRRAKTKRLQESELEKLKMAAKPMLPSSFSLPFPISSPLQAASIYAASYPFHRPVLPIPPVGLYATPVGYGMYHLS

SEQ ID NO: 49341 - protein, 127 aa, Homo sapiens
  misc_feature (1)...(127): Xaa = X or * as defined in Table 2
MASPSKGNDLFSPDEEGPAVVAGPGPGPGGAEGAAEERRVKVSSLPFSVEALMSDKKPPKEASPLPAESASAGATLRPLLLSGHGAREAHSPGPLVKPFETASVKSENSEDGAAWMQEPGRYSPPPX

SEQ ID NO: 49342 - protein, 297 aa, Homo sapiens
  DOMAIN (174)..(218): Ribosomal protein S19e proteins domain identified by eMATRIX, accession number BL00628B, p-value=9.556e-14, raw score of 21.41
  DOMAIN (133)..(289): Ribosomal protein S19e domain identified by PFam, accession name Ribosomal_S19e, E-value=5.5e-30, PFam score of 113.0
  misc_feature (1)...(297): Xaa = X or * as defined in Table 2
METEALMPGLGVAVAGAQVTLGFLALETQLPFTGHKRILRLFFSSPRDPPHVPSKGLKRKWGARRGRTFALREAEPQRLPSLSRAFGTLARPYARLVRPGNPVVPFPLAGSAEAARAAATCERQARTCPMPGVTVKDVNQQEFVRALAAFLKKSXVGKLKVPEWVDTVKLAKHKELAPYDENWFYTRAASTAQAPCTIRGGAGVGSMTKIYGGRQRNGVMPSHFSRGSKSVARRVPPKPWRGXKMVEKGTKNCGPQNLTPSRDKRDFGTEFAGQVAAANKEALEQIHCFGLIKLAHS

SEQ ID NO: 49343 - protein, 222 aa, Homo sapiens
  DOMAIN (44)..(196): Ribosomal protein S19e domain identified by PFam, accession name Ribosomal_S19e, E-value=0.00038, PFam score of -35.7
  misc_feature (1)...(222): Xaa = X or * as defined in Table 2
AGPDAEASERVPEGPEAPGAGPSRPLEPRPRASGRPGHGRCLGVTVKDVNQQEVRHELWAAFLSKSLRLRVSXTVPEWLDTVQAGQAQKSLLPYDENWFYHAELASTARHLYHPGSALGVGSMTKIYGGTSDETASMPKPLSARGFQEIWARRVLQSPGRGLKMGGKRDQELRAAKLDTFKGQKRFWDRIRRNRLAVAYKEALEQTMAGVNKLPQFVKKKKK

SEQ ID NO: 49344 - protein, 142 aa, Homo sapiens
HPVRFFVHRGPHVDFSLEVVSQWYELVVFTASMEIYGSAVADKLDNSRSILKRRYYRQHCTLELGSYIKDLSVVHSDLSSIVILDNSPGAYRSHPDNAIPIKSWFSDPSDTALLNLLPMLDALRFTADVRSVLSRNLHQHRL

SEQ ID NO: 49345 - protein, 273 aa, Homo sapiens
  misc_feature (1)...(273): Xaa = X or * as defined in Table 2
WNSAELGRGGPGAGGAGVIGMMRTQCLLGLRTFVAFAAKLWSFFIYLLRRQIRTVIQYQTVRYDILPLSPVSRNRLAQVKRKILVLDLDETLIHSHHDGVLRPTVRPGTPPDFILKVVIDKHPVRFFVHKRPHVDFFLEVVSQWYELVVFTASMEIYGSAVGRLNWDNSRSILXGGRYYRQHCTLELGSYIKDPLLWFHSDLSGIVILDNSPGAYRSHPGYGGRDNAIPIKSWVSVTPANTAILNLLPMLDALRFTADVRSVLSRNLHQHRLW

SEQ ID NO: 49346 - protein, 45 aa, Homo sapiens
MAAFPHKIIFFLECSTLTHVAFSEGGRRAQVREDVTMEAEVRMVQ

SEQ ID NO: 49347 - protein, 42 aa, Homo sapiens
GIFNKRDFTRWPKPRCKMYIPLDPDYNADCPNVTAPVCASNG

SEQ ID NO: 49348 - protein, 63 aa, Homo sapiens
  misc_feature (1)...(63): Xaa = X or * as defined in Table 2
QWISLWKCYKPEESGGQYLIFLKKSIFNDEFHVKPNXASXGKEKXTPLQTSNCXGILSPPGLP

SEQ ID NO: 49349 - protein, 129 aa, Homo sapiens
MEEIEDAIKKQMEDLLARWPNRNSSRLQLPTKRFPLVPTPPRSWVLSTKLGGRLGRHRASCRSFFSIPRWHLECQQDRTIHSPGKGAEAQGAKWSFLSRSQPHGAQQAKIHWLEILHYQHSSLKSTWDT

SEQ ID NO: 49350 - protein, 71 aa, Homo sapiens
  DOMAIN (28)..(51): Kazal serine protease inhibitors family proteins domain identified by eMATRIX, accession number BL00282, p-value=8.759e-14, raw score of 16.88
  DOMAIN (25)..(71): Kazal-type serine protease inhibitor domain identified by PFam, accession name kazal, E-value=1.8e-06, PFam score of 34.9
  misc_feature (1)...(71): Xaa = X or * as defined in Table 2
ARPLGSLASAPFPAPMXNVYPTGPXYNADCPNVTAPVCASNGHTFQNECFFCVEQREFHYRIKFEKYGKCD

SEQ ID NO: 49351 - protein, 77 aa, Homo sapiens
  misc_feature (1)...(77): Xaa = X or * as defined in Table 2
KGRFVIALTFTTXHSNLEKSCSKICKIKNKSLVCKHQLAKSIQSPSXXWNGMNNXFTTLFICCHNTEKTFIHCGKRP

SEQ ID NO: 49352 - protein, 88 aa, Homo sapiens
  misc_feature (1)...(88): Xaa = X or * as defined in Table 2
NKYQTDNIKLSDNDLTIGHQTGNTTAHCRYIMLFRSFQQMAITTILSXYRKNIYPLWKETLKRMWQRHREKVGSFEKVNDIKILFHHW

SEQ ID NO: 49353 - protein, 212 aa, Homo sapiens
MLQRACPAAEGDPRSVVPSRSGAAAALTVFVVKGELQRVLQQGPEHAVGRRDKDEQRKCFPEMESTPSDDAVFIVETPAKDLEYYINLVRIAVAGFERIDSNFERGSTVSKMLSNNTACYRKMFPETKSQLMQPTSLSCYFKKTATTTPSFSNHHPDRLVATNIKSRPIISKSGPLKAQEFPADGHHNNTVIIQKKHLSTVERDPEENVAKA

SEQ ID NO: 49354 - protein, 53 aa, Homo sapiens
  DOMAIN (20)..(37): Transcriptional regulatory protein, C ter domain identified by PFam, accession name trans_reg_C, E-value=0.077, PFam score of 10.8
  misc_feature (1)...(53): Xaa = X or * as defined in Table 2
NLHSQMLWNQRIRXLTSVXLELLCKNPNRVATRDQLLCLSGHLGMGRILELGG

SEQ ID NO: 49355 - protein, 151 aa, Homo sapiens
  DOMAIN (8)..(53): kw TRANSCRIPTASE REVERSE II ORF2 domain identified by eMATRIX, accession number DM01354N, p-value=6.231e-11, raw score of 13.17
  misc_feature (1)...(151): Xaa = X or * as defined in Table 2
YKNTITDYYEHLYAHKLENLEEMNKRRASTICTETIPKKLRRRDSSLTHSMRARRLSVDVKPQDRSRGPSECTIFRAGVPEGTRGALWLPHFQTESDPGSKPAITLLVIHPDELQIYVRTKTCTRMFIAALFIIAKTXKQPRYPSCLITST

SEQ ID NO: 49356 - protein, 352 aa, Homo sapiens
  misc_feature (1)...(352): Xaa = X or * as defined in Table 2
LCFFGQHAPIYCSLRHSLLSYTRPASLICCLPGSHRYLEFVLLLLKHHRLHEDLNHCPIGSRSGRDVRSQTTQEQHVIAMPFPLRKLEPLHSGLYSHSCCSRYLAGWLALATGGAARSPPAISILQPQEPSVTPSDTQRACGRSTEAFESKEQKASVRVETTVSFSCSIKVDGGLLEPKRADTGWHGHHCRPASITPAGWVPARYLLYVFFSRQCVLSMVCGPQYTRGEIPGAVLKEECLPSLLTGRFDLSGRARRLSVDVKPQDRSRGPSECTIFRAGVPEGTRGVLWLPHFQTESDPGSKPAITLLVIHPDELQIYVRTKTCTRMFIAALFIIAKTXKQPRYPSANTLLL

SEQ ID NO: 49357 - protein, 81 aa, Homo sapiens; identical to SEQ ID NO: 37946
  DOMAIN (49)..(61): UBIQUITIN C-TERMINAL HYDROLASE (C12) FAMILY SIGNATURE domain identified by eMATRIX, accession number PR00707D, p-value=8.667e- 13, raw score of 9.57
  DOMAIN (1)..(78): Ubiquitin carboxyl-terminal hydrolase, famil domain identified by PFam, accession name UCH, E-value=2.4e-05, PFam score of -52.9

SEQ ID NO: 49358 - protein, 344 aa, Homo sapiens
  DOMAIN (120)..(138): UBIQUITIN C-TERMINAL HYDROLASE (C12) FAMILY SIGNATURE domain identified by eMATRIX, accession number PR00707C, p-value=3.455e- 17, raw score of 8.94
  DOMAIN (46)..(268): Ubiquitin carboxyl-terminal hydrolase, famil domain identified by PFam, accession name UCH, E-value=7.7e-22, PFam score of 86.0
  misc_feature (1)...(344): Xaa = X or * as defined in Table 2
MQLKPMEINPEVSARCTATRRARGRGRGSRVADRFGFAFFFAFAFQMLNKVLSRLGVAGQWRFVDVLGLEEESLGSVPAPACALPACLFPLTAQHENFRKKQIEELKGQEVSPKVYFMKQTIGNSCGTIGLIHAVAQXSKTNLGFEDGSVLKQFLSETKKNVPLKDRAKCFEKNEAIQAAHECRGTRKGQCRVDDKVNFHFYSGXPTVDGPPSMNLDGRMPFPRGPMAPSQGDTLLEGRFPRSCRRISPRREQRRSPASSARGFSCKGSLNALWGGTWLISPLSPQHENILPPHASLKCFSTCETQAVLLFCQTRPSPQPHPRHLSTSRVHSCPLGHCGVSFRW

SEQ ID NO: 49359 - protein, 132 aa, Homo sapiens
VGDCLTSRGMSWVQATLLARALCRAWGGTCRGALTGTSISQVPRLAPRGLHCSAASVSSEQSLVPSPPEPRQRPPGGERDKASFLQTVQKFADTSVVDSGHIDFIYLALRKMREYGVERDLAVYNQLLNIFP

SEQ ID NO: 49360 - protein, 29 aa, Homo sapiens
  misc_feature (1)...(29): Xaa = X or * as defined in Table 2
XLFEQAPGGERDKASFLQTVQKFAEHSVX

SEQ ID NO: 49361 - protein, 279 aa, Homo sapiens
  misc_feature (1)...(279): Xaa = X or * as defined in Table 2
SGTRTTSTAARTSRTWRSXTPLLACTPRPCGSAKLATATSRTCIRPXSPSATQTLTVTKVPLPKDSTGAADPPQPHIVGAQGMYVSTPGIQSPDQQAALARHNPARPVFVEGPFSLWLRNKCVYYHILRADLLPPEEREVEETPEEWNLYYPMQLDLEYVRSGWDNYEFDINEGKEQHVTILCSSGECXILRRRQNVXRLLDWLAGKALTSPTCAPKITCVPLALPTPYCSGQNLNSSCSMTSVSDHLSPVPTLLSTISKAHGTPPPNTKVVTKVTVRQ

SEQ ID NO: 49362 - protein, 715 aa, Homo sapiens
  DOMAIN (17)..(36): Eukaryotic  RNA-binding region RNP-1 proteins domain identified by eMATRIX, accession number BL00030A, p-value=2.714e- 09, raw score of 14.39
  DOMAIN (17)..(88): RNA recognition motif. domain identified by PFam, accession name rrm, E-value=4.2e-18, PFam score of 73.6
MVSYARPSSASIRDANLYVSGLPKTMSQKEMEQLFSQYGRIITSRILVDQVTGVSRGVGFIRFDKRIEAEEAIKGLNGQKPLGAAEPITVKFANNPSQKTGQALLTHLYQSSARRYAGPIHHQTQRFRLDNLLNMAYGVKSAVHQLTLALTSTHEQTHREHLLLQSDDTIQDSLHAKEEELRQRWSMYQMEVIFGKVKDATGTDETHSLVRRFLAQGDTFAQLETLKSENEQTLVRLKQEKQQLQRELEDLKYSGEATLVSQQKLQAEAQERLKKEERRHAEAKDQLERALRAMQVAKDSLEHLASKLIHITVEDGRFAGKELDPQADNYVPNLLGLVEEKLLKLQAQLQGHDVQEMLCHIANREFLASLEGRLPEYNTRIALPLATSKDKFFGQYGWGDEGMTSREVTPQVGNRAGFGIRVCLFPPRDPESWQPVSKLFTGVMPNKETEFLLIQIFGRKSYPMLKLVRLKLWFPRFMNVNPFPVPRDLPQDPVELAMFGLRHMEPDLSARVTIYQITVSLRASGSEMEKPGVLWEPSGQVGLPGGGSFAQRLNRCSRSPPAPHRRAQGMYVSTPGIQSPDQQAALARHNPARPVFVEGPFSLWLRNNVCITTSSKADLLPPEEREVEETPEEWNLYYPDAAGPGVCDDGLSGFQGLQETNPKPWPKIPRGLPASPGPTRGASRHPSAGLEEPAPARGPTRKKTTTCKRQQQGQS

SEQ ID NO: 49363 - protein, 526 aa, Homo sapiens
  misc_feature (1)...(526): Xaa = X or * as defined in Table 2
VGDCLTSRGMSWVQATLLARGLCRAWGGTCGAALSQEPPSLRSLASLPRGLHCSAAAHSSEQSLVPSPPEPRQRAHQGSWCPLRVPVLGQGAGLGERGQGRAFLLDGCRNLRTTSVRKRGPHVDLFYLALRKMREYGVERGDLAVYNQLLNIFPKEVFRPRNIIQRIFVHYPRQQECGIAVLEQMENHGVMPNKETEFLLIQIFGRKSYPMLKLVRLKLWFPRFMNVNPFPVPRDLPQDPVELAMFGLRHMEPDLSARVTIYQVPLPKDSTGASKIPPKPHIVGIQRSPDQARPPLARHNPSRPVFVEGPFSLWLRNKVCVYYHILRADLLPPEERVRAXSKACVGAGEWAGTTLRVHGRGWRRETERALASDPACTPHLGEEVEETPEEWNLYYPMQLDLEYVRSGWDNYEFDINEVEEGPVFAMCMAGAHDQATMAKWIQGLQETNPTLAQIPRGLSAFAGSTRKLQTSSAGLEEPPHCPRTTKEEDDNLQRQSRAQSXSPCAGIRAQQQDRAGLESAAGRVSR

SEQ ID NO: 49364 - protein, 398 aa, Homo sapiens
  DOMAIN (110)..(165): Actins proteins domain identified by eMATRIX, accession number BL00406B, p-value=1.000e-40, raw score of 5.47
  DOMAIN (23)..(398): Actin domain identified by PFam, accession name actin, E- value=1.1e-165, PFam score of 545.0
  misc_feature (1)...(398): Xaa = X or * as defined in Table 2
EFGALRRTRLGSSFPRRRDSSAMESYDVIANQPVVIDNGSGVIKAGFAGDQIPKYCFPNYVGRPKHVRVMAGALEGDIFIGPKAEEHRGLLSIRYPMEHGIVKDWNDMERIWQYVYSKDQLQTFSEEHPVLLTEAPLNPRKNRERAAEVFFETFNVPALFISMQAVLSLYATGRTTGVVLDSGDGVTHAVPIYEGFAMPHSIMRIDIAGRDVSRFLRLYLRKEGYDFHSSSEFEIVKAIKERACYLSINPQKDETLETEKAQYYLPDGSTIETGPSRFRAPELLFRPDLIGEESEGIHEVLVFAIQKSDMDLRRTLFSNIVLSGGSTLFKGFGDRLLCXVKKLAPKDGRIRISAPQERLYSTWIGGSILASLDTFKKMWVSKKEYEEDGARSIHRKTF

SEQ ID NO: 49365 - protein, 1096 aa, Homo sapiens
  DOMAIN (4)..(19): WILM'S TUMOUR PROTEIN SIGNATURE domain identified by eMATRIX, accession number PR00049D, p-value=9.143e-10, raw score of 0.00
  DOMAIN (787)..(894): Retinoblastoma-associated protein B domain identified by PFam, accession name RB_B, E-value=4.7e-75, PFam score of 262.8
  misc_feature (1)...(1096): Xaa = X or * as defined in Table 2
MPSGGDQSPPPPPPPPAAAASDEEEEDDGEAEDAAPPAESPTPQIQQRFDELCSRLNMDEAARAEAWDSYRSMSESYTLEGSGLWLPRGLFGHPGHCTGLLLLLRSGCVRSQPSDRACRXEKCHSSHLIEFFNKMKKWEDMANLPPHFRERTERLERNFTVSAVIFKKYEPIFQDIFKYPQEEQPRQQRGRKQRRQPCTVSEIFHFCWVLFIYAKGNFPMISDDLVNSYHLLLCALDLVYGNALQCSNRKELVNPNFKGLSEDFHAKDSKPSSDPPCIIEKLCSLHDGLVLEAKGIKEHFWKPYIRKLYEKKLLKGKEENLTGFLEPGNFGESFKAINKAYEEYVLSVGNLDERIFLGEDAEEEIGTLSRCLNAGSGTETAERVQMKNILQQHFDKSKALRISTPLTGVRYIKENSPCVTPVSTATHSLSRLHTMLTGLRNAPSEKLEQILRTCSRDPTQAIANRLKEMFEIYSQHFQPDEDFSNCAKEIASKHFRFAEMLYYKVLESVIEQEQKRLGDMDLSVIEVFIRAEDGLCREVVKHLNQIEEQILDHLAWKPESPLWEKIRDNENRVPTCEEVMPPQNLERADEICIAGSPLTPRRVTEVRADTGGLGRSITSPTTLYDRYSSPPASTTRRRLFVENDSPSDGGTPGRMPPQPLVNAVPVQNVSGETVSVTPVPGQTLVTMATATVTANNGQTVTIPVQGIANENGGITFFPVQVNVGGQAQAVTGSIQPLSAQALAGSLSSQQVTGTTLQVPGQVAIQQISPGGQQQKQGQSVTSSSNRPRKTSSLSLFFRKVYHLAAVRLRDLCAKLDISDELRKKIWTCFEFSIIQCPELMMDRHLDQLLMCAIYVMAKVTKEDKSFQNIMRCYRTQPQARSQVYRSVLIKGKRKRRNSGSSDSRSHQNSPTELNKDRTSRDSSPVMRSSSTLPVPQPSSAPPTPTRLTGANSDMEEEERGDLIQFYNNIYIKQIKTFAMKYSQANMDAPPLSPYPFVRTGSPRRIQLSQNHPVYISPHKNETMLSPREKIFYYFSNSPSKRLREINSMIRTGETPTKKRGILLEDGSESPAKRICPENHSALLRRLQDVANDRGSH

SEQ ID NO: 49366 - protein, 1159 aa, Homo sapiens
  DOMAIN (12)..(27): WILM'S TUMOUR PROTEIN SIGNATURE domain identified by eMATRIX, accession number PR00049D, p-value=9.143e-10, raw score of 0.00
  DOMAIN (428)..(627): Retinoblastoma-associated protein A domain identified by PFam, accession name RB_A, E-value=4.9e-101, PFam score of 349.1
  misc_feature (1)...(1159): Xaa = X or * as defined in Table 2
GPAAQGCAMPSGGDQSPPPPPPPPAAAASDEEEEDDGEAEDAAPPAESPTPQIQQRFDELCSRLNMDEAARAEAWDSYRSMSESYTLEGNDLHWLACALYVACRKSVPTVSKGTVEGNYVSLTRILKCSEQSLIEFFNKMKKWEDMANLPPHFRERTERLERNFTVSAVIFKKYEPIFQDIFKYPQEEQPRQQRGRKQRRQPCTVSXNFSIFCWVLFICAKGNFPHXLSDDLVNSYHLLLGALDLVYGNALQCSNRKELVNPNFKGLSEDFHAKDSKPSSDPPCIIEKLCSLHDGLVLEAKGIKEHFWKPYIRKLYEKKLLKGKEENLTGFLEPGNFGESFKAINKAYEEYVLSVGNLDERIFLGEDAEEEIGTLSRCLNAGSGTETAERVQMKNILQQHFDKSKALRISTPLTGVRYIKENSPCVTPVSTATHSLSRLHTMLTGLRNAPSEKLEQILRTCSRDPTQAIANRLKEMFEIYSQHFQPDEDFSNCAKEIASKHFRFAEMLYYKVLESVIEQDQKRLGDMGLSGILEQDAFHRSLLACCLEVVTFSYKPPGNFPFITEIFDVPLYHFYKVIEVFIRAEDGLCREVVKHLNQIEEQILDHLAWKPESPLWEKIRDNENRVPTCEEVMPPQNLERADEICIAGSPLTPRRVTEVRADTGGLGRSITSPTTLYDRYSSPPARHYQEGRLFVENDSPSDGGTPGRMPPQPLVNAVPVQNVSGETVSVTPVPGQTLVTIATAACATANNGKTVTIPVQGIANENGGITFFPVQVNVGGQAQAVTGSIQPLSAQALAGSLSSQQVTGTTLQVPGPSGPIQTDFPPGGPTAGKQGPVLXPSSKXIDPRKTQLFIAFSFRKVYHLAAVRLRDLCAKLDISDELRKKIWTCFEFSIIQCPELMMDRHLDQLLMCAIYVMAKVTKEDKSFQNIMRCYRTSTGRPRSQVYRSVLIKGKRKRRNSGSSDSRSHQNSPTELNKDRTSRDSSPVMRSSSTLPVPQPSSAPPTPTRLTGANSDMEEEERGDLIQFYTNIYIKQIKTFAMKYSQANMDAPPLSPYPFVRTGSPRRIQLSQNHPVYISPHKNETMLSPREKIFYYFSNSPSKETXEEINSMIRTGETPTKKRGILLEDGSESPAKRICPENHSALLRRLQDVANDRGSH

SEQ ID NO: 49367 - protein, 398 aa, Homo sapiens
  DOMAIN (170)..(183): REPEAT PRECURSOR GLYCOPROTEIN EG domain identified by eMATRIX, accession number PD00120A, p-value=6.727e-11, raw score of 12.94
  misc_feature (1)...(398): Xaa = X or * as defined in Table 2
GRRRRFWWRKRIGGGGGGMAMPAEAPWMASSFNGFLSLPPGWLLLPPPSDRNPPLQPSSRPPLCVRMWMNAFTPLISLFFWASLVSSGARRLHPIQPQPCREQAPMPAPGAARSAVAASMSDCTVAGPCTGSHTPCHSTSDSQSPCGGVGSSLVVXAERSCAQCRMSPRKGHCCCCCCCCCCCCSCCCYCHYCCCYCCCCCCCCCCCCCCCCCCCCCCCCCCCCCYCCCRCYCCCCCCYCCCCCCCRCCCCCCCRCCCXHYCCCCCCCFGCCCCRYCCCCRYRRCYCFCCCCCCCYCYCCCXRTAHAWPSMNKSQCVLPCICKVPLGRLAVTTGCPGFGXGGCWEDCMFPAKGPSIRLEQWFSTTAILLPSGPGDFWQYLGTLLVVTTREEVLLESGG

SEQ ID NO: 49368 - protein, 249 aa, Homo sapiens
  DOMAIN (193)..(209): CYCLOPHILIN PEPTIDYL-PROLYL CIS-TRANS ISOMERASE SIGNATURE domain identified by eMATRIX, accession number PR00153E, p-value= 7.632e-17, raw score of 9.10
  DOMAIN (20)..(249): Cyclophilin type peptidyl-prolyl cis-tr domain identified by PFam, accession name pro_isomerase, E-value=1.3e-26, PFam score of 95.1
  misc_feature (1)...(249): Xaa = X or * as defined in Table 2
GTRDATAEENRVLLAMVNPTVFFDIAVDGEPLGRVSFEVRGLDTKKXLLIXSIKLCXQIGGSSIFITSDXKNSCLPLIVQQCLLFLRILPLFADRVPKASQKIFVALSTGEKGFWLXGVPCFHRLFPGFYVSRGGDFHTAINGTGGKSILWGENLKDENFILKHTGPGILSMANAGPNTNGSPVFLTSCTAKTEWLDGKHVVFGKVKEGMNIVEAMERSLGPRMGKTSNKFTIADCGQLRIKFDLVFYL

SEQ ID NO: 49369 - protein, 40 aa, Homo sapiens
  misc_feature (1)...(40): Xaa = X or * as defined in Table 2
LHSEITVCLXGSEHHFFENGTYIPHRSCHDPLEARAEDFL

SEQ ID NO: 49370 - protein, 632 aa, Homo sapiens
  DOMAIN (431)..(444): PROTEIN ZINC-FINGER METAL-BINDI domain identified by eMATRIX, accession number PD00066, p-value=5.846e-15, raw score of 13.92
  DOMAIN (413)..(631): Zinc finger, C2H2 type domain identified by PFam, accession name zf-C2H2, E-value=6.1e-71, PFam score of 249.1
MKPKLMYQELKVPAEEPANELPMNEIEAWKAAGKVLVESIPEGLDFPNASTGNPSTSQAWLGLLAGAHSSLDIASFYWTLTNNDTHTQEPSAQQFCSRIILVTGYRGNELHERYANQSNITIIHNPDYAQGLLTSVKAAVPAVQTEHCFLTHGDMPTLTIDIFRKIWSLRNDGAILPLHNGIPGHPILVSKPCLMQAIQRPNVTNMRQALLMGDHYSVEIENAEIILDIDTPDDFITAKERQESGPWKLEDVAAPGGNGGRGSAGAGSWTSRFPSPTRLCPCAHALRESGVRGVARPLDGRSPLGIVVRARRQFVYLAAVGPRFPEAPGPNWGVPGCSVKELGVVMYNCSCLARDLTKIFEAYWFLGQAGSSIPSTWPRFYDTRYNQETPMEICLNGTPALAYLAFKTGEKPYVCAECGKAFSGSSNLSKHQKTHTGEKPYICSECGKTFRQKSELITHHRIHTGEKPYECSDCGKSFTKKSQLQVHQRIHTGEKPYVCAECGKAFSGSSNLSKHQKTHTGEKPYICSECGKTFRQKSELITHHRIHTGEKPYECSDCGKSFTKKSQLQVHQRIHTGEKPYVCAECGKAFSNRSNLNKHQTTHTGDKPYKCGICGKGFVQKSVFSVHQSSHA

SEQ ID NO: 49371 - protein, 131 aa, Homo sapiens
  misc_feature (1)...(131): Xaa = X or * as defined in Table 2
AIGFPSYSSMQLVNIFGLLNLFSIISSSFRHQGXHSXELPYPLEPGAEDFLRXGPLAGHGHTGSQPFFCRVSEACGSHLVNSSRAALKRWAGVXRKIWPRGSPETPRNLKDLSVLEYENTPDTSGKKALED

SEQ ID NO: 49372 - protein, 808 aa, Homo sapiens
  DOMAIN (558)..(575): Zinc finger C2H2 type, domain proteins. domain identified by eMATRIX, accession number BL00028, p-value=9.471e-14, raw score of 16.07
  DOMAIN (164)..(780): Zinc finger, C2H2 type domain identified by PFam, accession name zf-C2H2, E-value=3.7e-161, PFam score of 548.8
  misc_feature (1)...(808): Xaa = X or * as defined in Table 2
GISVLHGCGYRFQPRGMAAPGPFSEKPVPGCDAGDLQTPALSSWTQTFIISHEQGIKFLNQRWSCWSKERNHGHCRVRGHVTAAQCDLFGNGLKHNLDLHIHDRNDASKNVKKSTNYGKMSFYTYCECTPTGEKLWDHNQHRKIIGYKPASSQDQKIYSGEKSYECAEFGKSFTWKSQFKVHLKVPTGEKLYVCIECGRAFVQKPEFITHQKTHMREKPYKCNECGKSFFQVSSLFRHHRIHTGEKLYECSECGKGFPYNSDLSIHEKIHTGERHHECTDCGKAFTQKSTLKIHQKIHTGERSYICIECGQAFIQKTQLIAHRRIHSGEKPYECNNCGKSFISKSQLQVHQRVHTRVKPYICTEYGKVFSNNSNLITHEKIQSREKSSICTECGKAFTYRSELIIHQRIHTGEKPYECSDCGRAFTQKSALTVHQRIHTGEKSYICMKCGLAFIRKAHLITHQIIHTGEKPYKCGHCGKLFTSKSQLHVHKRIHTGEKPYMCNKCGKAFTNRSNLITHQKTHTGEKIFICSKCGKAFTQRSDLITHQRIHTGEKPYECNTCGKAFTQKSNLNIHQKIHTGERQYECHECGKAFNQKSILIVHQKIHTGEKPYVCTECGRAFIRKSNFITHQRIHTGEKPYECSDCGKSFTSKSQMTEHXAVHSGXKPYVCAECGKAFSGRSNLSKHQKTHTGEKPYICSECGKTFRQKSELITHHRIHTGEKPYECSDCGKSFTKKSQLQVHQRIHTGEKPYVCAECGKAFSNRSNLNKHQTTHTGETNPYKCGHLWGKAFVSGNSVFQLFLQRQPRF

SEQ ID NO: 49373 - protein, 58 aa, Homo sapiens
DPLAVASALRSAMLGLMYVYWTQLNMFQTLKYLAILGSVTFLAGNRMLAQQAVKRTAH

SEQ ID NO: 49374 - protein, 112 aa, Homo sapiens
PVLRTHPGPQSLPRVPGVPCGGLLEPLSRAEVSPRLGLRRDLLGGMAPSGSSTVFLLALTIIASTWALTPTHYLTKHDVERLKASLDRPFTNLESAFYSIVGLSSLGAQVPD

SEQ ID NO: 49375 - protein, 167 aa, Homo sapiens
ISISNETKDLLLAAVSEDSSVTQIYHAVAALSGFGLPLASQEALSALTARLSKEETVLATVQALQTASHLSQQADLRSIVEEIEDLVARLDELGGVYLQFEEGLETTALFVAATYKLMDHVGTEPSIKEDQVIQLMNAIFSKKNFESLSEAFSVASAAAVLSHNRYH

SEQ ID NO: 49376 - protein, 637 aa, Homo sapiens
  misc_feature (1)...(637): Xaa = X or * as defined in Table 2
MVVSPQGSSTVFLLALTIIASTWALTPTHYLTKHDVERLKASLDRPFTKRLCFSWFTTCVTTXHXLFPTVXKACTYIRSKSLPCLPQIAKTCSKTLCLPILSXISISNETKDLLLAAVSEDSSVTQIYHAVAALSGFGQVREGVSGXNKTCHSLGFYSLPSRTVDSGSCISFLLLLDIQHISVLLWQDLVARLDELGGVYLQFEEGLETSTAVALPPSQQRKRNSCISHFFQDQVIQLMNAIFSKKNFESLSEAFSVASAAAVLSHNRHPRNKILCSCSLCCNKXFFIYFQLQVTNVLSQPLTQATVKLLFVISMTFRTXVLAKPIVILNRDVFELNFMNVKFYICMXIPEHPPIDLATVFSIFLXLRVKISTDIFSACSQRYTDPLXRLTLYASFRVTYPAKAKGTFIADRDSMLGPGRILKLSDERLYYSSIXTFVRLHNQKTGQEVVFVAEPDNKNVYKFELDTSERKIEFDSANIIYXVSPTSLPLCFYRLSLFFXADVVINPGIHGCPYWEGHILKSSWCVFRQHLFREPEKSWHGLCCFPFKFXCLFNLFLPIIQWILTFLNRRASLCFIXLDVMTPLLAAMLGLMYVYWTQLNMFQTLKSLAILGSVTFLAGNRMLAQQAVKEDRCRAEQ

SEQ ID NO: 49377 - protein, 134 aa, Homo sapiens
  misc_feature (1)...(134): Xaa = X or * as defined in Table 2
PRKEAPSTFLSQNLFTPKQEIQHLFREPEKRPPTVVSNTFTALILSPLLLLFALWIRIGANVSNFTFGLPSTIIFHWGHAAMLGLSMYVYXTQAQPCSQTLEVPWPILGQCDRFLAGQSGMLAQRTAVQENQHN

SEQ ID NO: 49378 - protein, 175 aa, Homo sapiens
  misc_feature (1)...(175): Xaa = X or * as defined in Table 2
GRVDPKAKKEAPAPPXSLKPKAXAFKGPRKAVLKGVHSPQKAGRSRTSTPPFRAGRKTTADSRRPAPKIILRKSRVPGGNKLDHYAIIKFPADHXSASAVKKIEDNNTLVFIVDVLKANKHQIKQGCERSLYDIDVGQGQHPWIRPDGEKKAYCSTWLLDYDGFGMFANQNWGSI

SEQ ID NO: 49379 - protein, 209 aa, Homo sapiens
  misc_feature (1)...(209): Xaa = X or * as defined in Table 2
GAAGRRRLPEGEGEDEASAWRRLARCLMPKKNRIAIYELLFKEGVMVAKKDVHMPKHPELAEVKNVPQPFMVMKGHAGLSSPRGYVKGTSFAWRHFLTGTLTQXGVSQYSPWITLHLAPGRFVPCPPLRPVARPRRMGRPRPKKVLGGVEATWRGFHKRGEVDRGYLTRRSACCQLGADKKSRGWGLGSSNPNFQFRGGFGCGRGQPPQ

SEQ ID NO: 49380 - protein, 217 aa, Homo sapiens
  misc_feature (1)...(217): Xaa = X or * as defined in Table 2
EPPAETLPVAARDPTGLSPTYLSSHKHEKFQQVRHFPVLLGYPIASSGASPEVRQRRTTFFRFRPGESLCGDMKLLTHNLLSSHVPAGGSLPFSGGMVGRGPVLAXTPLALQATEGRICPVEINPQLRGRVMIPXKWKWSAFLEAGPDKLAVXIPGARKGPGXGDMRENEEFSXGPWHHLACWEVGSDXEGTLQVPGNLGRYFSPFKPRGSPNMLAE

SEQ ID NO: 49381 - protein, 38 aa, Homo sapiens
  DOMAIN (1)..(33): Ribosomal protein S10p/S20e domain identified by PFam, accession name Ribosomal_S10, E-value=7.5e-13, PFam score of 55.8
MRIHKRLIDLHSPSEIVKQITSISIEPGVEVEVTIADA

SEQ ID NO: 49382 - protein, 62 aa, Homo sapiens
YIFPKAFNFCREVGPICPPPKVRVLSKNSQVGFNSAPHKEKTISLPAPVNFGPPKGPLKRPP

SEQ ID NO: 49383 - protein, 95 aa, Homo sapiens
  DOMAIN (72)..(87): WILM'S TUMOUR PROTEIN SIGNATURE domain identified by eMATRIX, accession number PR00049D, p-value=6.339e-09, raw score of 0.00
TSEDPELYKYPRIAPDGRQAPARPAPPGTGPRASDPSRRAPSRGCPAPGAPPGRAAPPQAPPAAPAAGGGRGPPAAPRAPAPRPQPQGAPRPVSP

SEQ ID NO: 49384 - protein, 94 aa, Homo sapiens
GELVLKALSAFIRAFRCPAEGSDPVGRAADPSPPAPRGISQGGSACGSPFLPGPITESLPLPPGLGSGSELPSLYLVSGIYGGVRRGPPARLEA

SEQ ID NO: 49385 - protein, 406 aa, Homo sapiens
  DOMAIN (355)..(370): WILM'S TUMOUR PROTEIN SIGNATURE domain identified by eMATRIX, accession number PR00049D, p-value=6.339e-09, raw score of 0.00
  misc_feature (1)...(406): Xaa = X or * as defined in Table 2
TSQGSSPPAHIGRWSSNHKKGLGSSFSQSCCKAEALVKNAWPPTQAXVSICCFEQDLGRGQQKGKSGGKWQKTAESREAVTECPACYRAARCRAAGDRGLRAEGAAAGHTASPSAYRVRGERGHRDMHSASARLSHPGETNLMLGLAEPSVTSHXSHPFRQSXLPXQAGPXXEMPLPPSARDSSDLCSGSPSHDLLPLPNTVIFWGPSSPQDWQPLPLSPFCVSQAAGSPCSPLLQGLEPGGISTSCPPGPAPYIDFGAVSGAGQSAAQRGAHFPAAMAERPSAGTSGSSGISGAIAATVVSWVAEGEQAVKCLAEGSTRQTGQPSRRAPSRGCPAPGAPPGRAAPPQAPPAAPAAGGGRGPPAAPRAPAPRPQPQGAPRPVSPCRGTGAAPPPTLVWGLSSEAEG

SEQ ID NO: 49386 - protein, 132 aa, Homo sapiens
  misc_feature (1)...(132): Xaa = X or * as defined in Table 2
CEAALKGDSGGSPWPDEKPKEGVKTENNDHINLKVDGAEMVTVVQFKIKRHTPLXXTXLKAYLXTDRGLSMRQIRFRIXPGNPINXKQTHLHQLGNGRIEDYNLMCFQQARPGGVYLKKGTCFFYSKNSVSF

SEQ ID NO: 49387 - protein, 88 aa, Homo sapiens
  misc_feature (1)...(88): Xaa = X or * as defined in Table 2
XSRSSVFALTAFNVELAQVKDSVSEKTIGLMRMQFWKKTVEDIYCDNPPHQPVAIELWKAVKRHNLTKRWLMKIVDEREKNLDDKAYX

SEQ ID NO: 49388 - protein, 69 aa, Homo sapiens
MWNWLRLVKDSVSEKTIGLMRMQFWKKTVEDIYCDNPPHQPVAIELWKVCTPAEAGPVSGPQIDFTEPQ

SEQ ID NO: 49389 - protein, 58 aa, Homo sapiens
RSVAAASGPGAWGTDHYCLELLRKRDYEGYLCSLLLPAESRSSVFALRAFNVELAQAG

SEQ ID NO: 49390 - protein, 26 aa, Homo sapiens
LVPAPAHASGMWLDRFLTHYVTSRTF

SEQ ID NO: 49391 - protein, 914 aa, Homo sapiens
MPPLLPPGHCLTTTEAVTTLFLRLCSLVITLIFSEQEWGFRTWRVGEKTATSNESGTGRRDSRLTTCPVQASPDGPLASASLFHLLFPQPRQTTPVQSIRASPLKPESSGPRCDSAASRAGDLATDGIAVASPLEAAWPAASPSYSPQAKPQEVYLQDLSPEMSFPAAFSESSANVSSVKSAQLPQANPKALGSVLPSNEAHSFLHTLLRLEGAEETLQKTYSLLPGSSVFTGSMAASPVSSSCNTDSSSSTWLLQYQQLTRAPPSVWETTDEVGVFWVEKERQGRRERNPARQPPMEEYSTLAQRGEEGIWKESRVDKGSLTLGPHPMGISVTFQHTRTLGRQDGHSCGRAMRFAGSASSITAAAVQAPGCGQPHGGGEQVAQGARASMASAGSASLQCCQEEFMSCLSSATRKQPDGLALPVAILTARLKSPVLAMGRQDVILDSHHNPGWSRGSYENIAYRCKEVCRSSCCWGQQDGLGNSCTPTAASPAQYLDNMNPPPSSISVFQSCQLPLGKALSTRSLRPKADSGLIITVFPAGTGALRTLLDLLDQKGRGNAGQKSRIRKPFAEALWKNAPFRASLVLMGHMSIPKPVPGKKNGTTTFGFHYEDSLSGVGTSIHLCQGEQIPVGKEERGTSVGQATQGPCSSLRDNFSSWCLCDSDHFFLVSSFSEVHGLEPHHVSPAASQQPLTGHFTQPPEQYFQTTGHIMPLLTHIPQLLKTSTGPSMSRRGEGDVTTGAETATTAKKRCSRQRLEDMDSPLEPPEGAQPASTLISASDTDCGLPAFGTVREEMPAVISHQVYSNMLQEPQETKSGVQPPAEEPGTAIAIAAAAPQKWPNPPGKAPKGKRPERVAFQCLHRDCMEFTPNFRDSLCLNNLGGGVRVWQGEGSSQDPPHAAPAPSSHDPDNWHQK

SEQ ID NO: 49392 - protein, 429 aa, Homo sapiens
  misc_feature (1)...(429): Xaa = X or * as defined in Table 2
ILRQWLLASPEEKTGRPALASGSAETLSWLRAQGREPRGPAXSAVGAEHRTRTAPGSDPRCGILPSGRSPPSPPARLFLASVPATIXAMTPSPTRLPAWPPPCRGPDASPEVVRKGGKAGQPRGSPQPWRSGAEEIVEVGLLPLTPRALLFPQVPTALPAVYHFLAACEGICPHSCAAPSMIELWDFLIQQHQPEKAVACTTTHIPGLRISALNKHRAWGGTDDDVAASEMPLGAAGAEPWDVEXLLPAALKIPTGHTATTSWGAGPXSPQGSCKGSGVGSGATADLLAPTAGVGTSRTACGGGTQFMSEGAPGVMNNGSPDWSSTQFMSEGAPGVMNNGSPDWSSNLSQPQPMHLLYLTTWFLERPMCCPDTTALTQTLPVPSFSYPVCTSHIRQNPHLHFLRAPSPHYTTACSFEPQRFLEQQQDLL

SEQ ID NO: 49393 - protein, 57 aa, Homo sapiens
  misc_feature (1)...(57): Xaa = X or * as defined in Table 2
ILITYIIKLINQADFSTPXFMSHLIVSSRILCTEKWNFHFPPHFXDXQQTFCTLQFL

SEQ ID NO: 49394 - protein, 152 aa, Homo sapiens
  misc_feature (1)...(152): Xaa = X or * as defined in Table 2
LLTLSRTTPLMSLGFPGIPKMINRPRQSSPIKLQNSSSLSNLLFFQEDSSTLDSGLERSQGLDSTGGGEDICRVWTASXSFICLSDPQKVQIQSAPNRKAWCLVILVVVSHSSTPFSWQKVMKWIKKISFRVFAAGQGLLGGYSNPRYSFSF

SEQ ID NO: 49395 - protein, 209 aa, Homo sapiens
  misc_feature (1)...(209): Xaa = X or * as defined in Table 2
VITILTPMLADRTRRIERPPKKKGTTSLGQRKWLLTQDWPSVYPVAHPFKPSAVPLPVRMGYPVKKGRAHGDRRGNLELLKISQFFWILTSCSNLKSTCEALKDFCTGVGQPHWDSGRKKMLKKHFSNWKFGQHLDLCFHQGPSGSGNPRARVVVLKSKAFLVXIXHDHAKKTLITLVGERYCKTPDVLTIKQNRWPLRSQITIMPVYL

SEQ ID NO: 49396 - protein, 662 aa, Homo sapiens
  misc_feature (1)...(662): Xaa = X or * as defined in Table 2
YLDAEKMGQKASQQLALKDSKEVPVVCEVVSEAIVHAAQKLKEYLGFEYPPSKLCPAANTLNEIFLIHFITFCQEKGVDEWLTTTKMTKHQAFLFGADWIWTFWGSNKQIKLQLAVQTLQMSSPPPVESKPCDLSNPESRVEESSWKKSRFDKLEEFCNLIGEDCLGLFIIFGMPGKPKDIRGVVLDSVKSQMVRSHLPGGKAVAQFVLETEDCVFIKELLRNCLSKKDGLREGGASPGSLRLAAPGPPLTLNAACPLRLAVLAAMAAAALPAWLSLQSRARTLRAFSTAVYSATPVPTPSLRVDDLHLTEIVGMLDSVLTPEDSSGKYRFISGEVLCRITGCFTGVRVEAKDLFGGCCSNPNEVMVTWIKVIVEKEVWLYLRYILKALPPRTEKMAVDQDWPSVYPVAAPFKPSAVPLPVRMGYPVKXGVPMAKEGNLELLKIPNFLHLTPVAIKKHCEALKDFCTEWPAALDSDEKCEKHFPIEIDSTDYVSSGPSVRNPRARVVVLRVKLSSLNLDDHAKKKLIKLVGERYCKTTDVLTIKTDRCPLRRQNYDYAVYLLTVLYHESWETEEWGKKXDXSRHGKSIYGENSSSERKYPGERFSRXKLLRKNMGNXLKKSSCGTKEIEEYKKSVVSLKNEEENENSISQYKESVKRLLNVT

SEQ ID NO: 49397 - protein, 77 aa, Homo sapiens
KNSSVNERSTYHKSSSVPSTTSTPTVTSAAGLQKSLLSSTSTTTKITTGSSSAGTQSSTSNRLWAEDSTEKEKGSVS

SEQ ID NO: 49398 - protein, 85 aa, Homo sapiens
IPGRLASTSDIEEKENRDSSSLRTSSSYTRRKWEDDLKKNSSVNEGSTYHKRSYLTPVRDEESESQRKARSRQARQSRRSTQGVT

SEQ ID NO: 49399 - protein, 36 aa, Homo sapiens
MKMNKNNNQTQKRDPIRKKLRDKKDLLIDHCWKWKK

SEQ ID NO: 49400 - protein, 145 aa, Homo sapiens
  misc_feature (1)...(145): Xaa = X or * as defined in Table 2
TTDKEQXELXLLLDTEXGSYTKECHTDSLSRYXTSSTSAEDRDDSLLRRSGSYRDLXEXIPYSCRLDKDDSTDCIKLYEQILAENDKLKAQLHDTNMELTDLKLQLEKATQRQERFADRSLLEMEKRERTALQRRISEMEERLQM

SEQ ID NO: 49401 - protein, 95 aa, Homo sapiens
GQTAFDVADEDILGYLEELQKKQNLYDFIAPIMPVVESVDPASWRQGLRKTGIVLVPSKGEKSMEKDSKGTRLAYVAPTIPRRLASTSDIEEKEN

SEQ ID NO: 49402 - protein, 45 aa, Homo sapiens
ERRALERRISEMEEELKMLPDLKADNQRLKDENGALIRVISNLSK

SEQ ID NO: 49403 - protein, 1058 aa, Homo sapiens
  DOMAIN (86)..(141): Domain present in ZO-1 and Unc5-like netrin receptors domain identified by eMATRIX, accession number PF00791B, p-value=9.489e- 14, raw score of 28.49
  DOMAIN (47)..(277): Ank repeat domain identified by PFam, accession name ank, E- value=1e-15, PFam score of 65.6
  misc_feature (1)...(1058): Xaa = X or * as defined in Table 2
EDPAAGEGMKMADAKHKRNEQLKRWIGSETDLEPPVVKRQKTKVKFDDGAVFLAACSSGDTDEVLKLLHRGADINYANVDGLSHALHQACIDDNVDMAKLLVDNGANINQPVNDGWIPLHAAPSCGYLDIAEFLNGQGAHVGAVNSEGDTPLDIAEEEAMEELLQNEVNRQGVDIEAARKEEERIMLRDARQWLNSGHINDVRHAKSGGTALHVAAAKGYTEVLKLLIQAGYDVNIKDYDGWTPLHAAAHWGKEEACRILVDNLCDMEMVNKVGQTSLXLXPDEDILGYLEELQKKQNLLHSEKRDKKSPLIESTANMDNNQSQKTFKNKETLIIEPEKNASRIESLEQEKVDEEEEGKKDESSCASSEEDEEDDSESEAETDKTKPLASVTNANTSSTQAAPVAVTTPTVSSGQATPTSPIKKFPTTATKISPKEEERKDESPATWRLGIXERRGSYGALAEITASKEGQKEKDTAGVTRSASCATLSSSLDNKENQKDSKGTRLAYVAPTIPRRLASTSDIEEKENRDSSSLRTSGSYTRRKWEDDLKKNSSVNEGSTYHKSCSFGRRQDDLIGSSVPSTTSNPTSYPLQLGLQKSLLSSTSTYLQKITTGSSPSAGTQSSTSNRLWAEDSTEKEKDSVSTAVTIPVAPTVVNAAASTTTLTTTTGWALSSSTTEVRERRRSYLTPCXGMEEFESQRKARSRQARQSRRSTQGVTLTDLQEAEKTIGRSRSTRTREQENEEKEKEEKEKQDKEKQEEKKESETSREDEYKQKYSKDRMMRPYQRYRPVSTSSSTTPSSSLSTMSSSLYASSQLNRPNSLVGITSAYSRGITKENEREGEKREEEKEGEVKSQPKSIRGTTDGPREKRRSTGVSFWTQDSDENEQEQQSDTEEGSIKKETQTDSISRYETSSTSAGDRYDSPCLGSASWDPYQVTLEGKENPLPASRAXKRDDLNLTFKKPLXTNSXPENEKLKAQLHDTNMELTDLKLHVEKSTQRQERFADRSLLEMEKRERRALERRISEMEEELKMLPDLKADNQRLKDENGALIRVISKLSK

SEQ ID NO: 49404 - protein, 802 aa, Homo sapiens
MGYLRIFSPHPAKTGDGAQAEDLLLEVDLRDPVLQVEVGKFVSGTEMLHLAVLHSRKLCVYSVSGTLGNVEHGNQCQMKLMYEHNLQRTACNMTYGSFGGVKGRDLICIQSMDGMLMVFEQESYAFGRFLPGFLLPGPLAYSSRTDSFLTVSSCQQVESYKYQVLAFATDADKRQETEQQKLGSGKRLVVDWTLNIGEQALDICIVSFNQSASSVFVLGERNFFCLKDNGQIRFMKRLDWSPSCFLPYCSVSEGTINTLIGNHNNMLHIYQDVTLKWATQLPHIPVAVRVGCLHDLKGVIVTLSDDGHLQCSYLGTDPSLFQAPNVQSRELNYDELDVEMKELQKIIKDVNKSQGVWPMTEREDDLNVSVVVSPNFDSVSQATDVEVGTDLVPSVTVKVTLQNRVILQKAKLSVYVQPPLELTCDQFTFEFMSIPRVIQCKFRLPLKLICLPGQPSKTASHKITIDTNKSPVSLLSLFPGFASQSDDDQVNVMGFHFLGGARITVLASKTSQRYRIQSEQFEDLWLITNELILRLQEYFEKQGVKDFACSFSGSIPLQEYFELIDHHFELRINGEKLEELLSERAVQFRAIQRRLLARFKDKTPAPLQHLDTLLDGTYKQVIALADAVEENQGNLFQSFTRLKSATHLVILLIALWQKLSADQVAILEAAFLPLQEDTQELGWEETVDAAISHLLKTCLSKSSKEQALNLNSQLNIPKDTSQLKKHITLLCDRLSKGGRLCLSTDAAAPQTMVMPGGCTTIPESDLEERSVEQDSTELFTNHRHLTAETPRPEVSPLQGVSE

SEQ ID NO: 49405 - protein, 70 aa, Homo sapiens
IIQRWPSLPKYRCKQPHRPWSLPGGCTTIPESDLEERSVEQDSTELFTNHRHLTAETPRPGKRLDGLHKR

SEQ ID NO: 49406 - protein, 97 aa, Homo sapiens
  misc_feature (1)...(97): Xaa = X or * as defined in Table 2
MGVSVLDFSHSDKCEVASRFASGMPEPTNIVLPKLEVADTLGGCTTIPESDLEERSVEQDSTELFTNHRHLTAETPRPWXRLDGLHKQVSPLQGVSE

SEQ ID NO: 49407 - protein, 429 aa, Homo sapiens
  misc_feature (1)...(429): Xaa = X or * as defined in Table 2
VSQATDVEVGTDLVPSVTVKVTLQNRVILQKAKLSVYVQPPLELTCDQFTFEFMNRNPDGIPRVIQCKFRLPLKLICLPGQPSKTASHKITIDTNKSPVSLLSLFPGFASQSDDDQVNVMGFHFLGGARITVLASKTSQRYRIQSEQFEDLWLITNELILRLQEYFEKQGVKDFACSFSGSIPLQEYFELIDHHFELRINGEKLEELLSERAVQFRAIQRRLLARFKDKTPAPLQHLDTLLDGTYKQVIALADAVEENQGNLFQSFTRLKSATHLVILLIALWQKLSADQVAILEAAFLPLQEDTQELGWEETVDAAISHLLKTCLSKSSKEQALNLNSQLNIPKDTSQLKKHITLLCDRLSKGGRLCLSTDAAAPQTMVMPGGCTTIPESDLXERSVEQDSTELFTNHRHLTVETPRPEVSPLQGVSE

SEQ ID NO: 49408 - protein, 195 aa, Homo sapiens
  DOMAIN (17)..(62): Ribosomal L29e protein family domain identified by PFam, accession name Ribosomal_L29e, E-value=0.067, PFam score of 19.7
  misc_feature (1)...(195): Xaa = X or * as defined in Table 2
WNSALREPRLNGADMAKSKNHTTNNQSRKWPRNGIKKPRSPKIRILLKGVAPPSFLRNMRFAQESPNKKGPXRRLQANKLPRAMSATLPRAIKALVKPQGGLSPKIPKGVSSRKLDSTCLTFAQPQALGSVARCPXLPRGPRLCPPKAKAKAKAKPRPKPRPRAKDQNQGPGLQPQASVPAQAPKRTQAPTKASE

SEQ ID NO: 49409 - protein, 165 aa, Homo sapiens
  DOMAIN (69)..(112): Ribosomal protein L19e proteins domain identified by eMATRIX, accession number BL00526C, p-value=6.162e-20, raw score of 20.60
  DOMAIN (16)..(118): Ribosomal protein L19e domain identified by PFam, accession name Ribosomal_L19e, E-value=5.8e-28, PFam score of 106.3
WTPQYMDTEYKNGPWMMEKKVWLDPNETNEIPNANFRQQIRKLIKDGLILRHRKPVTVHSRAQCWKSTLARRKGRHLGIESKKIDRHMYHSLYLKLKGNVFKHKRILTEHSHKLKADKARKKPLADQAEARGSKTKEARKLREEHLQTKKEEIIKTLSQEEKAKK

SEQ ID NO: 49410 - protein, 232 aa, Homo sapiens
  DOMAIN (34)..(77): Ribosomal protein L19e proteins domain identified by eMATRIX, accession number BL00526A, p-value=6.559e-37, raw score of 19.50
  DOMAIN (32)..(192): Ribosomal protein L19e domain identified by PFam, accession name Ribosomal_L19e, E-value=3.8e-75, PFam score of 263.1
  misc_feature (1)...(232): Xaa = X or * as defined in Table 2
MAVMEKLYWVNREESYASLRVHLPICNATTMSMLSLQKRLASSVLRCGKKKVWLDPKETSEIANANSHQWIRKLIKDGLIIHKPVTVHSXARYRKNTLACQKGRHMGIXKATANARMPEKIMWMRRMRILCQLLRRYCDSKKIDHHMYHRRYHESKKVDRHMYHSLYLKVKGNVFKNKRILMEHIHNLKADKACKKLLADQAETRRSKIKEARKHREEHLQAKKEEIIKTLV

SEQ ID NO: 49411 - protein, 82 aa, Homo sapiens; identical to SEQ ID NO: 38312
  DOMAIN (24)..(67): Ribosomal protein L19e proteins domain identified by eMATRIX, accession number BL00526C, p-value=5.771e-14, raw score of 20.60
  misc_feature (1)...(82): Xaa = X or * as defined in Table 2

SEQ ID NO: 49412 - protein, 204 aa, Homo sapiens
  DOMAIN (7)..(50): Ribosomal protein L19e proteins domain identified by eMATRIX, accession number BL00526A, p-value=1.000e-40, raw score of 19.50
  DOMAIN (5)..(164): Ribosomal protein L19e domain identified by PFam, accession name Ribosomal_L19e, E-value=1.3e-55, PFam score of 198.2
  misc_feature (1)...(204): Xaa = X or * as defined in Table 2
HEAMSMLRLQKRLASSVLRCGKKKVWLDPNETNEIANANSRQQIRKLIKDGLIIRKPVTVHSRLRCRKNTLARXKGRHMGIGKRKVPANARMPEKVTWMRENEGFCRRLASEDTRESKKIDRPHVVTALYLEVKGNVFKNKRILMEHIHKLKADKARKKLLADQAEARRSKTKEATKRREERLPARPRKREIIXTLSKEEETKK

SEQ ID NO: 49413 - protein, 45 aa, Homo sapiens
MSLFGTTSGFGTSGTSMFGSATTDNHNPMKPTNLAGELSYCRIMG

SEQ ID NO: 49414 - protein, 83 aa, Homo sapiens
HRSNGTNTSAPQDIYAVNGIAFHPVHGTLATVGSDGRFSFWDKDARTKLKTSEQLDQPISACCFNHNGHGFQPLEKTMSLFSS

SEQ ID NO: 49415 - protein, 158 aa, Homo sapiens
  misc_feature (1)...(158): Xaa = X or * as defined in Table 2
FKDKQNKPTGFALGSIEGRVAIHYINPPNPXVXLCQLADFTGLFLTKEDLHEPLSFSAKDNFTFKCHRSNGTNTSAPQDIYAVNGIAFHPVHGTLATVGSDGRFSFWDKDARTKLKTSEQLDQPISACCFNHNGNIFAYASSYDWSKGHEFYNPQKKK

SEQ ID NO: 49416 - protein, 535 aa, Homo sapiens
  DOMAIN (210)..(221): Trp-Asp (WD) repeat proteins proteins domain identified by eMATRIX, accession number BL00678, p-value=1.600e-10, raw score of 9.67
  misc_feature (1)...(535): Xaa = X or * as defined in Table 2
IRGFFRGSQGSFYRRLKEASGSWDFCPRSWPSSLRARSGSQTPETLLLPAGVFRRSETPMFKMSLFGTTSRFGTSGTIMFGSATTDNHNPIEGYXKXHSFSLMDSIGCSCLFSPPTLPGNFLIAGSWANDVRCWEVQDSGQTIPKAQQMHTGPVLDVCWESDGGSKVFTASCGKTAKMWDLRQXPRRLQIAQHDAPVKTIHWIKAPNYSCVMTGSWDKTLKFWDTRSSNPMMVLQLPERCYCADVIYPMAVVATAERGLIVLIQLERIQPSEFRRIESPLKHQHRCVAIFKDKQNKPTGFALESIQGRVAIHYINPPNPAKDTFTFKCHRSNGTNTSAPQDIYAVNGIAFHPVHGHPCNCGDLDGRFSFWDIDARTKLKNFREQLDQPLSSACCFNHNGKHILPYASSYDWVKGDHEFYNPQKKKFTFFPAXMQAEELKAPGNKEVVAGRTLGSAQSLFLLHSGLISVRIWAPNLVGVVSPWTMEFQPPGENDVIVQQLESPRRPAGDLPVFSIPTGLVAEVFSGKPKGGLKGYW

SEQ ID NO: 49417 - protein, 418 aa, Homo sapiens; identical to SEQ ID NO: 41674
  DOMAIN (90)..(122): GTP-binding elongation factors proteins domain identified by eMATRIX, accession number BL00301B, p-value=5.500e-31, raw score of 20.09
  DOMAIN (5)..(373): Elongation factor Tu family domain identified by PFam, accession name GTP_EFTU, E-value=5.6e-138, PFam score of 467.7

SEQ ID NO: 49418 - protein, 307 aa, Homo sapiens
  DOMAIN (12)..(44): GTP-binding elongation factors proteins domain identified by eMATRIX, accession number BL00301B, p-value=5.500e-31, raw score of 20.09
  DOMAIN (1)..(251): Elongation factor Tu family domain identified by PFam, accession name GTP_EFTU, E-value=2.2e-67, PFam score of 229.8
KFETSKYYVSIIDAPGHRDFIKNMITGTSQADCAVLIVAAGVGEFEAGISKNGQTHEHALLAYTLGVKQLIVGVNKMDSTEQPYSQKTYEEIVKEVNTYIMKIGCNLDTAAFVLISVNVTTEVKSVEIHHEALSEALPGDNVGFNVKNVSVKDVRHGNNAGDSKNDPPMEAAGFTAQVIILNHPGQISAGYALVLDCHTAHTACKFAELKEKIDRCSGKKLEDGPKFLKSGDAAIIYMVPGKPMCVESFSDYPPLGHFAVGHMRQTVAMGIIKAEDRKAAGVGKVTKSAQKAPKPSEYYPLYLPPQS

SEQ ID NO: 49419 - protein, 462 aa, Homo sapiens; identical to SEQ ID NO: 41777
  DOMAIN (113)..(145): GTP-binding elongation factors proteins domain identified by eMATRIX, accession number BL00301B, p-value=7.158e-27, raw score of 20.09
  DOMAIN (28)..(417): Elongation factor Tu family domain identified by PFam, accession name GTP_EFTU, E-value=7.9e-128, PFam score of 433.5

SEQ ID NO: 49420 - protein, 227 aa, Homo sapiens
  DOMAIN (188)..(202): GTP-binding elongation factors proteins domain identified by eMATRIX, accession number BL00301C, p-value=8.200e-15, raw score of 11.73
  DOMAIN (12)..(182): Elongation factor Tu family domain identified by PFam, accession name GTP_EFTU, E-value=4.7e-71, PFam score of 242.1
KLPLKAKMGKEKTHINIVVIGHVDSGKSTTTGHLIYKCGGIDKRTIEKFEKEAAEMGKGSFKYAWVLDKLKAERERGITIDISLWKFETSKYYVTIIDAPGHRDFIKNMIILNHPGQISAGYAPVLDCHTAHIACKFAELKEKIDRRSGKKLEDGPKFLKSGDAAIVDMVPGKPMCVESFSDYPPLGRFAVRDMRQTVAVGVIKAVDKKAAGAGKVTKSAQKAQKAK

SEQ ID NO: 49421 - protein, 484 aa, Homo sapiens
  DOMAIN (95)..(127): GTP-binding elongation factors proteins domain identified by eMATRIX, accession number BL00301B, p-value=5.500e-31, raw score of 20.09
  DOMAIN (11)..(457): Elongation factor Tu family domain identified by PFam, accession name GTP_EFTU, E-value=9.5e-71, PFam score of 241.1
  misc_feature (1)...(484): Xaa = X or * as defined in Table 2
PLKAKMGKEKTHINIVVIGHVDSGKSTTTGHLIYKCGGIDKRTIEKFEKEAAEMGKDSFKFAWVLDKLKAERERGITIDISLWKFETSKYYVTIIDAPGHRDFIKNMITGTSQADCAVLIVAAGVGEFEAGISKNGQTREHALLAYTLGVEQLIVGVNKMDSTEPPYSQKRYEEMWLREVSTFIKKIWLQPPTQXHFVPISWFGIGDNMLEPSANMPWFKGWKVTRKDGNASGTTLLEALDCILPPTRPTDKPLRLPLQGVHKLGGIGTVSSAPMETGFSNPGMVVTFAPSSTVTTESKILSKMHPXSFEVKLLPGDQCGPSMSKNVFCQGMFRRGKRLLGDQQKMTPPNGKAAGLHWSRVIILNHPRPKXGAGPMPLYLDCHTGSHLHAKFAELKEKIDRRSGKKLEDGLKFLKSGDAAIVDIVPGRPMCVESFSDYPPLGRFAVRDMRQTVAVGVISKAVDKKGCWELGKVTKVWPRKAPEG

SEQ ID NO: 49422 - protein, 168 aa, Homo sapiens
  DOMAIN (100)..(133): Ribosomal protein L23 proteins domain identified by eMATRIX, accession number BL00050A, p-value=9.250e-27, raw score of 23.71
  DOMAIN (100)..(168): Ribosomal protein L23 domain identified by PFam, accession name Ribosomal_L23, E-value=3.4e-08, PFam score of 32.0
  misc_feature (1)...(168): Xaa = X or * as defined in Table 2
EFGTRAKKEAPAPPXSLKPKRKAFKGPRKAVLKGVHSHQKEEDPARSPTFPGGPKTLRLRRQPKYPRKSRVPGETRLDHLCLSINFPLTHXVLPMKKIEDNNTLVFIVDVKANKHQIKQAVKKLYDIDVAKVNTLWIRPDGEKKAYVRLAPDLPIAFGMFANKIWGFI

SEQ ID NO: 49423 - protein, 192 aa, Homo sapiens
  DOMAIN (69)..(92): TRANSFORMING PROTEIN P21 RAS SIGNATURE domain identified by eMATRIX, accession number PR00449C, p-value=4.429e-17, raw score of 17.27
  DOMAIN (37)..(192): Ras family domain identified by PFam, accession name ras, E- value=7.5e-52, PFam score of 185.7
  misc_feature (1)...(192): Xaa = X or * as defined in Table 2
GLISNLDMASRGASXPTGPDTGNKICQFKLSTSGESPAVCKSSLVLRFVKGQFHEFQESTIGAAFLTQTVCLDDTTEKFEIWDTAGQERYHSLAPMYYRGAQAAIVVYDITNEESFARAKNWVKELQRQASPNIVIALSGNKADLANKRAVDFQEAQSYADDNSLLFMETSANTSMNVNEIFMAIGKINISF

SEQ ID NO: 49424 - protein, 812 aa, Homo sapiens
MALLTDPMVPVLLPPQPSVLCSATASSLVSLPTRVWDTDMTAGTQAALMDYEVHRNGIIGPFKYIQNNRETETTYTNSAGTVRSAPLQPNNREQPGTVRSAPLQPNNREQPGTVRSAPLQPNNREQPGTVRSAPLQPNNREQPGTVRSAPLQPNNREQPGTVRSAPLQPNNREQPGTVRSAPLQPNNRGQPGTVRSAPLQPNNRGQRPTKQQGTAWNSQVSSAPTKQQGTAWNRQVSSAPTKQQGTASNQTTGNNLEPSGQLRSNQTTGNSQDRQVSPAPTKQQGTAWNHQVSSAPTKQQGTASNQTTGNSLEPSGQLRSNQTTGDSVQPNNREQPGPSGQPCSNQTTGNSLEPSSQLRSNQTTGDSVQPNNREQPGTIRSAPLQPNNRGQRWDRQVSSAPTKQGTALGPSGQLCSNQTTGDSAGTVKSAPLQPNNREQPGTVRSAPLQPNNREQPGTVKSALLQPNNREQPGPSGQLRSNQTTGNSQDRQVSPAPTKQQGTAGNRQVSSTPSKQGTASNQTTGNSLEPSVVPWMGGYPSQGSGQSGDFCPQGLCCWFAKEENKPGVTGGAPRLTLNTVLPKHSRTPSRHEAGSTQALYHNGQAQYALSFPHEAAPMAAFYVVTGIEVTTALTLEEAPCTVEITTALTLEEPPCTVFWNKTERNTRTLVQDKGSNTKGFVQTATCCFRADCKASRPSPHPPSPHREWTSDLRHKQVSKFPGAHRLPGHPELPIQEAWDRGEGTEEDSVAQPFQDRGEGTEEDSVAQPFQDGGEGTEEDSVAQPFQDRGEGTEEDSVAQPFQEVACERFRWLP

SEQ ID NO: 49425 - protein, 119 aa, Homo sapiens
RAMVGRRALIVLAHSERTSFNYAMKEAAAAALKKKGWEVVESDLYAMNFNPIISRKDITGKLKDPANFQYPAESVLAYKEGHLSPDIVAEQKKLEAADLVIFQSKKAVLSITTGGSGSM

SEQ ID NO: 49426 - protein, 363 aa, Homo sapiens
  misc_feature (1)...(363): Xaa = X or * as defined in Table 2
FRPGSPRQPRAQPISAPDCTRAMVGRRALIVLAHSERTSFNYAMKEAAAAALKKKGWEVVESDLYAMNFNPIISRKDITGKLEGPLRTFQYPGRSLFLAYKEGHLEPEIICGLNKKKLEAADLVIFQFPLAVGLEVPAILKGWFEPSVHKESFAXHFTAGHVMDKGPFPGVKKAVAFPFTTGGSGSMYSCQGIHGDMNVILWPIQSGILPFLGLPKSLDPQLTYSIWPPLPARRPEFSILEGWKKRLENIWDETPLYFAPSSLFDLNFQAGFLMKKEVQDEEENKKFGLSVGHHLGKSIPTDNQIQSXKRECTVHYTRDSHKVAAGAAQLTESLVPARVAPATTSPANQRPGLHQSHGRQKST

SEQ ID NO: 49427 - protein, 109 aa, Homo sapiens
WVDSQQKRYVPVKGDHVIGIVTAKSGDIFKVDVGGSEPASLSYLSFEGATKRNRPNVQVGDLIYGQFVVANKDMEPEMVCIDSCGRANGMGVIGQDGLLFKVTLGLIRK

SEQ ID NO: 49428 - protein, 68 aa, Homo sapiens
  misc_feature (1)...(68): Xaa = X or * as defined in Table 2
QEFHLSSEPSIRLGRSLYHIHHLFASKKVLDXQWLDQSLXVCSWEHMRRSQXGIFSRLANRGFQNGDC

SEQ ID NO: 49429 - protein, 618 aa, Homo sapiens
  DOMAIN (241)..(354): Galactose binding lectin domain identified by PFam, accession name Gal_Lectin, E-value=9.7e-06, PFam score of 32.5
  misc_feature (1)...(618): Xaa = X or * as defined in Table 2
MAVAIRLSADTQWEDSPGKSILELHMSCTKIPERCEADKKESTSSWCTRKIRFRMDLEKECKVLLSGGGGSRMGSQKGDGVGRWSSPRVGLPSSQTLLRPPPTDFHIAPLSKARQHLLVSVSVLFCFSAPLDVQPLKVLDECQNQRACHLLVNSRVFGPDLCPGSSKYLLVSFKCQPKQMFTQQGPGPVLSIGETQVSTSSVTRSSSPVGPDIHCEFHTNMCKIPDELKNKTVCEDQELKLHCHESKFLNIYSATYGRRTQERDICSSKAERLPPFVFTRYYCFLYAPVSSIANPVKGCFHLGKKQDCLSYSALQVLSRRCYGKQRCKIIVNNHHFGSPCLPGVKKYLTVTYACATLSSMGPILAEVPPEAKKVTLSTSLDSSSGRMEDGRLDTGHTEVPVTSGLFIRVLNKKQNFSLQIRCSFGRGPGKLRHCWAGAAIALGTEYILVKGDQVTGIVTAKSGDIFRVDVGGSEPVSLSYLSFEGATKRNRPNVQVGDLIYGQFVVANKDMEPEMVCIDSCGRANGMGVIGQDGLLFKVTLGLNXESLLASQICEISIQEVGKLLPLEIVFGMNGRIWGXGQKTHPSQTLILANILEACEHMTSDQRKTDLPPRLAES

SEQ ID NO: 49430 - protein, 18 aa, Homo sapiens
MRALWVLGLCCVLLTFGS

SEQ ID NO: 49431 - protein, 142 aa, Homo sapiens
  DOMAIN (79)..(134): Heat shock hsp90 proteins family proteins domain identified by eMATRIX, accession number BL00298E, p-value=1.346e-24, raw score of 27.30
  DOMAIN (84)..(122): Hsp90 protein domain identified by PFam, accession name HSP90, E-value=1.3e-12, PFam score of 52.8
MGRNQSRIAENSKNQRAPSPPKDRSSSPAPHQSRKETDFDELSRCTLKKGAICKVVRGQVPTLAAVAVGLWALRDLAVDGRSVVEKTVWDWELMNDIKPIWQRPSKEVEEDEYKAFYKSFSKASLLTANLRNNGVASHLLVE

SEQ ID NO: 49432 - protein, 515 aa, Homo sapiens
  DOMAIN (384)..(438): Heat shock hsp90 proteins family proteins domain identified by eMATRIX, accession number BL00298H, p-value=1.000e-40, raw score of 20.50
  DOMAIN (96)..(515): Hsp90 protein domain identified by PFam, accession name HSP90, E-value=8.9e-199, PFam score of 673.8
  misc_feature (1)...(515): Xaa = X or * as defined in Table 2
MTMAAAAVVARGAGARAATAAALRGGCGTAARGRPCAGPARPLCTAPGTAPDMKRYLWERYREAKRSTEGTKKYTTSLNARHYYTHFTEENEDEINSSSSYASQKKTFEINPRHPLIRDMLRRIKEDEDDKTVLDLAVVLFETATLRSGYLLPDTKAYGDRIERMLRLSLNIDPDAKVEEEPEEEPEETAEDTTEDTEPDEDEEMDVGTDEEEETGKESDDPMAYIHFTAEGEVTFKSILFVPTSAPRGLFDEYGSKKSDYIKLYVRRVFITDDFHDMMPKYLNFVKGVVIRKKLVRKTLDMIKKIADDKYNDTFWKEFGTNIKLGVIEDHSNRTRLAKLSRFQSSHHPTDITSLDQYVERMKEKQDKIYFMAGSSRKEAESSPFVERLLKKGYEVIYLTEPVDEYCIQALPEFDGKRFQNVAKEGVKFDESEKTKESREAVEKEFEPLLNWMKDKALKDKIXKALWVSSAALTESPVLLLVAQPVRDWSGQHWERIMKAQAYQTGKDISTNYYA

SEQ ID NO: 49433 - protein, 876 aa, Homo sapiens
  DOMAIN (134)..(157): 90 KD HEAT SHOCK PROTEIN SIGNATURE domain identified by eMATRIX, accession number PR00775B, p-value=1.265e-14, raw score of 3.52
  DOMAIN (114)..(876): Hsp90 protein domain identified by PFam, accession name HSP90, E-value=1.1e-153, PFam score of 524.0
  misc_feature (1)...(876): Xaa = X or * as defined in Table 2
WADRAAGGVRILTQGCVGGGGSCDRRGLETSPARTPVRALWVLGLCCVLLTFGSVREADDEVDVDGTVEEDLGXKYEKDQVTDDEVVQREEEAIQLDGLNASQIRELREKSENFPFQAEVNRMIETLFIQFHCIKNKEIFLERLISNSSCALDRLSLISLTDENALSGNEELTVKIKCDKEKNLLHVQHTGVGMTREELVKNLGTIAKSGTKRVFXTKRPEAQEDGPSQPSXIDWPSLGVRFPIPAFLVADKVIVTSKHKQPIPQHIWGVWTPNGIFLXLLDPRGKHSXDRGNRQFTLCPXKEEASDLPWNLDTIKNLRQKNIHSFIKLFLIYVWSSKDXKLFEEPMEERKKAAKRRRKEESDDEAAVEEEEEEKKPKTKKVEKTVWDWELMNDIKPIWQRPSKEVEEDEYQAFYQSFSKESDDPMAYIHFTAEGEVTFKSILFVPTSAPRGLFDDYGSKKSGYIKLLCAAVVFITDDFHDMMPKYLNFVKGVVDSDDLPLNVSRETLQQHKLLKVIRKKLVPXNRWDMIKKISLDDKYNDTFWKEFGTNIQAWLXLKDHFEFEQRLAKLLRFQSSHHPTDITSLDQYVERMKEKQDKIYFMALGSSRKEAESSPFVERLLKKGYEVIYLTEPVDEYCIQALPEFDGKRFQNVAKEGVKFDESEKTKESREAVEKEFEPLLNWMKDKALKDKIEKAVVSQRLTESPCALVAGQVFWSGNMERIMKAQAYQTGQRTSYPIYYAESERKHFEINPQTPRLIRDMLRRIKKDEDDKTVLDLAVVLVXNRQRLGSGYLFTQTLKRIWRLELERMLRLSFEHLTPDAKGEKKSPEEEPXKRQQKDTSRKTQSRDEECKKWDGGKQMKKEETSQRNPTAXKV

SEQ ID NO: 49434 - protein, 144 aa, Homo sapiens
  misc_feature (1)...(144): Xaa = X or * as defined in Table 2
RAPEQSSGVSAAEQERVPNAGWPCSVAPTCPSPRSAEPARCTXGKEEGGCEDSDRADSGSPFQEPRYPSSGPFPIPQASFPCPCLLVLGIRGHSTILQYRGQEHHVLFTGRCLLVDPTLLVLVVSKKSPNAARDQPARYPRGPL

SEQ ID NO: 49435 - protein, 223 aa, Homo sapiens
  misc_feature (1)...(223): Xaa = X or * as defined in Table 2
MAEAGPKPQRTLMWAWESVLSQRKPREAGRLSEGCVKATGTPGFGWQARPDQKEHRLDGRVIDPKDRHGLVKDTEPRLNEQSLCGGLNPEATEEKIREYLASLGRRRPVKKVLEKKFHTVSGSKCGPQVPPSWSETYRTRAXSGDQLGTPAAPNPRWPMEXEQEIEAQRRSAHSGARAPWPPWPPRPDGPPGNPGPKFMVSLSCWNISSLRAGLLYAGCGCSP

SEQ ID NO: 49436 - protein, 227 aa, Homo sapiens
RHASARKKYNPPSWFHRGLPPPEDQEDEMSVSEELEPITLTPSSALKPSDRMTMSSLGERACCRDYQRLGLGTLSSSLSRAKSEPFRISPVNRMYAICRSYPGLLIVPQSVQDNALQRVSRCYRQNRFPVVCWRSGRSKAVLLRSGGLHGKGVVGLFKAQNAPSPGQSQADSSSLEQEKYLQAVVSSMPRYADASGRNTLSGFSSAHMGSHGKWGSVRTSGRSSGLG

SEQ ID NO: 49437 - protein, 113 aa, Homo sapiens
RVRKSRLLRERAGLGDLESASNSLVTNSMAGSVAESYDTESGFEDAETCDVAGAVVRFINRFVDKVCTESGVTSDHLKGLHVMVPDIVQMHIETLEAVQRESRRLPPIQKPKL

SEQ ID NO: 49438 - protein, 1232 aa, Homo sapiens
  DOMAIN (7)..(17): TYPE I ANTIFREEZE PROTEIN SIGNATURE domain identified by eMATRIX, accession number PR00308C, p-value=8.892e-10, raw score of 3.83
  DOMAIN (43)..(141): DENN (AEX-3) domain identified by PFam, accession name DENN, E-value=2.2e-23, PFam score of 87.9
  misc_feature (1)...(1232): Xaa = X or * as defined in Table 2
MVSGARAAAAAAAAAAAAERTRGVPGHPDSTGRLPAHQQLQRGLLFRQLGITNVLSLVCATLMEHEVLFLSRSYQQLTDACRSLLALLFPLRYSFTYVPILPAQLLEALSTPTPFIIGVNAAFQAETQELLDVIVADLDGETVTIPECVHIPPLLEPLQSQTHSVLRMVLDPELELVDLAFPPPMHDKELRLFHQLLQGYLWCLHVVCIHPEPVIRFHKAAFLGQCGLVEDNFLMNVLEGMAFALFVLECGVPYCPTDLFDELVAHDVAQSRLQVKSPGQLEVVGNCISHVFEGKMLEAKKLLLPVLRALKCMMNCCLQDCTSLDKHGISAALLPLVTAFLEAEPRVAFEQWCLWPSLSGEKQQELMQKEESTVFSQAIHYTNCVSYLLLPLDSSKSRLLQELGDLESTSNSLVPNSMAGSVAESYDTGSGFEDRETCNVAGAVVHFINRFVDKVCTESGVTSDHLKGLHVMVPDIVQINIKTLEAKPKLLRLHLLFGEECVLDGLRIYLPPNGREEGARAGSAGWPALLPAEGALFLTTYRVIFTGMLTDPLVGEKVVFRSFPVAALTKEKCISIQTPLDQLLQDGLQLRSCTFQLLKMAFDEEVGSDSAELFCKQLHKLRYTPDVRATFSFTLGSTYTPGQPPRVTKNKGPSLRTLSWNLVKNVKKTIGRQHVTRKKYNPNSAMEHWSQPPSEDQEEEISVLKPSDGMTMSSLLVERACCREYQCLGLGPLSSRLSRAKSESFRISLVNRMHAIYRRYPGLLIVPQSVQDNALQRVSYCYRQNRFTVVCWRIRRSKAVLLHSGGLYGIGVVGLFKAQNAPSPGQFQADSSSLEQEKYLQAVVSSMPRYSSASGRNTLSGFSSAHVGSHIGSPRARVTTLSNPMAADPNXLHPEQAALYILGDKGQLKNVRPDPLQRTFLLDSDYEHIELGLLYEEKGQRRSQLPCRSLWDRMSKRTAMFHNYMNAPEDTEVLRPYSNVSNLKVWLETELSRPAKRWKDTWDRVKAAWRLEARPDGRGTPSSLLVSTAPHHRCSLGCLRSTSTLTARFQTAESENRSYEGTLYKKGAFMKPWKARWFVLDKTKPQLRYYDHRVDTECKGVIDLVEVEVEAVAPGTPTLWGAPKTVDEKAFFDVKTTRRRVYNFCAQDVPSAQQWVDRIQSCCRTPEPPSPARLLCSRSVTRPTRGWAGPPRQCLQPRPSTVLSPEPPALVCTAPVPAPPRPAGPNLFWRHS

SEQ ID NO: 49439 - protein, 101 aa, Homo sapiens
EMQLEKPKPVKPVTFSTGIKMGQHISLAPIHKLEEALYEYQPLQIETYGPHVPELEMLGRLGYLNHVRAASPQDLAGGYTSSLACHRALQDAFSGLFWQPS

SEQ ID NO: 49440 - protein, 310 aa, Homo sapiens
  misc_feature (1)...(310): Xaa = X or * as defined in Table 2
TKLTGSRGXLAXNPCMHNNCESCVDLLFVRGAGNCPECGTPLRKSNFRVQLFEDPTVDKEVEIRKKVLKIYNKREEDFPSLREYNDFLEEVEEIVFNLTNNVDLDNTKKKMEIYQKENKDVIQKNKLKLTREQEELEEALEVERQENEQRRLFIQKEEQLQQILKRKNKQAFLDELESSDLPVALLLAQHKDRSTQLEMQLEKPKPVKPVTFSTGIKMSVGITLCPAEEHTFNDERSFNLSSSWSKFNKPPSTLPFKVLDEERLVELKVPNTLITKLVPFAISPCSEAIQDHPAILLAYKKTPFWRLQTF

SEQ ID NO: 49441 - protein, 81 aa, Homo sapiens
  misc_feature (1)...(81): Xaa = X or * as defined in Table 2
XPRPLPVLFREGTVSAKRLLVGTCLVASEGACRWLWLKQAPARVCRRETAMDDQGCPRCKTTKYRNPSIEADGECVRTHSL

SEQ ID NO: 49442 - protein, 93 aa, Homo sapiens
  DOMAIN (45)..(59): BETA-AMYLOID PEPTIDE (BETA-APP) SIGNATURE domain identified by eMATRIX, accession number PR00204A, p-value=1.346e-19, raw score of 16.44
  misc_feature (1)...(93): Xaa = X or * as defined in Table 2
XVAEEEEVAEVEEEEADRGLTTRPGSGLTNIKTEEISEVKMDAEFRHDSGYEVHHQKLVFFAEDVGSNKGAIIGLMVGGVVIADSDRHHLGDA

SEQ ID NO: 49443 - protein, 68 aa, Homo sapiens
  DOMAIN (1)..(60): Amyloid A4 extracellular domain identified by PFam, accession name A4_EXTRA, E-value=0.013, PFam score of -66.6
  misc_feature (1)...(68): Xaa = X or * as defined in Table 2
VYPELQITNVVEANQPVTIQNWCKRGRKQCKTIPHLXFPYRCLGEPAGRGAGVDWGPGLEGRKRGCSC

SEQ ID NO: 49444 - protein, 69 aa, Homo sapiens
FRGVEFAWCPLAEKSDNVDSADAEEDDSDACWGGSNTYYADGSEDKVLEVSEDEEVAEVEEEEADDEEP

SEQ ID NO: 49445 - protein, 772 aa, Homo sapiens
  DOMAIN (298)..(342): Pancreatic trypsin inhibitor (Kunitz) family proteins domain identified by eMATRIX, accession number BL00280, p-value=4.273e-38, raw score of 24.61
  DOMAIN (24)..(188): Amyloid A4 extracellular domain identified by PFam, accession name A4_EXTRA, E-value=1.7e-130, PFam score of 446.9
MLPGLALLLLAAWTARALEVPTDGNAGLLAEPQIAMFCGRLNMHMNVQNGKWDSDPSGTKTCIDTKEGILQYCQEVYPELQITNVVEANQPVTIQNWCKRGRKQCKTHPHFVIPYRCLVGEFVSDALLVPDKCKFLHQERMDVCETHLHWHTVAKETCSEKSTNLHDYGMLLPCGIDKFRGVEFVCCPLAEESDNVDSADAEEDDSDVWWGGADTDYADGSEDKVVEVAEEEEVAEVEEEEADDDEDDEDGDEVEEEAEEPYEEATERTTSIATTTTTTTESVEEVVREVCSEQAETGPCRAMISRWYFDVTEGKCAPFFYGGCGGNRNNFDTEEYCMAVCGSAMSQSLLKTTQEPLARDPVKLPTTAASTPDAVDKYLETPGDENEHAHFQKAKERLEAKHRERMSQVMREWEEAERQAKNLPKADKKAVIQHFQEKSGIFWNRKQPNERPAAGWRHTWPELEAMLNDRRRLALENYITALQAVPPRPRHVFNMLKKYVRAEQKDRQHTLKHFEHVRMVDPKKAAQIRSQVMTHLRVIYERMNQSLSLLYNVPAVAEEIQDEVDELLQKEQNYSDDVLANMISEPRISYGNDALMPSLTETKTTVELLPVNGEFSLDDLQPWHSFGADSVPANTENEVEPVDARPAADRGLTTRPGSGLTNIKTEEISEVKMDAEFRHDSGYEVHHQKLVFFAEDVGSNKGAIIGLMVGGVVIATVIVITLVMLKKKQYTSIHHGVVEVDAAVTPEERHLSKMQQNGYENPTYKFFEQMQN

SEQ ID NO: 49446 - protein, 1137 aa, Homo sapiens
  DOMAIN (765)..(809): Pancreatic trypsin inhibitor (Kunitz) family proteins domain identified by eMATRIX, accession number BL00280, p-value=4.273e-38, raw score of 24.61
  DOMAIN (365)..(529): Amyloid A4 extracellular domain identified by PFam, accession name A4_EXTRA, E-value=1.7e-130, PFam score of 446.9
MMEGEGGVRMSHDQTGNKRKHGTSGISVCPNLLLLQEYQPDYIRAHASGLNLISSSKALPKYSHVLSGLCKICSFGPRFSLHSDTFFFALFAHADPEQIRNCETPAPPLQTERKNEMRIKTHPSSSPLYDTPGRPAGSDDSSSRGRAGALSTFLEPQRPRTHLSLILHRPSPGPRLSLPLFTKPSFLGSGRREHAEERARGPRETAAVAARAEQGRGGSHSHSSALGAPRRVAMLPGLALLLLAAWTARALESLENRSAAGGCRKEMNKGNDNGALAIGGNMVIIWVDDFGWYVDRDTLEQGSPTPSHGQVLVHGLLGTGPHSRSTLNIKEQLPRSKISSIGACNIIFQVDINAIFGILMVPTDGNAGLLAEPQIAMFCGRLNMHMNVQNGKWDSDPSGTKTCIDTKEGILQYCQEVYPELQITNVVEANQPVTIQNWCKRGRKQCKTHPHFVIPYRCLVGEFVSDALLVPDKCKFLHQERMDVCETHLHWHTVAKETCSEKSTNLHDYGMLLPCGIDKFRGVEFVCCPLAEESDNVDSADAEEDDSDVWWGGADTDYADGRTSAIFGYDHDCKVHDAFALSSVLVDRQEWGSTYESGAGQGIAAFWGACWKEEQSLLFLLPDMDWLCLHSNINFNYISQNSHMLWRDPGEIDSKKLSALSSLPGIVLALGKAQRILLIELLGVGLESEDKVVEVAEEEEVAEVEEEEADDDEDDEDGDEVEEEAEEPYEEATERTTSIATTTTTTTESVEEVVREVCSEQAETGPCRAMISRWYFDVTEGKCAPFFYGGCGGNRNNFDTEEYCMAVCGSATNCTFDLKKSWSSGGQIQMADSIQRKGAELEAICQKRFSQRKHRYGKCFVGVLAPVMEEHFVIGTLGAASPFMNKLKANLCYFTPENRALAVPTTAASTPDAVDKYLETPGDENEHAHFQKAKERLEAKHRERMSQVMREWEEAERQAKNLPKADKKAVIQHFQEKVESLEQEAANERQQLVETHMARVEAMLNDRRRLALENYITALQAVPPRVGLAAAEFTLQVTAQTPRHVFNMLKKYVRAEQKDRQHTLKHFEHVRMVDPKKAAQIRSQVMTHLRVIYERMNQSLSLLYNVPAVAEEIQDEVAFKINKNMNYYKPDAGKISG

SEQ ID NO: 49447 - protein, 798 aa, Homo sapiens
  DOMAIN (693)..(707): BETA-AMYLOID PEPTIDE (BETA-APP) SIGNATURE domain identified by eMATRIX, accession number PR00204A, p-value=8.263e-15, raw score of 16.44
  DOMAIN (65)..(230): Amyloid A4 extracellular domain identified by PFam, accession name A4_EXTRA, E-value=5.4e-128, PFam score of 438.6
  misc_feature (1)...(798): Xaa = X or * as defined in Table 2
NSRGAACAGPRETAAVAARAEQGRGGSHSHSSALGAPRRVAMLPGLALLLLAAWTARALEVPTDGNAGLLAEPQIAMFCGRLNMHMNVQNGKWDSDPSGTKTCIDTKEGILQYCQEVYPELQITNVVEANQPVTIQNWCKRGRKQCKTHPHFVIPYRCLVGEFVSDALLVPDKCKFLHQERMDVCETHLHWHTVAKETCSEKSTNLHDYGMLLPCGIDKFRGVEFVCCPLAEESDNVDSADAEEDDSDVWWAGADTDYADGSEDKVVEVAEEEEVAEVEEEEADXLTRTDEDGDEVEEEAEEPYQEATERTTSIATTTTTTTESVEEVVREVCSEQAETGAVPSNDLPLVLXCDXREVCPILLRRMWRQPEQLXHRRVLHGRVWQRIPTTAASTPDAVDKYLETPGDENEHAHFQKAKERLEAKHRERMSQVMREWEEAERQAKNLPKADKKAVIQHFQEKVESLXQEAANERQQLVETHMARVEAMLNDRRRLALENYITALQAVPPRPRHVFNMLKKYVRAEQKDRQHTLKHFEHVRMVDPKKAAQIRSQVMTHLRVIYERMNQSLSLLYNVPAVAEEIQDEVDELLQKEQNYSDDVLANMISEPRISYGNDALMPSLTETKTTVELLPVNGEFSLDDLQPWHSFGADSVPANTENEVEPVDARPAADRGLTTRPGSGLTNIKTEEISEVKMDAEFRHDSGYEVHHKKIGVPLQEDVGSKPKVQSLGLMVGGVVIATVIVHHLGXCLKKETSTTSIHHGVVEVDAAVTPEERHLSKMQQNGYTENPTYKFFEQMQN

SEQ ID NO: 49448 - protein, 777 aa, Homo sapiens
  DOMAIN (381)..(405): AMYLOID A4 PROTEIN PRECURSOR SIGNATURE domain identified by eMATRIX, accession number PR00203B, p-value=7.429e-29, raw score of 11.38
  DOMAIN (98)..(268): Amyloid A4 extracellular domain identified by PFam, accession name A4_EXTRA, E-value=7.2e-106, PFam score of 365.1
  misc_feature (1)...(777): Xaa = X or * as defined in Table 2
MKSIFTSEISSVLIFVNPEPGRVVSFLGSGRREHAEERARGPRETAAVAARAEQGRGGSHSHSSALGAPRRVAMLPGLALLLLAAWTVWALEVPTDGNAGLLAEPQIAMFCGRLNMHMNVQNVKWDSDPSGTKTCIDTKEGILQYCQEVYPELQITNVVEANQPVTIQNWCKRGRKQCKTHPHFVIPYRCLVGEFVSDALLVPDKCKFLHQERMGCFAETHLHWHTAAKETLQXRRSTNLHDYGMLLPCGIDKLRGVEFVCCPLAEESDNVDSADAEEDDSDVWWGGADTDYADGSEDKVVEVAEEEEVAEVEEEEADDDEDDEDGDEVEEEAKEPYEEATERTTSIATTTTTTTESVEEVVRVPTTAASTPDAVDKYLETPGDENEHAHFQKAKERLEAKHRERMSQVMREWEEAERQAKNLPKADKKAVFQHFPEKVESLEQEAANERQQLVETHMARVEAMLNDPRRLALENYITALQAVPPRPRHVFNMLKKYVRARTEGLVSTSLXHFEHVRMVDPKKAAQIRSQVMTHLRVIYERMNQSLSLLYNVPAVAEEIQDEVDELLQKDANYSXXRLWPTMISEPRISYGNDALMPSLTETKTTRGSSVPVNEEFSLDDLEPVHFFWWLTSVPANTENEVEPVDARPAADRGLTTRPGSGLTNIKTEEISEVKMDAEFRHDSGYEVHHQKLVFFAEDVGSNKGAIIGLMVGGVVIATVIVITLVMLEGRNSTHSISSWVWVEVDAAVTPEERHLSPKMQQNGYENPTYKFFEQMQN

SEQ ID NO: 49449 - protein, 120 aa, Homo sapiens
  misc_feature (1)...(120): Xaa = X or * as defined in Table 2
PLLYAMSTGKRWLSFGSMIPPVAICASNKRIPWPFSMSSLFMAWNKEMMFPVSGSLYPVTARSADRSFSLNSMPTRPLLXASSTGNLKLLTGSTIKPVAAWASSNSRAVPGRTKPIFMAS

SEQ ID NO: 49450 - protein, 60 aa, Homo sapiens
  DOMAIN (11)..(50): Ribosomal protein L44e proteins domain identified by eMATRIX, accession number BL01172C, p-value=3.400e-33, raw score of 16.78
  DOMAIN (1)..(43): Ribosomal protein L44 domain identified by PFam, accession name Ribosomal_L44, E-value=0.0042, PFam score of 9.4
FNLIFFQAKTTKKIVLRLECVEPNCRSKRMLAIKRCKHFELGGDKKRKVYNYGWKVQSFS

SEQ ID NO: 49451 - protein, 143 aa, Homo sapiens
  DOMAIN (37)..(79): Ribosomal protein L44e proteins domain identified by eMATRIX, accession number BL01172B, p-value=1.000e-40, raw score of 14.10
  DOMAIN (41)..(125): Ribosomal protein L44 domain identified by PFam, accession name Ribosomal_L44, E-value=7e-23, PFam score of 89.5
  misc_feature (1)...(143): Xaa = X or * as defined in Table 2
MVHAEISDEGFFLSAPIALTQAWLNIPKTRRTFCKKCGKHQPHKVTQYKKGKDSLYAQGKRRYDRKQSGYGGQNXKPIFRKKAKTTKKIVLKALSALSPTCRSKSKCWLFKRCKHFXTGEEIRKRKGQVDPVLKCHLLFMEGH

SEQ ID NO: 49452 - protein, 26 aa, Homo sapiens
MVCSKILKNNSPYTYVFVFDGLFTLK

SEQ ID NO: 49453 - protein, 350 aa, Homo sapiens
  DOMAIN (167)..(183): Ank repeat proteins domain identified by eMATRIX, accession number PF00023A, p-value=4.500e-12, raw score of 16.03
  DOMAIN (163)..(294): Ank repeat domain identified by PFam, accession name ank, E- value=2.2e-08, PFam score of 41.3
  misc_feature (1)...(350): Xaa = X or * as defined in Table 2
VLACTVEASVIGGQKREMNMGSIVREGFMEEAGPRIGFNLSFFIQSTVTGSSSVGSTQLQPLSLPPATAGQEPRGTGPLGSHNSCPAPEPVSYGRLNDPPATTHPGSFTRFHSKPLTSSCWDSEMEGCVSNLMVCNLASFLNVSTNPCAFFPWYFYYLLLLXAGWSPLHIAASAGRDEIVKALLGKGGVLNVYTNTDRFLHCFLLSSPSFQIAVMLLEGGANPDAKDHYEATAMHRAAAKGNLLARNPNHYIELVVINWSLVVPDFRHLACDEERVEEAKLLVSQGASIYIENKEEKTPLQVAKGGLGFXYSREWVGRFKQLGFILYFVLLCLLSPVSYKLMYLCTRHHL

SEQ ID NO: 49454 - protein, 109 aa, Homo sapiens
PRQFGQLPLLKLHLLLQHRFYKVFALFTLTFLQVIGQAVGSSFGCQEFLCEVLEVLFALFQFRAQVLIGFQDAHFCPLGLGRHFHWMGKGFSHRVREGHHGHFFPFVRH

SEQ ID NO: 49455 - protein, 65 aa, Homo sapiens
SQNKAFFSQRKAESHHHHQSRAIRNAKGCFSQKECASRWKLGSPFRFETHKNLSASSTQSSSTSC

SEQ ID NO: 49456 - protein, 78 aa, Homo sapiens
QALIFLKRASCHSLDCPLQHHFQVMTCLLCEHLSSQDTHYPSPGPDSTHGLRCHSTRCHHSRTTPTAREPREDNAHGP

SEQ ID NO: 49457 - protein, 426 aa, Homo sapiens
  DOMAIN (145)..(173): Hemolysin-type calcium-binding region proteins domain identified by eMATRIX, accession number BL00330D, p-value=5.000e- 10, raw score of 12.47
  DOMAIN (239)..(322): Integrase core domain identified by PFam, accession name rve, E-value=7.5e-17, PFam score of 62.3
MSTDDDSDGGGGGDGGGGNNCDGGGMMMMVVVGSNDGVGDGGSGRGDGDSDSDGGGNDNANGDGNDNDYHDDSGGDGDGDDNGDGGRMMMMVMVVLVVIMMMVVVMMLRMMIIVTVVVRLRCDSRGSPDGGGSGSNDDGGGDDSDDGDDVEGDDNSDSGGGNDNGDGGGGDDVDEDDNGSGGGNVDGDDDVDDDDAHHNHLISPLRKSAESERFSRFQTHNVLTSTSEKVRQRSQNSLSVPVVKGDWQIDFTHMPQVRKLKYLLVWVDTFTGWVEAFPTGSEKATVVISSLLSDIIPQFGLPISIQSDNGLAFISQITQFLRLFVFSEIFVPLIVLNLQENDCTRIAPSGRTDVGKPASSQELQTAVDLQGKLPLSSDTLAIPSYQPSDKQGLRPTYLRISPGASVWTERGRALEHRAGEEGEKPS

SEQ ID NO: 49458 - protein, 184 aa, Homo sapiens
  DOMAIN (80)..(125): Ribosomal protein S24e proteins domain identified by eMATRIX, accession number BL00529B, p-value=3.744e-14, raw score of 20.08
  DOMAIN (47)..(141): Ribosomal protein S24e domain identified by PFam, accession name Ribosomal_S24e, E-value=4.9e-08, PFam score of 40.1
  misc_feature (1)...(184): Xaa = X or * as defined in Table 2
LPGRLLLLNFRQRRQIDRPSMNDTRNLSRTRKFHAPTRPTSEENKWVIDVLSPAGRPTVPXDQKFREKLAKMYQAPHPDVILVFGFRTHFGGGKTTGFGMIYDSPWIMQRKNEPKHRLARHGLYEKKKDLKKATEKERQEPELKKVQGGLAKGPLLGAGQKEEMKCLAVELEIGSQPKELKVLQ

SEQ ID NO: 49459 - protein, 158 aa, Homo sapiens
MKLDEDVKGISAEAPVLFAKAAQIFITELTLRAWIHTEDNKRRTLQRNDIAMAITKFDQFDFLIDIVPRDELKPPKRQEEVRQSVTPAEPVQYYFTLAQQPTAVQVQGQQQGQQTTSSTTTIQPGQIIIAQPQQGQTTPVTMQVGEGQQVQIVQAQPQ

SEQ ID NO: 49460 - protein, 815 aa, Homo sapiens
  misc_feature (1)...(815): Xaa = X or * as defined in Table 2
MRGSILKECGSKERASQVDLEYSRGNTASFAMCFHDRARIMKGSQRSRKLTGGEGREEGERVENKDFLDLHGQIQVRLVVKTASLLSRVTYIAEVEGRETDAGWRNELQVGRLDSGPDILVVSISTDHTLVDTHLEAVGGHSHEFPYFKNHLACHVESELQRDRNGHRDAGWRNMRHGITDKEMQDSQGSSDNHVLGSLRSWSARAAPALPGLPEEAFVEMSTEGGFGGTSRSDAQQSLKSFWLRPRFFITELTLRAWIHTEDNNCRTYVAMAITKFDQLDFLIDIVLRDELKPPKCQEEVLQSVTPAEPVQYYFTLAQQPTAVQVQGQQQGQTTASSMTTMQPGQIIIAQLQQGQTTPVTTQVGEGQQVQIVQAQPQGQAQXAQSGTGWTVQGQIQTLATSAQPITQTEVQQRQQXFSQFTDGQQLYQIQQVSIPAGQDLAQPMFIQSANQPSDGQAPRSHEVIAAAPAARRERERELAGRGPFCPPPAGNVRALKSRRCLPGERRERARKKKPEGGAAASERGETDSHPGASGQGPRDSGRVPLGMWSRRGLGVSRAPLHLLLGVSTSFPLPLTPLIPTTAVVNPLKPLKNRIKAPHRRMPLVPGGSQNLGTVRARISTRQSHAEPSTDNERVLSMTQDIHSIFLNLKNITWICTLQSCGFLLSNLCKDIVHKAGSGEARTRWSPRAQAGTHEDGLRLMPILAASDFDGVGVLQEKLVPFITELAQEPRGQSRTAGACCPTPATSSICVLFLRKTLTNTVEDIQIDNFRRKSDLGVGSPDWKNLLIDVTREDHENSQNNSKRRCKVNCETDQR

SEQ ID NO: 49461 - protein, 81 aa, Homo sapiens [sequence omitted]

SEQ ID NO: 49462 - protein, 45 aa, Homo sapiens; identical to SEQ ID NO: 36518
  misc_feature (1)...(45): Xaa = X or * as defined in Table 2

SEQ ID NO: 49463 - protein, 60 aa, Homo sapiens; identical to SEQ ID NO: 43368
  misc_feature (1)...(60): Xaa = X or * as defined in Table 2

SEQ ID NO: 49464 - protein, 76 aa, Homo sapiens
ARWLNAHAATSGKQSNFSRKSSTHNKPSEGKAANPKMVSSLPSTADPSHQTMPANKQNGSSNQRRRFNPQYHNNRL

SEQ ID NO: 49465 - protein, 93 aa, Homo sapiens
CNTQEQESKPKSINGFQRNESETLLLPTQSNRREKGDKQVRKRFDRAYSTRSKMAELNTHVNVKEKIYAVRSVVPNKSNNEIVLVLQQFDFNV

SEQ ID NO: 49466 - protein, 45 aa, Homo sapiens
ADTKPERGVSSAVFASGSEGRRLGCVLLSSSETRLLSGTLLWIPR

SEQ ID NO: 49467 - protein, 449 aa, Homo sapiens
MESHSDILEEKAIGSLPFEDAADLVQPTVALDAATGTTTAAGTTGTTTAYGKVGIVVLQFSHHCCLALLAPVARPGLGVSDSSNLNHMLQVLLQGSPEQPVSGFCCCVDDDDDYDDGGFLVRGNLDRLIRFTGSLPQSGPEQLSLQATQASVSSFAKYRRMFALSVESFLRSLGVPRDLIEILNVKSHSRKEGRVVRSNKKDKCSALQEDAHSLARSALRLSVEPPSNRAGKIPTRSALQWTPEEQSERIHGGALVISVIMGFLLFISFLQHFVSERKYDEELGKAARFSCDIEQLKAQIMLCGEITHPKNNYSSRTPCSSLLPLLNAHAATSGKQSNFSRKSSTHNKPSEGKAANPKMVSSLPSTADPSHQTMPANKQSGPEQLSLQATQASVSSFAKYRRMFALSVESFLRSLGVPRDLIEILNVKSHSRKEGRVVRSNKKDKCSAL

SEQ ID NO: 49468 - protein, 258 aa, Homo sapiens
FGARGNLKKAYSTRSKMAELNTHVNVKEKIYAVRSVVPNKSNNEIVLVLQQFDFNVDKAVQAFVDGSAIQVLKEWNMTGKKKNNKRKRSKSKQHQGNKDAKDKVERPDACPLQPQPPQIQNGPMNGCEKDSSSTDSANEKPALIPREKKISILEEPSKALRGVTGPNIEKSAKDLQRCTVSLTRYRVMIKEEVDSSVKKITAAFAELHNCIIDKEASLMAEMDKGIEEAMEILTARQRKAEALKRLTDLASQMAEMQL

SEQ ID NO: 49469 - protein, 641 aa, Homo sapiens
  DOMAIN (232)..(252): HISTONE H5 SIGNATURE domain identified by eMATRIX, accession number PR00624G, p-value=6.900e-09, raw score of 4.08
  misc_feature (1)...(641): Xaa = X or * as defined in Table 2
ADTKPERGVSSAVFASGSEGRRLGCVLLSSSETRLLSGTLLWIPRAYSTRSKMAELNTHVNVKEKIYAARSVVPNKSNNEIVLVLQQFDFNVDKAVQAFVDGSAIQVLKEWNMTGNKKNYKRIRSKSKQHQGNKDAKDKVERPEAGPLQPQPPQIQNGPMNGCEKDSSSTDSANEKPALIPREKKISILEEPSKALRGVTEGNRLLQQKLSLGGNPKPIHGTTERSDGLQWSAEQPCNPSKPKAKTSPVKSNTPAAHLEIKPDELAKKRGPNIEKSSVKDLQRLCTVFFXLEYRVMNXRERKWDSSGERRSKLPFAELHNCIIEQKEVSLMGRKWDXSLKEGRPWEILDWLVRKKSKKKLKRLTDLGQSRMAEMQLGPKLRAEIKHFVSEAVNYDEELGKSCPGFSCDIEQLKAQIIALPGKITHPKNNYFLKELPCSSLLPLLNAARSKPLGKTEVTFSRKSSTHNKPSEGKAANPKMVSSLPSTADPSHQTMPANKQNGSSNQRRRFNPQYHNNRLNGPAKSQGSGNEAEPLGKGNSRHGTQEGQPHNRFGFRPKNKGRCQKIQEASLGIEGPPRAPAHFLKRPRAKGSHAADTFGRARAFSGVSGSVRGSQCNLFPTRIEVSTDAAVLSVPGCDRWVA

SEQ ID NO: 49470 - protein, 28 aa, Homo sapiens
KKTCSLNNCFAEMLLICSFAPATLPQPL

SEQ ID NO: 49471 - protein, 11 aa, Homo sapiens
AGAKCLGQSYK

SEQ ID NO: 49472 - protein, 295 aa, Homo sapiens
  DOMAIN (57)..(100): kw TRANSCRIPTASE REVERSE II ORF2 domain identified by eMATRIX, accession number DM01354T, p-value=1.818e-36, raw score of 9.48
  DOMAIN (1)..(179): Reverse transcriptase domain identified by PFam, accession name rvt, E-value=2.7e-06, PFam score of 19.8
MIISIDTEKALDKILHPFILKTLNKLGIDGTYLKIIRALYDKPTANIIMNEQKLEAFPLKSNTKQGCPFLPLLFNIVLEVLARAIKQEKEIKSIQIGREEVKLSLFADDMIVYLENPIISAPNLLKLISNFSKVSGYKINVQKSQAFLYTSNRQTEIQMMSELPFTIATKGIKYLGILPTYKGCEGPLQGELQTPAQELEKTTLNFIWNQKRAHIAKTMLSKKNKAGGVMLPDFKLYYKAAVTKTAWLGDDQVFLIPRGHISDYHMGKNLGQYPAFQDRGPCGFPQCIVPLVYRD

SEQ ID NO: 49473 - protein, 212 aa, Homo sapiens
  misc_feature (1)...(212): Xaa = X or * as defined in Table 2
GCAGPCLVNQMFTSSILCKSHCHSLVSINQGHNAPWKAAGPLPLKAGYCQSFSPCDSLKYGSWDEKDLTVPQPDTRKASVLRWISQRGKPLAVDMEEGHCLCLPPGNXNVLGCKTPIVHLFNSELGRKAALWREARHVGSNAALLFFTPLRCLGGEKHKSGLHAHPGIVPSLELNYDIDSFAHVFVFVVAVELPLIITLLPYCIPLCCNNEK

SEQ ID NO: 49474 - protein, 73 aa, Homo sapiens
MCFVKQMLEGSMLLKSHHHSLISSTQGHKHCGRPQGPLPRKTRDLCSPVYLLTFSPLSSYDPATSPSLRNTQE

SEQ ID NO: 49475 - protein, 105 aa, Homo sapiens
MNPSEMQRKAPPRRRRHRNRAPLTHKMNKMVTSEEQMKLPSTKKAEPPTWAQLKKLTQLATKYLENTKVKQTPESMLLAALMIVSMVSAGVPNSSEETATIENGP

SEQ ID NO: 49476 - protein, 353 aa, Homo sapiens
MSTRTPKLVSPVSAPEHPELWRRAVASLHIRVWFVDQTLDSRDFVVNIVIKPDSQIITCENCRVLTRIDSTFNWQRRILLVRERKGVWIPVSMDRPWEASPSVHILIEVLKGVLNRSKRFIFTLIAVIMGLIAVTATAAVAGVALHSSVQSVNFVNDWQKNSTRLWNSQSSIDQKLANQINDLRQTVIWMGDRLMSLEHRFQLQCDWNTSDFCITPQIYNESEHHWDMVRRHLQGREDNLTLDISKLKEQIFEASKAHLNLVPGTEAIAGVDDGLANLNPVTWVKTIGSTTIINLILILVCLFCLLLVCRCTHQLGRDSDHRERAMMTMAVLSKRKGGNVPKSKRDHIVPVSV

SEQ ID NO: 49477 - protein, 625 aa, Homo sapiens
  DOMAIN (63)..(106): kw TRANSCRIPTASE REVERSE II ORF2 domain identified by eMATRIX, accession number DM01354T, p-value=6.053e-35, raw score of 9.48
  DOMAIN (125)..(316): Reverse transcriptase domain identified by PFam, accession name rvt, E-value=2.2e-85, PFam score of 297.1
MNDKNHMIISTDAEKTFDKIQQPFMLKTLNKLDIVGTYLKIIRAINDKPTASIILNGEKLEAFPLKTGTRQGCPLSPLLFNIVLEVLARAIRQEKEIKEKPVWVNQWPLPKQKLEALHLLANEQLEKGHIEPSFSPWNSPVFVIQKKSGKWRMLTDLRAVNAVNAVIQPMGPLQPGLPSLAMIPKDWPLIIIDLKDCFFTIPLAEQDCEKFAFTIPAINNKEPATRFQWKVLPQGMLNSPTICQTFVGRALQPVREKFSDCYIIHYIDDILCAAETKDKLIDCYTFLQAEVANAGLAIASDKIQTSTPFHYLGMQIENRKIKPPKIEIRKDTLKTLNDFQKLLGDINWIRPTLGIPTYAMSNLFSILRGDSDLNSKRMLTPEATKEIKLVEEKIQSAQINRIDPLATLQLLIFATAHSPTGIIIQNTDLVEWSFLPHSTVKTFTLYLDQMATLIGQTRLRIIKLCGNDPDKIVVPLTKEQVRQAFINSGAWQIGLANFVGIIDNHYPKTKIFQFLKMTTWILPKITRREPLENALTVFTDGSSNGKAAYTGPKERVIKTQYQSAQRAELVAVITVLQDFDQPINIISDSAYVVQATRDVETALIDQNGNQINDLRQTVIGWETGS

SEQ ID NO: 49478 - protein, 248 aa, Homo sapiens
MGKVRFYFRLWGPERLGGAEVEKTNFRPRVARRGDVVGPAPPRGGTSALRSPTLGAWQGAARDRGSHKSLLLQGQHQEYEESARMTQTLPSRPHLQHWGLHLNTGFGGDIQTISRLYKKLGASICFYAEPQAASTHSKRQKGMQRSCGKRRMRSASAQPPIVWDVRSASAQPPIVWDVRSASAWLPHLGSEKRLCPAISSGRCTQQLRRDSDHRERAMMTMALLSKRKGGNVGKRKRDQIVTVSGRKK

SEQ ID NO: 49479 - protein, 185 aa, Homo sapiens
  DOMAIN (148)..(185): gag gene protein p24 domain identified by PFam, accession name gag_p24, E-value=1.6e-11, PFam score of 47.8
  misc_feature (1)...(185): Xaa = X or * as defined in Table 2
XSTIAVFLHPGSSSSSLRLQLNPGCSFSNIYYTSLTSLITTHTSTLFSKPPAELQYRPPPESQYGYPRMPPAPQGRAPYPQPPTRRLNPTAPPSRQGSELHEIIDKSRKEGDTEAWQFPVMLEPMPPGEGAQEGEPLTVEARYKSFSIKMLKDMKEGVKQYGPNSPYMRTLLDSIAHGHRLIPYD

SEQ ID NO: 49480 - protein, 1883 aa, Homo sapiens
  DOMAIN (699)..(710): PROTEASE POLYPROTEIN HYDROLASE ASP domain identified by eMATRIX, accession number PD00302A, p-value=4.484e-11, raw score of 6.33
  DOMAIN (266)..(480): gag gene protein p24 domain identified by PFam, accession name gag_p24, E-value=1.9e-104, PFam score of 360.4
  misc_feature (1)...(1883): Xaa = X or * as defined in Table 2
XQPYEQGTSDLKDWKRIGKELKQAGRKGNIIPLTVWNDWAIIKAALEPFQTEEDSISVSDAPGSCLIDCNENTRKKSQKETESLHCEYVAEPVMAQSTQNVDYNQLQEVIYPETLKLEGKGPELMGPSESKPRGTSPLPAGQVLVRLQPQKQVKENKTQPQVAYQYWPLAELQYRPPPESQYGYPGMPPAPQGRAPYHQPPTRRLNPMAPPSRQGSELHEIIDKSRKEGDTEAWQFPVTLEPMPPGEGAQEGEPPTVEARYKSFSIKMLKDMKEGVKQYGPNSPYMRTLLDSIAYGHRLIPYDWEILAKSSLSPSQFLQFKTWWIDGVQEQVRRNRAANPPVNIDADQLLGIGQNWSTISQQALMQNEAIEQVRAICLRAWEKIQDPGSTCPSFNTVRQGSKEPYPDFVARLQDVAQKSIADEKAGKVIVELMAYENANPECQSAIKPLKGKVPAGSDVISEYVKACDGIGGAMHKAMLMAQAITGVVLGGQVRTFGGKCYNCGQIGHLKKNCPVLNKQNITIQATTTGFSGTTTPTVPSVSGNKPVTTIQQLSLTTSGSAAVDLCTIQAVSLLPGEPPQKIPTGVYGPLPEGTVGLILGRSSLNLKGVQIHTSVVDSDYKGEIQLVISSSIPWSASPRDRIAQLLLLPYIKGGNSEIKRIGGLVSTDPTGKAAYWASQVSENRPVCKAIIQGKQFEGLVDTGADVSIIALNQWPKNWLKQKAVTGLVGIGTASEVYQSMEILHCLGPDNQESTVQPMITSIPLNLWGRDLLQQWEKPVWVNQWPLPKQKLEALHLLANEQLEKGHIEPSFSPWNSPVFVIQKKSGKWHTLTDLRAVNAVIQPMGPLQPGLPSPAMIPKDWPLIIIDLKDCFFTIPLAEQDCEKFAFTIPAINNKEPATRFQWKVLPQGMLNSPTICQTFVGRALQPVREKFSDCYIIHYIDDILCAAETKDKLIDCYTFLQAEVANAGLAIASDKIQTSTPFHYLGMQIENRKIKPQKIEIRKDTLKTLNDFQKLLGDINWIRPTLGIPTYAMSNLFSILRGDSDLNSQRILTPEATKEIKLVEEKIQSAQINRIDPLAPLQLLIFATAHSPTGIIIQNTDLVEWSFLPHSTVKTFTLYLDQIATLIGQTRLRITKLCGNDPDKIVVPLTKEQVRQAFINSGAWQIGLANFVGLIDNHYPKTKIFQFLKLTTWILPKITRREPLENALTVFTDGSSNGKAAYTGPKERVIKTPYQSAQRAELVAVITVLQDFDQPINIISDSAYVVQATRDVETALIKYSMDDQLNQLFNLLQQTVRKRNFPFYITYIRAHTNLPGPLTKANEQADLLVSSALIKAQELHALTHVNAAGLKNKFDVTWKQAKDIVQHCTQCQVLHLPTQEAGVNPRGQAIVERTNRTLKTQLVKQKEGGDSKECTTPQMQLNLALYTLNFLNIYRNQTTTSAEQHLTGKKNSPHEGKLIWWKDNKNKTWEIGKVITWGRGFACVSPGENQLPVWLPTRHLKFYNEPIGDAKKRASTEMVTPVTWMDNPIEVYVNDSIWVPGPIDDRCPAKPEEEGMMINISIGYRYPPICLGRAPGCLMPAVQNWLVEVPTVSPISRFTYHMVSGMSLRPRVNYLQDFSYQRSLKFRPKGKPCPKEIPKESKNTEVLVWEECVANMIMGLIAVTATAAVAGVALHSSVQSVNFVNDWQKNSTRLWNSQSSIDQKLANQINDLRQTVIWMGDRLMSLEHRFQLQCDWNTSDFCITPQIYNESEHHWDMVRRHLQGREDNLTLDISKLKEQIFEASKAHLNLVPGTEAIAGVADGLANLNPVTWVKTIGSTTIINLILILVCLFCLLLVCRCTQQLRRDSDHRERAMMTMAVLSKRKGGNVGKSKRDQIVTVSV

SEQ ID NO: 49481 - protein, 1119 aa, Homo sapiens
  DOMAIN (36)..(54): RNase H domain identified by eMATRIX, accession number PF00075J, p-value=3.032e-18, raw score of 15.78
  DOMAIN (824)..(1025): gag gene protein p24 domain identified by PFam, accession name gag_p24, E-value=3.1e-92, PFam score of 319.8
MGVPEKIKTDNGPGYCSKAFQKFLSQWKISHTTGIPYNSQGQAIVERTNRTLKTQLVKQKEGGDSKECTTPQMQLNLALYTLNFLNIYRNQTTTSAEQHLTGKKNSPHEGKLIWWKDNKNKTWEIGKVITWGRGFACVSPGENQLPVWIPTRHLKFYNEPIRDAKKSTSAETETPQSSTVDSQDEQNGDVRRTDEVAIHQEGRAANLGTTKEADAVSYKISREHKGAAAANYTYWAYVPFPPLIRAVTWMDNPIEVYVNDSVWVPGPIDDRCPAKPEEEGMMINISIGYRYPPICLGTAPGCLMPAVQNWLVEVPIVSPISRFTYHMVSGMSLRPRVNYLQDFSYQRSLKFRPKGKPCPKEIPKESKNTEVLVWEECVANSAVILQNNEFGTIIDWAPRGQFYHNCSGQTQSCPSAQVSPAVDSDLTESLDKHKHKKLQSFYPWEWGEKGISTPRPKIVYPTALKRQQPSRTGHDDDGGFVKKKRGKCGEKQERSDCHCVCVERIPRDTKTAEGRRDLCLGKPGKDLTVPQPDTRKGVKVRSSVVIEDKSTRDPEYVYSQPYEQGTLDLKDWKRIGKELKQAGRKGNIIPLTVWNDWAIIKAALEPFQTEEDSVSVSDAPGSCLIDCNEKTRKKSQKETESLHCEYVAEPVMAQSTQNVDYNQLQEVIYPETLKLEGKGPELVGPSESKPRGTSPLPAGQVPVTLQPQKQVKENKTQPPVAYQYWPPAELQYRPPPESQYGYPGMPPAPQGRAPYPQPPTRRLNPTAPPSRQGSELHEIIDKSRKEGDTEAWQFPVTLEPMPPGEGAQEGEPPTVEARYKSFSIKMLKDMKEGVKQYGPNSPYMRTLLDSIAYGHRLIPYDWEILAKSSLSPSQFLQFKTWWIDGVQEQDADQLLGIGQNWSTISQQALMQNEAIEQVRAICLRAWEKIQDPGSACPSFNTVRQGSKEPYPDFVARLQDVAQKSIADEKARKVIVELMAYENANPECQSAIKPLKGKVPAGSDVISEYVKACDGIGGAMHKAMLMAQAITGVVLGGQVRTFGGKCYNCGQIGHLKKNCPVLNKQNITIQATTTVCRCTQQLRRDSDHRERAMMTMAVLSKRKGGNVGKSKRDQIVTVSV

SEQ ID NO: 49482 - protein, 1490 aa, Homo sapiens
  DOMAIN (269)..(300): Protein kinases ATP-binding region proteins domain identified by eMATRIX, accession number BL00107A, p-value=8.313e-21, raw score of 18.39
  DOMAIN (168)..(409): Eukaryotic protein kinase domain identified by PFam, accession name pkinase, E-value=4.7e-77, PFam score of 269.4
  misc_feature (1)...(1490): Xaa = X or * as defined in Table 2
MANFQEHLSCSSSPHLPFSESKTFNGLQDELTAMGNHPSPKLLEDQQEKGMVRTELIESVHSPVTTTVLTSVSEDSRDQFENSVLQLREHDESETAVSQGNSNTVDGESTSGTEDIKIQFSRSGSGSGGFLEGLFGCLRPVWNIIGKAYSTDYKLQQQDTWEVPFEEISELQWLGSGAQGAVFLGKFRAEEVAIKKVREQNETDIKHLRKLKHPNIIAFKGVCTQAPCYCIIMEYCAHGQLYEVLRAGRKITPRLLVDWSTGIASGMNYLHLHKIIHRDLKSPNVLVTHTDAVKISDFGTSKELSDKSTKMSFAGTVAWMAPEVIRNEPVSEKVDIWSFGVVLWELLTGEIPYKDVDSSAIIWGVGSNSLHLPVPSTCPDGFKILMKQTWQSKPRNRPSFRQTLMHLDIASADVLATPQETYFKSQKPELPGEMVDSMAGAGNVQSDPGNPCARKLSPWSGIIVEPVFPDAEETCPSFTRLSFHSAVVGTGLNVRLMLYTRKNLTCAQTINSSAFGNLNVTKKTTFIVHGFRPTGSPPVWMDDLVKGLLSVEDMNVVVVDWNRGATTLIYTHASSKTRKVAMVLKEFIDQMLAEGASLDDIYMIGVSLGAHISGFVGEMYDGWLGRITDGYFKSMETEKVEVDGKRGEKKSGKWRMLTDLRAVNAVIQPMGPLQPGLPSPAMIPKDWPLIIIDLKDCFFTIPLAEQDCEKFAFTIPAINNKEPATRFQWKVLPQGMLNSPTICQTFVGRALQPVREKFSDCYIIHYIDDILCAAETKDKLIDCYTFLQAEVANAGLAIASDKIQTSTPFHYLGMQIENRKIKPQKIEIRKDTLKTLNDFQKLLGDINWIRPTLGIPTYAMSNLFSILRGDSDLNSKRILTPEATKEIKLVEEKIQSAQINRIDPLAPLQLLIFATAHSPTGIIIQNTDLVEWSFLPHSTVKTFTLYLDQIATLIGQTRLRIIKLCGNDPDKIVVPLTKEQVRQAFINSGAWQIGLANFVGIIDNHYPKTKIFQFLKMTTWILPKITRREPLENALTVFTDGSSNGKAAYTGPKERVIKTPYQSAQRAELVAVITVLQDFDQPINIISDSAYVVQATRDVETALIKYSMDDQLNQLFNLLQQTVRKRNFPFYITHIRAHTNLPGPLTKANEEADLLVSSALIKAQELHALTHVNAAGLKNKFDVTWKQAKDIVQHCTQCQVLHLPTQEAGVNPRGQAIIERTNRTLKAQLVKQKREKDSKEYNTSQMQLNLAPYTLNFLNIYRNQTTTSAEQHFTGKKNSPHEGKLIWWKENKSKTWETGKVITWGRGFSCVSPGENQLPVWIPTRHLKFYNEPIGDAKKSTSTEMVTPVTWMDNPIEVYVNDSVWVPGPTDDRCPAKPEEEGMMINISIGYRYPPICLGRAPGCLMPTVQNWLVEVPIVSPICRFTYHMVYPTAPKRQRPSRTGHDDDGGFVEKKRGKCGEKQERSDCYCVCVERSGDSPKIDELSSFTX

SEQ ID NO: 49483 - protein, 1489 aa, Homo sapiens
  DOMAIN (572)..(582): C2HC-TYPE ZINC-FINGER SIGNATURE domain identified by eMATRIX, accession number PR00939A, p-value=5.500e-10, raw score of 8.95
  DOMAIN (1)..(554): gag gene protein p24 domain identified by PFam, accession name gag_p24, E-value=8.3e-94, PFam score of 325.1
MAYENANPECQSAIKPLKGKVPTGLSFHLTRNTHRCGGATHPFIWCPTWRLFSRVKVLSSVVIEDKSTRDPEYVYSQPCEQGTLDLKDWKRIGEELKQAGRKGNIIPLTVWNDWAIIKAALEPFQTKEDSVSVSDAPGSCVIDCNEKTGRKSQKETESLHCEYVTEPVMAQSTQNVDYNQLQGVIYPETLKLEGKGPELVGPSESKPRGPSPLPAGQVPVTLQPQTQVKENKTQPPVAYQYWPPAELQYLPPPESQYGYPGMPPALQGRAPYPQPPTVRLNPTASRSGQGGTLHAVIDEARKQGDLEAWRFLVILQLVQAGEETQVGAPARAETRCEPFTMKMLKDIKEGVKQYGSNSPYIRTLLDSIAHGNRLTPYDWESLAKSSLSSSQYLQFKTWWIDGVQEQVRKNQATKPTVNIDADQLLGTGPNWSTINQQSVMQNEAIEQVRAICLRAWGKIQDPGTAFPINSIRQGSKEPYPDFVARLQDAAQKSITDDNARKVIVELMAYENANPECQSAIKPLKGKVPAGVDVITEYVKACDGIGGAMHKAMLMAQAMRGLTLGGQVRTFGKKCYNCGQIGHLKRSCPVLNKQNIINQAITAKNKKPSGLCPKCGKGKHWANQCHSKFDKDGQPLSGNRKRGQPQAPQQTGAFPVQLFVPQGFQGQQPLQKIPPLQGVSQLQQSNSCPAPQQAAPHTIKTFTLYLDQMATLIGQGRLRIITLCGNDPDKITVPFNKQQVRQAFISSGAWQIGLANFLGIIDNHYPKTKIFQFLKLTTWILPKITRREPLENALTVFTDGSSNGKAAYTGPKERVIKTPYQSAQRAELVAVITVLQDFDQPINIISDSAYVVQATRDVETALIKYSTDDHLNQLFNLLQQTVRKRNFPFYITHIRAHTNLPGPLTKANEQADLLVSSAFIKAQELLALTHVNAAGLKNKFDVTWKQAKDIVQHCTQCQVLHLSTQEAGVNPRGLCPNALWQMDGTHVPSFGRLSYVHVTVDTYSHFIWATCQTGESTSHVKKHLLSCFAVMGVPEKIKTDNGPGYCSKAFQKFLSQWKISHTTGIPYNSQGQAIVERTNRTLKTQLVKQKEGGDSKECTTPQMQLNLALYTLNFLNIYRNQTTTSAKQHLTGKKHSPHEGKLIWWKDNKNKTWEIGKVITWGRGFACVSPGENQLPVWIPTRHLKFYNEPIGDAKKRASTEMVTPVTWMDNPIEVYVNDSVWVPGPTDDRCPAKPEEEGMMINISIVYRYPPICLGRAPGCLMPAVQNWLVEVPTVSPNSRFTYHMVSGMSLRPRVNYLQDFSYQRSLKFRPKGKPCPKEIPKESKNTEVLVWEECVANSAVILQNNEFGTIIDWAPRGQFYHNCSGQTQSCPSAQVYPTAPKRQRPSRTGHDDDGGFVEKKRGKCGEKQERSDCYCVCVERSGYFKAKEMSNDLPFVLVNQRKWAYHLMLIALGMPTLEIPGRGEIMKPELPPLHWTDTRTPSQNDTPQ

SEQ ID NO: 49484 - protein, 1124 aa, Homo sapiens
  DOMAIN (572)..(624): ELEMENT TRANSPOSABLE INSERTION PROTEIN TRANSPOSITION DNA domain identified by eMATRIX, accession number PD02455C, p-value= 1.108e-13, raw score of 29.23
  DOMAIN (327)..(456): RNase H domain identified by PFam, accession name rnaseH, E- value=7.6e-55, PFam score of 195.6
  misc_feature (1)...(1124): Xaa = X or * as defined in Table 2
XIAEKFAFTIPAINNKEPATRFQWKVLPQGMLNSPTICQTFVGRALQPVRDKFSDCYIIHYIDDILCATETRDKLIDCYTFLQAEVANAGLAIASDKIQTSTPFHYLGMQIENRKIKPPKIEIRKDTLKTLNDFQKLLGDINWIRPTLGIPTYAMSNLFSILRGDSDLNSKRMLTPEATKEIKLVEEKIQSAQINRIDPLATLQLLIFATAHSPTGIIIQNTDLVEWSFLPHSTVKTFTLYLDQMATLIGQTRLRIIKLCGNDPDKIVVPLTKEQVRQAFINSGAWQIGLANFVGIIDNHYPKTKIFQFLKMTTWILPKITRREPLENALTVFTDGSSNGKAAYTGPKERVIKTQYQSAQRAELVAVITVLQDFDQPINIISDSAYVVQATRDVETALIKYSMDDQLNQLFNLLQQTVRKRNFPFYITHIRAHTNLPGPLTKANEQADLLVSSALIKAQELHALTHVNAAGLKNKFDVTWKQAKDIVQHCTQCQVLHLPTQEAGVNPRGLCPNALWQMDVTHVPSFGRLSYVHVTVDTYSHFIWATCQTGESTSHVKKHLLSCFAVMGVPEKIKTDNGPGYCSKAFQKFLSQWKISHTTGIPYNSQGQAIVERTNRTLKTQLVKQKEGGDSKECTTPQMQLNLALYTLNFLNIYRNQTTTSAEQHLTGKKNSPHEGKLIWWKDNKNKTWEIGKVITWGRGFACVSPGENQLPVWIPTRHLKFYNEPIRDAKKSTSAETETSQSSTVDSQDEQNGDVRRTDEVAIHQEGRAANLGTTKEADAVSYKISREHKGDTNPREYAACSLDDCINGGAAAANYTNWAYVPFPPLIRAVTWMDNPIEVYVNDSVWVPGPIDDRCPAKPEEEGMMINISIGYRYPPICLGRAPGCLMPAVQNWLVEVPTVSPISRFTYHMVSGMSLRPRVNYLQDFSYQRSFKFRPKGKPCPKEIPKESKNTEVLVWEECVANSAVILQNNEFGTIIDWAPRGQFYHNCSGQTQSCPSAQVSPAVDSDLTESLDKHKHKKLQSFYPWEWGEKGISTPRPKIISPVSGPEHPELWRLTVASHHIRIWSGNQTLETRDLCRCTQQLRRDSDHRERAMMTMAVLSKRKGGNVGKSKRDQIVTVSV

SEQ ID NO: 49485 - protein, 616 aa, Homo sapiens
  DOMAIN (494)..(504): C2HC-TYPE ZINC-FINGER SIGNATURE domain identified by eMATRIX, accession number PR00939A, p-value=8.000e-10, raw score of 8.95
  DOMAIN (262)..(476): gag gene protein p24 domain identified by PFam, accession name gag_p24, E-value=1.9e-104, PFam score of 360.4
  misc_feature (1)...(616): Xaa = X or * as defined in Table 2
XQGTLDLKDWKRIGKELKQAGRKGNIIPLIVWNDWAIIKAALEPFHTEEDSVSVPDDPRSCIVDCNDKTRKKSQKETESLHCEYVAEPVMAQSTQNVDYNQLQEVIYPETLKLEGKGPELMGPSESKPRGTSPLPAGQVLVRLQPQKQVKENKTQPQVAYQYWPLAELQYRPPPESQYGYPGMPPAPQGRAPYHQPPTRRLNPMAPPSRQGSELHEIIDKSRKEGDTEAWQFPVTLEPMPPGEGAQEGEPPTVEARYKSFSIKMLKDMKEGVKQYGPNSPYMRTLLDSIAYGHRLIPYDWEILAKSSLSPSQFLQFKTWWIDGVQEQVRRNRAANPPVNIDADQLLGIGQNWSTISQQALMQNEAIEQVRAICLRAWEKIQDPGSTCPSFNTVRQGSKEPYPDFVARLQDVAQKSIADEKAGKVIVELMAYENANPECQSAIKPLKGKVPAGSDVISEYVKACDGIGGAMHKAMLMAQAITGVVLGGQVRTFGGKCYNCGQIGHLKKNCPVLNKQNITIQATTTGREPPDLCPRCKKGKHWASQCRSKFDKNGQPLSGNEQRGQPQAPQQTGAFPIQPFVPQGFQGQQPPLSQVFQGISQLPQYNNCPSPQAAVQQ

SEQ ID NO: 49486 - protein, 1909 aa, Homo sapiens
  DOMAIN (477)..(490): dUTPase domain identified by eMATRIX, accession number PF00692A, p-value=4.682e-10, raw score of 20.03
  DOMAIN (153)..(367): gag gene protein p24 domain identified by PFam, accession name gag_p24, E-value=3.1e-103, PFam score of 356.4
MAQSTQNVDYNQLQEVIYPETLKLEGKGQVPVRLQPQTQVKENKTQPPVAYQYWPPAELQYRPPPESQYGYPGMPPAPQGRAPYPQPPTRRLNPTAPPSRQGSELHEIIDKSRKEGDTEAWQFPVTLEPKPPGEGAQEGEPPTVEARYKSFSIKMLKDMKEGVKQYGPNSPYMRTLLDSIAHGHRLIPYDWEILAKSSLSPSQFLQFKTWWIDGVQEQVRRNRAANPPVNIDADQLLGIGQNWSTISQQALMQNEAIEQVRAICLRAWEKIQDPGSTCPSFNTVRQGSKEPYPDFVARLQDVAQKSIADEKARKVIVELMAYENANPECQSAIKPLKGKVPAGSDVISEYVKACDGIGGAMHKAMLMAQAITGVVLGGQVRTFGGKCYNCGQIGHLKKNCPVLNKQNITIQATTTGFSGTTTPTVPSVSGNKPVTTIQQLSPATSGSAAVDLCTIQAVSLLPGEPPQKIPTGVYGPLPEGTVGLILGRSSLNLKGVQIQIKCVMLNSPTICQTFVGRALQPVREKFSDCYIIHYIDDILCAAETKDKLIDCYTFLQAEVANAGLAIASDKIQTSTPFHYLGMQIENRKIKPQKIEIRKDTLKTLNDFQKLLGDINWIRPTLGIPTYAMSNLFSILRGDSDLNSQRILTPEATKEIKLVEEKIQSAQINRIDPLAPLQLLIFATAHSPTGIIIQNTDLVEWSFLPHSTVKTFTLYLDQIATLIGQTRLRITKLCGNDPDKIVVPLTKEQVRQAFINSGAWQIGLANFVGLIDNHYPKTKIFQFLKLTTWILPKITRREPLENALTVFTDGSSNGKAAYTGPKERVIKTPYQSAQRDELVAVITVLQDFDQPINIISDSAYVVQATRDVETALIKYSMDDQLNQLFNLLQQTVRKRNFPFYITYIRAHTNLPGPLTKANEQADLLVSSALIKAQELHALTHVNAAGLKNKFDVTWKQAKDIVQHCTQCQVLHLPTQEAGVNPRGLCPNALWQMDVTHVPSFGRLSYVHVTVDTYSHFIWATCQTGESTSHVKKHLLSCFAVMGVPEKIKTDNGPGYCSKAFQKFLSQWKISHTTGIPYNSQGQAIVERTNRTLKTQLVKQKEGGDSKECTTPQMQLNLALYTLNFLNIYRNQTTTSAEQHLTGKKNSPHEGKLIWWKDNKNKTWEIGKVITWGRGFACVSPGENQLPVWLPTRHLKFYNEPIGDAKKRASTEMVTPVTWMDNPIEVYVNDSIWVPGPIDDRCPAKPEEEGMMINISIGYRYPPICLGRAPGCLMPAVQNWLVEVPTVSPISRFTYHMVSGMSLRPRVNYLQDFSYQRSLKFRPKGKPCPKEIPKESKNTEVLVWEECVANSAVILMGLIAVTATAAVAGVALHSSVQSVNFVNDWQKNSTRLWNSQSSIDQKLANQINDLRQTVIWMGDRLMSLEHRFQLQCDWNTSDFCITPQIYNESEHHWDMVRRHLQGREDNLTLDISKLKEQIFEASKAHLNLVPGTEAIAGVADGLANLNPVTWVKTIGSTSIINLILILVYPTALKRQRPSRTGHDNDGGFVEKKRGKCGEKQERSDCHCVCVERMAALDSHRSTNPIVNCICQGSRLHAPYENLVPDDPSLSPVTPGWDHLVAGKQAQGSHRFYITFSELFNLSDNQLVSEHMPSPTPQDGGGAAAPGGDSPVGHWGKPHDPDSRQGPQRQLMQQIRSPGALRHRRGCRPRSVPSASTLASQLPPLNLRRALRLSVRAPANPAGSGSQFLSQPAPAPAPPALQLLFPTPILGRPQRGTDPRPYRQHRGSRLSQPFWRPRLSVEARAPRELGAQPVKSSSASALTAVSSPPAGRHRATANVSCCCPPPRSAARASAQPVAAEDRGIEPVLVLGKRFRPKSPTWATWRSPENSAQDPEAGQPARPPVPGHEAPRT

SEQ ID NO: 49487 - protein, 53 aa, Homo sapiens
MLCCLEISSARGTSHTGDVIVESFPKLSPPILRGAGKVASTVLLPNELSRQEG

SEQ ID NO: 49488 - protein, 331 aa, Homo sapiens
  misc_feature (1)...(331): Xaa = X or * as defined in Table 2
KQRQARERHLPRIPQLSAVVTIETLXRKXRNFAELKISRLRKKFAHKMLQKARRKLIYEKVKHCHKEYRQMYRTEIQMATMARKAGNFFVHPKPKLAFVIRISAISGVSPKWKNKQLCPLNHVFGLGMGDLRAFGLADGTGPSGGEITGMRDLRGPLSVRAPSAGVAEIPRHLIVFEDVVNGKFLQTSRCEISGSKNKVWQTLLKNKRERQRLPTGFGRLADQRAYGEAKNNCGQVGLVETLWERHLLRIGVYIATSSLAVPTLSSNYNGLAHDQSCSDTVQRSTGAPEAWDRGYCVGRGAQGIPIFFLDRPLTSLFDEARGSSSASLLHV

SEQ ID NO: 49489 - protein, 101 aa, Homo sapiens
AGTMEGVEEKKKEVPAVPETLKKKRRNFAELKIKRLRKKFAQKMLRKARRKLIYEKAKHYHKEYRQMYRTEIRMARMARKAGNFYVPAEPKLAFVIRIRGI

SEQ ID NO: 49490 - protein, 52 aa, Homo sapiens
  misc_feature (1)...(52): Xaa = X or * as defined in Table 2
GRVLLXDKTSRGTIRQQQLLFTNICCSAASAGXYPGKQGLEWTSSRLQQTCS

SEQ ID NO: 49491 - protein, 89 aa, Homo sapiens
  misc_feature (1)...(89): Xaa = X or * as defined in Table 2
GLCIRHVLVPSAAGLLEFAGGPLQTLFAWVSAAEAAEQQIWVNSKCCCPDRSSGSFVSEEYLAVXGVGLTLSSASLMLGAVDWSCSHSA

SEQ ID NO: 49492 - protein, 58 aa, Homo sapiens
  misc_feature (1)...(58): Xaa = X or * as defined in Table 2
MQYVQQKPKLKFQVHICAYRKTVLQPPLLIPRQTWVWSGPPANSNRPAAGGADCXKEN

SEQ ID NO: 49493 - protein, 687 aa, Homo sapiens
  DOMAIN (148)..(193): kw TRANSCRIPTASE REVERSE II ORF2 domain identified by eMATRIX, accession number DM01354N, p-value=1.000e-40, raw score of 13.17
  DOMAIN (165)..(404): Reverse transcriptase domain identified by PFam, accession name rvt, E-value=2e-44, PFam score of 161.0
  misc_feature (1)...(687): Xaa = X or * as defined in Table 2
MFAVLQAPLVIPRQTWVWSGPPANSNRPAAEGPDCXKENXRQTGSGVDLQQTPTDLQLRVLIVRRKTNEQKGHPHQNPICTSPSSKTKVDTTTNMGEKQSRKTENSKNQSASPPPNLKKKREKNQIDAIKNDKGDITTDPTEIQTTIREYYKHLYSNKLENLEEMGKFLDTYNLPGLNQEEVESLNRPITGSEIEVIINSLPTKKSPGPDGFTAEFYQRTKDKNHMIISIDEEKAFDKIQQPFMLKTLNKLGIDGTYLKIIRAIYDKPTANIILNGQKLEAFPLKAGTRQGCPLSPLLFNIVLEVLAREIRQEKEIKGIQVGKEEVKLYLFADDMIVYLENPIISAQNLLKLISNFSKVSGYKINVQKSQAFLYTSNRQTESQIMSELPVTIASKRIKYLGIQLTRGVKNLFKENYKPLLNKIKEDTNKWKNIPCSWIGRINIMKMAIVPKVIYRFNAIPIKLPMTFFTELEKTTLKCIWNQKRAHIVKSILSQKNKAGGIMLPDFKLYYKATVTKTAWYWYQNRHIDQWNRTEPSEIMPHIYSYLIFDKPDKTRNGERIPYLIRWCWCWQNWLAICRKLKLDPFLTSYTKINSRWIKDLNVRPKTIKTLEENLGITIQDIGMGKDFMSKTPKAMATKAKIDKWDLIKLKSFCTAKETTIRVNRQPTEWENISAIYSSDKGLISRIY

SEQ ID NO: 49494 - protein, 83 aa, Homo sapiens
ISLKRSFTSFVSWIPRYFILFEATVNGSSLMIWLSVCLSCRSVGVCWRSTPDPVSLGITSRGCRTANIAEQQISLSDPSSGSF

SEQ ID NO: 49495 - protein, 128 aa, Homo sapiens
NLCCSAASAGDTQANRVWSGTPTNSSRPEVSSGAMDGEGWGLPVDPLTPGHQDALPWQRCYHPCSSSSVPPRQACASPASCSSSAAWTSASTGPWHSGCGSSCGSCCCWGSPSASVGVGAGAIRSRTV

SEQ ID NO: 49496 - protein, 213 aa, Homo sapiens; identical to SEQ ID NO: 31362

SEQ ID NO: 49497 - protein, 152 aa, Homo sapiens
WVRTSSFSSLVFDDGDVHMGFWCGCPFCLLVFLLTVRTISCRSVGVCWRSTPDPVCLGITSRGCSTANIAERQMLLPDPSSGSFISEGHPAFSSISDCCASSDRGSVGVGPSELDAGYNLLVCHLLRLLKPTSINSSKSFSIQFCFLAVEEL

SEQ ID NO: 49498 - protein, 173 aa, Homo sapiens
QSGPSAAGLLEFAGGPLQTLFAWVSAAEAAEQRILVNSRCCCLIVPRKFCLRGVASHVRCQSAPYDVFCHGITLAKCWCSALGLPSLQSCEPNALFFINYPVCGITAPCCKVEGTMGVGPKSPQLSYNVLGSDNNGVLLGSMAIFTILILLIHEHGMFFHLFVSSFISLSSGL

SEQ ID NO: 49499 - protein, 316 aa, Homo sapiens
  misc_feature (1)...(316): Xaa = X or * as defined in Table 2
MVLEKAREEVDPPSMLIPPVTQCGQLPRSQCPQPTLSRMLTLEVGISLGIIVLMISLWPDTVKEYQSREALSFKKYNKNPGLLKFAGDPLQTLFAWVSPAEAAEQQISALCFLWKLRPRGAPTRCQPLLSYTRCLSAPAGSFVYTMRGKPPIQASVMADASPPTKIEHPRTTSDCCVASKNFKPVDLSLLCSMGVGSAELDHWATWLQSPFQGSERFCLAGVPGTTGVXKETPAASSVSAQMAAQFCAXNHRTLVVXAPKGILWVCGLRRPWEKRSICAGVHHSSWHSPSWLPLARGGSSSTPCTSWVRRCPTLHL

SEQ ID NO: 49500 - protein, 390 aa, Homo sapiens
  misc_feature (1)...(390): Xaa = X or * as defined in Table 2
YCPKEGTLDFNFAFNMTAVNVALIRDTKWLTLEVCREFQRGTCSRADADCKFAHPPRVCHVENGRVVACFDSLKSVTAVPFLFMALGLSREPETVPASMVQTFSLGVGGGAGSVXPDENCKYLHPPPHLKTQLEINGRNNLIQQKTAAAMFAQQMQLMLQNAQMSSLGSFPMTPSIPANPPMSFESLRYHILGMGLVPAELVPNTPVLIPGKPTSLQLPGSCLGPKLMAFQINWEVLPRNFQRGNCSRGENDCRYAHPTDASMIEASDNTVTICMGYIKGRRTVGVWGIKAKSSKQRILDTKGSHQGNSFVRGTDYLIPICTNMSKAKGTAFLKWMQKLVYNGSSGQCSPAFFCCAWKEHSEKAGRASGAKCNRHRHTNPVFLMREGAIS

SEQ ID NO: 49501 - protein, 158 aa, Homo sapiens
  misc_feature (1)...(158): Xaa = X or * as defined in Table 2
KFNPFVTSRPRARIRKRAFNAPSHIPKGRLLSFPPLSPKSLRPEGTNRADSHAPIPKRMIESSRLYRGHLXGSAKLAKVVPRFTRKKYVIYIERVQREKANGTTVHVGIHPSKQVVITKAKTGTKTRKKIPPNRKAQSRQVGKEKGKYKERTIEKMQE

SEQ ID NO: 49502 - protein, 130 aa, Homo sapiens
  misc_feature (1)...(130): Xaa = X or * as defined in Table 2
TPLSSCFLSREKATQLLFPAVVAVPMVLSAMGFTAAGIASSSIAAKMMSAAAIANGGGVASGSLVATLQSLGXVSWRGLPTVLPTELPRQACPTLSTLCFFPGATGLSGLTKFILGSIGSAIAAVIARFY

SEQ ID NO: 49503 - protein, 116 aa, Homo sapiens; identical to SEQ ID NO: 42099
  DOMAIN (103)..(115): RIBOSOMAL PROTEIN P2 SIGNATURE domain identified by eMATRIX, accession number PR00456F, p-value=6.400e-12, raw score of 5.86
  DOMAIN (28)..(116): 60s Acidic ribosomal protein domain identified by PFam, accession name 60s_ribosomal, E-value=1.1e-28, PFam score of 94.4

SEQ ID NO: 49504 - protein, 85 aa, Homo sapiens
  DOMAIN (72)..(84): RIBOSOMAL PROTEIN P2 SIGNATURE domain identified by eMATRIX, accession number PR00456F, p-value=6.400e-12, raw score of 5.86
  DOMAIN (28)..(85): 60s Acidic ribosomal protein domain identified by PFam, accession name 60s_ribosomal, E-value=2.1e-21, PFam score of 71.2
GCVGVRPSLHPATSTASGSASPTLARAMASVSELACIYSALILHDDEVTVTEDKINAAPAEEKKVEAKKEESEESDDDMGFGLFD

SEQ ID NO: 49505 - protein, 116 aa, Homo sapiens
  DOMAIN (6)..(116): 60s Acidic ribosomal protein domain identified by PFam, accession name 60s_ribosomal, E-value=1.7e-08, PFam score of 30.2
  misc_feature (1)...(116): Xaa = X or * as defined in Table 2
LGPSFLHDDEVTVTEDKIQMPLIKAAGVNVEPFWPGLCFAKALGKRSTLGSLILAMLGGPVGPGSQPAGCLQPAGGSCPPSTCCWFQLEGEEKWEAKERKIPREFXLIDMGFGLFD

SEQ ID NO: 49506 - protein, 57 aa, Homo sapiens
GGKAQNGVGEELLLQRRVPGITNDEAPKHSSNPSPRTSHPNCGSPSSNELGCCVDVP

SEQ ID NO: 49507 - protein, 129 aa, Homo sapiens
  DOMAIN (65)..(91): ATP SYNTHASE C SUBUNIT SIGNATURE domain identified by eMATRIX, accession number PR00124C, p-value=9.400e-26, raw score of 12.42
  DOMAIN (41)..(92): ATP synthase subunit C domain identified by PFam, accession name ATP-synt_C, E-value=0.015, PFam score of 12.8
GWDWNCVWEPHHWLCQSLNSVTQAGVQLCNLSSLQPLPLGFKQFSCLSLPSSWDYRNPSLKQQLFSYAILGFALSEAMGLFCLMVAFLISLPCEGAVSTSHSSPASGWPRVFLFLYLPRQPGERGWLRV

SEQ ID NO: 49508 - protein, 220 aa, Homo sapiens
  DOMAIN (192)..(218): ATP SYNTHASE C SUBUNIT SIGNATURE domain identified by eMATRIX, accession number PR00124C, p-value=3.250e-27, raw score of 12.42
  DOMAIN (162)..(219): ATP synthase subunit C domain identified by PFam, accession name ATP-synt_C, E-value=6.1e-11, PFam score of 49.8
MMMVMMVVMVVVVVVVELRAIKMQMEDRWSNRPDTATALAGGAVMPELILYVAITLSVAERLVGPAPHPLKMFACSKFVSTPSLVKSTSQLLSRPLSAVVLKRPEILTDESLSKLGSLMSPLTSTCLLNRKLPKPAPISKGTSNNSSPKFNWKLGLATSWGGWFLGLGLETVFGEPSSLGYARNPSLKQQLFSYAILGFALSEAMGLFCLMVAFLILFAM

SEQ ID NO: 49509 - protein, 141 aa, Homo sapiens
  misc_feature (1)...(141): Xaa = X or * as defined in Table 2
TNDFNLQNPGSCFPSACPAGVGSERLPVLGWFVGNRSFPPPPQSTLSVLGKRLGRNGAIAAGVFGALFIGYCIYFDRKRLKXPQLKDAEAVQKFFLEEIXLGEEILAKGVDHLTNPSAFFGQPNHFPLQMDSFGPFLRFQA

SEQ ID NO: 49510 - protein, 85 aa, Homo sapiens
RRSEERQHHSHFLLVPLCHIWSHLSGSKVKGHFLKFFLLFIKSHGRVDAGGQAPVAGLDEDPETAGQAAEARPETPAAAPQHSRR

SEQ ID NO: 49511 - protein, 109 aa, Homo sapiens
STHTTYWEGCRTTSAGLLRKHEPGEEAFFYHSTSKKPGIAGLIKVNVQFVRMMKRSIPWAELNPYHQAHKATGGPLKNMVLFTRQRLSIQPLTQEEFDFVLSLEEKEPS

SEQ ID NO: 49512 - protein, 51 aa, Homo sapiens
VDVQFVRMMKRFIPLAELKSYHQAHKATGGPLKNMVLFTRQSYLLLLPSTL

SEQ ID NO: 49513 - protein, 91 aa, Homo sapiens
LGCLPHHIHWEQLLLVPLCHIWSHLSGSKVKGHFLKFFLLFIKSHGRVDAGGQAPVAGLDEDPETAGQAAEARPETPAAAPQHSRRSSAFS

SEQ ID NO: 49514 - protein, 185 aa, Homo sapiens
  misc_feature (1)...(185): Xaa = X or * as defined in Table 2
LARITRIVRTKVPCSVTMSRPRKRLAGTSGSDKGLSGKRTKTENSGEALAKVEDSNPQKTSATKNCLKNLSSHWLMKSEPESRLEKGVDVKFSIEDLTAQAKQTTCWDGVRNYQASRNFLRAMKLGEEAFFYPXQLAKKPGIAGLMKIVKEAYPDHTQFXEKNPHYDPSSKEDNPKWSMKSLILF

SEQ ID NO: 49515 - protein, 328 aa, Homo sapiens
  DOMAIN (28)..(59): Acyl-CoA dehydrogenase domain identified by PFam, accession name Acyl-CoA_dh, E-value=7.7e-05, PFam score of 19.3
  misc_feature (1)...(328): Xaa = X or * as defined in Table 2
RISTSTLCPKPKKLIAPPGRAGLASMGLNEEQKEFQKVAFDFAAREMAPNMAEWDQKDRKADGKGGAVTQEVQAQLLVKHGQKLVSRFQLSSFSYVDSVRTTQSKQEHLQTDKGLSGKRTKTENSGEALAKVEDSNPQKTSATKNCLKNLSSHWLMKSEPESRLEKGVDVKFSIEDLKAQPQQTTCWEGVRNYQARNFLRAMKLGEEAFFYHSNCKEPGIAGLMKIVKEAYPDHTQFEKKQPPPLXPPSXQRGTTPKWPHGWMVQVWFGMMKRFHSPLAELKSHHQAHKASGGPLKNMVLFTRQRLSIQPLTQEEFDFVLSLEEKEPS

SEQ ID NO: 49516 - protein, 239 aa, Homo sapiens
  misc_feature (1)...(239): Xaa = X or * as defined in Table 2
VRLQFLTPTLRAARTMAAPPQLRALLVVVNALLRKRRYHAALAVLKGFRNGAVYGAKIRGPSRRWVMTFLFREWAASREKLWAILQATYIHSWNLARFVFHLTRVFRCPAVPYITRARTYPAHAFPGAGLSFGGILVFGRKQXTFNSQINMYLLSTRPCLPXSRLAVRRKGLHPXNPRWDPFPVCLTAVVWGLVLWLFEYHRSTLQPSLQSSMTYLYEDSNVWHDISDFLVYNKSRPSN

SEQ ID NO: 49517 - protein, 283 aa, Homo sapiens; identical to SEQ ID NO: 39751
  DOMAIN (28)..(82): Ribosomal protein S2 proteins domain identified by eMATRIX, accession number BL00962B, p-value=6.029e-32, raw score of 36.15
  DOMAIN (18)..(167): Ribosomal protein S2 domain identified by PFam, accession name Ribosomal_S2, E-value=4.5e-70, PFam score of 246.2

SEQ ID NO: 49518 - protein, 432 aa, Homo sapiens
  DOMAIN (61)..(74): Ribosomal protein S2 proteins domain identified by eMATRIX, accession number BL00962A, p-value=1.600e-10, raw score of 11.87
  DOMAIN (224)..(258): Ribosomal protein S2 domain identified by PFam, accession name Ribosomal_S2, E-value=5.5e-09, PFam score of 35.7
  misc_feature (1)...(432): Xaa = X or * as defined in Table 2
GNLAAGKTIQAQDRDAVGILSSRTGESMENLQKNLLPKQRRRTRETFTMSGALDVLQMKEEDVLKFLAAGTHLGGTQFLLSRGHGYFYKGKSDGLSFIINPKRAREELLLPARQIVPHKTPSDVSVISSGNTGQVCGTVRAVCLKFAAATGATPIAGRFTPGTFHXPRSKAAFREPRLLVVTXPPGADPPALSRSASYVNLPYHLRCGNTDSQLRYVDIAIPCNNKGAHSVGLMWWMLARGSFCAMRGTISREHPWEVMPDLYFYRDPEEIEKEEQAAAXERQVTKEEFQGEWTAPAPEFTATQPEVADWSEGVQGAPLVPYSAIPPTEDWSSQPAMEDWSAAPTAQATEWCSRTSLRQNPSDTELKKEGLYSARSISKTHVSKTELPNQGTKKCSRTSHRQNPSVTELKKEGLYLARSIGKTHISKTELPE

SEQ ID NO: 49519 - protein, 503 aa, Homo sapiens
  DOMAIN (80)..(95): Intermediate filaments proteins domain identified by eMATRIX, accession number BL00226A, p-value=2.000e-16, raw score of 12.77
  DOMAIN (83)..(291): Intermediate filament proteins domain identified by PFam, accession name filament, E-value=2.7e-06, PFam score of 27.5
  misc_feature (1)...(503): Xaa = X or * as defined in Table 2
AFTTRSTFSTNYRSLGSVQAPSYGARPRQAARPASYAGAGGSGSRISVSRSTSFRGGMGSGGLATGTSPGVMAGMGGIQNEKETMQSLNDRLASYLGQEXRSLEDRRTRKLGRAKFREHFGRKKGPQVRDWSHYFKIIEDLEGFRFFRKILVGQCPASVSARFDNAPSLLLDXFXEFKYXGQSWPMCPVLLENDIPLGSAKVIDDTNYHTDLQLETEIRGSSRRELLFQXRRNHEEEVKGLQAQIASSGLTVEVDAPKSQDLAKIMADIRAQYDELARKEPEKEAXTKYWSSADLRESTTVGHPHKSAXGWKLAEDDASQKLRRTVQSLEDRPWTSMRKSERPALENSPXGEVEAPLRPLQDWSQLQTGIPACHLWSQELGTRHRAQRGQRPGPQGVXGPLLNHQGSSLEAEICHLTRPPSWKIGEDFNLGDSLDERNSMQTIQKTTTPPGXVGLGKVVSXDQLTPKVLKALSQQEAVVPFWGSRRPIKSFRVQKKKKEKESF

SEQ ID NO: 49520 - protein, 245 aa, Homo sapiens
  misc_feature (1)...(245): Xaa = X or * as defined in Table 2
CCRPCATPYALRSPLRXPACPPPRWRPSSMPTSRPPVSPAASPTCGTCMLSPCPPAEHLLHLPHAQPQDPALLQPCHPAPPLRPRALHAAHHVGWPAPHQPLLPPPVLCPCGGAGRGGGXRCPWRGPSSSSPGPTLIAGQDPGAAQPXTWPQPTLTSVSATASPKAPLPLAAAVPGAPAEGCCPLLRQALPAGQLPPGGRRATSAVPPAVPGDPPAQPTMPGSMSCWALAPARPCPPGRCWAWRS

SEQ ID NO: 49521 - protein, 357 aa, Homo sapiens
  DOMAIN (168)..(187): GONADOTROPHIN RELEASING HORMONE RECEPTOR SIGNATURE domain identified by eMATRIX, accession number PR00529C, p-value=7.506e- 10, raw score of 11.03
  misc_feature (1)...(357): Xaa = X or * as defined in Table 2
RGNSRLRYSHEDELQLPRLPELFGNCRQLLEEVEVATDPAGFRIVQEKVFKGLDLLERAAEMLSQSTLFGRECRFWKDLSPTHLITFWGPAFQGALTMKQVNPSKRLRSFCSGAREHFINYLTQCHCYHVGQSFELPKTMNNSAENHTANSSMAYPSLVAMASQRQAKIQRYKQKKELEHRLSAMKSAVESGQADDERVRGYYLLHLQRWVDISLEEIESIDQEIKILRERDSSREASTSNSSRQERPPVKPFHSHFGTWLHSQSTFGAGYSKGWPTYGRXVSWYEQHRKLWSTYPDQGNMPRAAPEGISEKAAQQQEDQEEKEEEDDEPNNFHRAREWDDWKDTHPRGYGNRQNMG

SEQ ID NO: 49522 - protein, 87 aa, Homo sapiens
  DOMAIN (4)..(37): Ribosomal protein S4e proteins domain identified by eMATRIX, accession number BL00528A, p-value=5.000e-36, raw score of 16.12
AMARGPKKHLKRVAAPKHWMLDKLTGVFAPRPSTGPHKLRECLPLIIFLRNRLIDKTGENFRLIYDTKGRFPVHRITPEEAKYKLCK

SEQ ID NO: 49523 - protein, 348 aa, Homo sapiens
  DOMAIN (35)..(68): Ribosomal protein S4e proteins domain identified by eMATRIX, accession number BL00528A, p-value=1.000e-34, raw score of 16.12
  misc_feature (1)...(348): Xaa = X or * as defined in Table 2
GRTAENPARAVSSPNFYAHRKTEVLFPCLTQPLARGPKKHLKRVAAPKHWMLDKLTRVFAPRPSTGPHKLRECLSRIIFLRNRLKYALTGDEVKKICMQRFIKIDGQGSELDINLPLLGFMGCPSAFDKTGEENFRLDLIDTQGVRFCWYIRIXPPWRKAKLQVWCQKXGKILCGPTKRESPSSGLTHXCPAPHPAYPPIPPHPRXNGYPIPDXIXEDLAKINLISIQSSEHWXTLCMGDLEGAXPXGRNWVLITPTERGHPGIFLTVGSRXKDANGQQAFGHFGLFQHFLVIGKGNKTHGISLPRGKGIRLHHLLEERDKRLAAKQSQWGEMGSLGVDIVQIFWYRN

SEQ ID NO: 49524 - protein, 79 aa, Homo sapiens
DTWLTGVFCLLPTQVNQSWRKERWWEDCRTSYTCKSNWHKGWNWTSGINECPAGALCSTFESYFPTPAALCEGLWSHSF

SEQ ID NO: 49525 - protein, 187 aa, Homo sapiens
  misc_feature (1)...(187): Xaa = X or * as defined in Table 2
MAWQMMQLLLLALVTAAGSAQPRSARARTDLLNVCMNAKHHKTQPSPEDELYGQSPWMCKGSCRKTKSWNIHRKSKCEVGLAWEACSVSAGTGRGPGCGRWVGAPQGPCPRKCSSGXPTWVQRSQNMEEMAVVNQSWRKERILNVPLCKEDCERWWEDCRTSYTCKSNWHKGWNWTSAPSAVCDPLL

SEQ ID NO: 49526 - protein, 248 aa, Homo sapiens
  misc_feature (1)...(248): Xaa = X or * as defined in Table 2
MDMAWQMMQLLLLALVTAAGSAQPRSARARTDLLNVCMNAKHHKTQPSPEDELYGQCSPWKKNACCTASTSQELHKDTSRLYNFNWDHCGXKWNPTCKRPLYPQDSCLYECLTPTLGPWIRQFNQSWRKERFLNVPLCKEDCERWWEDCRTSYTCKSNWHKGWNWTSGINKGRPGAFXSTFESYFPTPAALCEGLWSHSFKVSNYSRGSGRCIQMWFDSAQGNPNEEVAKFYAAAMNAGAPSRGIIDS

SEQ ID NO: 49527 - protein, 594 aa, Homo sapiens
  DOMAIN (36)..(437): Guanylate-binding protein domain identified by PFam, accession name GBP, E-value=0.092, PFam score of -122.5
  misc_feature (1)...(594): Xaa = X or * as defined in Table 2
QRLTATSSWTTMAKNRRDRNSWGGFSEKTYEWSSEEEEPVKKAGPVQVLIVKDDHSFELDETALNRILLSEAVRDKEVVAVSVAGAFRKGKSFLMDFMLRYMYNQESVDWVGDYNEPLTGFSWRGGSERETTGIQIWSEIFLINKPDGKKVAVLLMDTQGTFDSQSTLRDSATVFALRHNDPASIQVYNLSQNVQEDDLQHLQLFTEYGQDWAMGGKHFLEAIFRSLDYFFVRDWSFPYEFSYGADGGAKFLEKRLKVSGNQHEELQNVRKHIHSCFTNISCFLLPHPGLKVATNPNFDGKLKEIDDEFHQKLXKYLIPWAYFRSRGAXDIXRRSNGGLKITCRGLVEYFKAYIKIYQGEELPHPKSMLQATAEANNLAAVATAKDTYNKKMEEICGGDKPFLAPNDLQTKHLATXGRNLWKLFRGVKKMGGEEFSRRYLQQLESEIDELYTNISSHNDSKNTFPCSSYPQPTLFCSHPLITYVIAGVTGFIGLDIIASLCNMIMGLTLITLCTWAYIRYSGEYRELGAVIGPRWLQLCGTREVQMRPWNKLYQCQQATPTDILYPSKPFPLHPKVGNLTEQIQKRKKMVMPKF

SEQ ID NO: 49528 - protein, 52 aa, Homo sapiens
  misc_feature (1)...(52): Xaa = X or * as defined in Table 2
VVPLPLPPLDSWTCESWLRSHILTGESENPDHKRIXPYTSDLPEGPGPWATD

SEQ ID NO: 49529 - protein, 1180 aa, Homo sapiens
  DOMAIN (674)..(692): CADHERIN SIGNATURE domain identified by eMATRIX, accession number PR00205B, p-value=3.118e-11, raw score of 11.39
  DOMAIN (161)..(795): Cadherin domain identified by PFam, accession name cadherin, E-value=3.2e-102, PFam score of 353.0
  misc_feature (1)...(1180): Xaa = X or * as defined in Table 2
ESVREKVLCGLIQQTVTSVCWSGTYIFAVLLVCVVFHSGAQEKNYTIREEIPENVLIGNLLKDLNLSLIPNKSLTTTMQFKLVYKTGDVPLIRIEEDTGEIFTTGARIDREKLCAGIPRDEHCFYEVEVAILPDEIFRLVKIRFLIEDINDNAPLFPATVINISIPENSAINSKYTLPAAVDPDVGINGVQNYELIKSQNIFGLDVIETPGGDKMPQLIVQKELDREEKDTYVMKVKVEDGGFPQRSSTAILQVSVTDTNDNHPVFKETEIEVSIPENAPVGTSVTQLHATDADIGENAKIHFSFSNLVSNIARRLFHLNATTGLITIKEPLDREETPNHKLLVLASDGGLMPARAMVLVNVTDVNDNVPSIDIRYIVNPVNDTVVLSENIPLNTKIALITVTDKDADHNGRVTCFTDHEIPFRLRPVFSNQFLLGDLQHILDLGGPQKEYAIKLLGWQSWGKPPLNQSAMLFIKVKDENDNAPVFTQSFVTVSIPENNSPGIQLTKVSAMDADSGPNAKINYLLGPDAPPEFSLDCRTGMLTVVKKLDREKEDKYLFTILAKDNGVPPLTSNVTVFVSIIDQNDNSPVFTHNEYNFYVPENLPRHGTVGLITVTDPDYGDNSAVTLSILDENDDFTIDSQTGVIRPNISFDREKQESYTFYVKAEDGGRVSRSSSAKVTINVVDVNDNKPVFIVPPSNCSYELVLPSTNPGTVVFQVIAVDNDTGMNAEVRYSIVGGNTRDLFAIDQETGNITLMEKCDVTDLGLHRVLVKANDLGQPDSLFSVVIVNLFVNESVTNATPDXXTGAAKAFEAPVTPNTXDSXCISPTSDYVKILVAAVAGTITVVVVIFITAVVRCRQAPHLKAAQKNMQNSEWATPNPENRQMIMMKKKKKKKKHSPKNLLLNVVTIEETKADDVDSDGNRVTLDLPIDLEEQTMGKYNWVTTPTTFKPDSPDLARHYKSASPQPAFQIQPETPLNLKHHIIQELPLDNTFVACDSISNCSSSSSDPYSVSDCGYPVTTFEVPVSVHTRPPVDLEVGGAQSGQVAILTSSLMELLLCLMVAAFLPLELRPLGQQNVMSWEQEAKILLVGYWGDGEWCHFHFHHLIPGPVNPGYERKQYHILDSDSEDTQPSGELCPIPVRPFTILSIQLLQDDGEHCGTKQGFQPAVQLGLLPHKTLK

SEQ ID NO: 49530 - protein, 210 aa, Homo sapiens
  DOMAIN (75)..(112): Ribosomal protein L32e proteins domain identified by eMATRIX, accession number BL00580B, p-value=2.125e-38, raw score of 19.83
  DOMAIN (39)..(210): Ribosomal protein L32 domain identified by PFam, accession name Ribosomal_L32e, E-value=2.7e-08, PFam score of 41.0
  misc_feature (1)...(210): Xaa = X or * as defined in Table 2
FRSLPRRCLPRWQPSSFLGHHGPPFRPPCEAPKIVKKENPRKFIRAPSQTGYAKLSVNWRKTPEAIDNRVRRRFKGQILMPNIGYGSNKKTKHMLPSGFRKFLVHNVKEPEIAADVATNLTVPRSLTMFPPRNRKAIRGKGACPIGPFRSSPNPIARVAQLKENXVRQLMCNKSYCAEIAHNVSSKNRKAIVERAAQLAIRVTNPNARAQ

SEQ ID NO: 49531 - protein, 77 aa, Homo sapiens
  DOMAIN (11)..(63): L-lactate dehydrogenase proteins domain identified by eMATRIX, accession number BL00064E, p-value=1.462e-15, raw score of 27.20
  DOMAIN (1)..(73): lactate/malate dehydrogenase domain identified by PFam, accession name ldh, E-value=7.4e-15, PFam score of 55.0
ELNPEMGTANDSENWKEVHKMVVESAYEVIKLKGYTNWAIGLTSVINQKLKDDEVAQLKKSADTLWDIGCRNLKTTM

SEQ ID NO: 49532 - protein, 116 aa, Homo sapiens
  misc_feature (1)...(116): Xaa = X or * as defined in Table 2
RWLATHYLTVKLSLLPNLAVTCQPKREQNITSNESTDCXVIVTSTKSDSLYTVGMLALSVRAIRCPLYLLTGLIFVSKNDLWYCELQSHYTVVLLLFMRKRSRFQSNVQRKLMTNF

SEQ ID NO: 49533 - protein, 116 aa, Homo sapiens; identical to SEQ ID NO: 49532
  misc_feature (1)...(116): Xaa = X or * as defined in Table 2

SEQ ID NO: 49534 - protein, 27 aa, Homo sapiens
  misc_feature (1)...(27): Xaa = X or * as defined in Table 2
SMYMDENXRLELITLXFSSMYMDHSLL

SEQ ID NO: 49535 - protein, 383 aa, Homo sapiens
  DOMAIN (268)..(323): ELEMENT INSERTION TRANSPOSABLE SEQUENCE TRANSPOSASE FOR domain identified by eMATRIX, accession number PD02662D, p-value= 3.973e-10, raw score of 21.71
  misc_feature (1)...(383): Xaa = X or * as defined in Table 2
MCELDILHDSLYQFCPELHLKRLNSLTLACHALLDCKTLTLTELGRNLPTKARTKHNIKRIDRLLGNRHLHKERLAVYRWHASFICSGNTMPIVLVDWSDIREQKRLMVLRASVALHGRSVTLYEKAFPLSEQCSKKAHDQFLADLASILPSNTTPLIVSDAGFKVPWYKSVEKLGWYWLSRVRGKVQYADLGAENWKPISNLHDMSSSHSKTLGYKRLTKSNPISCQILLYKSRSKGRKNQRSTRTHCHHPSPKIYSASAKEPWVLATNLPVEIRTPKQLVNIYSKRMQIEETFRDLKSPAYGLGLRHSRTSSSERFDIMLLIALMLQLTCWLAGVHAQKQAFPDCDSSAVHRLRYCKGRDYNRVRSSCVQRHAPVLNRKIX

SEQ ID NO: 49536 - protein, 45 aa, Homo sapiens
  misc_feature (1)...(45): Xaa = X or * as defined in Table 2
AGLFKSRKVSSICIRFEXILTSCLGVRISTGKLVARIHGSFADAE

SEQ ID NO: 49537 - protein, 131 aa, Homo sapiens
  misc_feature (1)...(131): Xaa = X or * as defined in Table 2
GFLERPRILIKVTLSIKQKSTSIFVGGQFSKFRFLTVLAWKCLSQPCFXAXTPASQHVSXSIRAISSMISKRSELLVRLWRRPSPXAGLFKSRKVSSICIRFEXILTSCLGVRISTGKLVARTHGSFADAE

SEQ ID NO: 49538 - protein, 45 aa, Homo sapiens
  misc_feature (1)...(45): Xaa = X or * as defined in Table 2
AGLFKSRKVSSICIRFEXILTSCLGVRISTGKLVARTHGSFADAE

SEQ ID NO: 49539 - protein, 116 aa, Homo sapiens
  misc_feature (1)...(116): Xaa = X or * as defined in Table 2
RWLATPYLTVKLSLLPNLAVTCQPKREQNITSNESTDCXVIVTSTKSDSLYTVGMLALSVRAIRCPLYLLTGLISVSKNGLWYCELQSHYTVVLLLFMRKRSRFQSNVQRKLMTNF

SEQ ID NO: 49540 - protein, 139 aa, Homo sapiens
RASRKNFGRGKTLEADTAWIQRGMQSGGVNENAVASGKARGRQEKNHRACLPDNKGPVSGPKIIDGAELLIPMAGLINKEDELARLAKEVAKIEGEISRIENKLANEGFVARAPEAVIAKEREKLEGLFLSMNARKPTC

SEQ ID NO: 49541 - protein, 300 aa, Homo sapiens; identical to SEQ ID NO: 48193
  DOMAIN (119)..(134): FecCD transport family domain identified by eMATRIX, accession number PF01032B, p-value=1.360e-16, raw score of 9.12
  DOMAIN (2)..(227): FecCD transport family domain identified by PFam, accession name FecCD_family, E-value=2.3e-08, PFam score of -52.2

SEQ ID NO: 49542 - protein, 45 aa, Homo sapiens; identical to SEQ ID NO: 49538
  misc_feature (1)...(45): Xaa = X or * as defined in Table 2

SEQ ID NO: 49543 - protein, 143 aa, Homo sapiens
  misc_feature (1)...(143): Xaa = X or * as defined in Table 2
MWGIGSRTPIYNKILVYSSPEVSCEKPKYVKSQTSTHTGFESHKRYIFYLRLVGKNLHVSAMGLGKSQERRKKALKSQPQQPADSFPSLPTVEGLTTSGEVAAGFWLSGEALSSCXLLSASVHLLLACLGMGKCSCSGFWLYF

SEQ ID NO: 49544 - protein, 288 aa, Homo sapiens
  DOMAIN (113)..(138): L-LACTATE DEHYDROGENASE SIGNATURE domain identified by eMATRIX, accession number PR00086B, p-value=2.385e-25, raw score of 13.67
  DOMAIN (108)..(286): lactate/malate dehydrogenase domain identified by PFam, accession name ldh, E-value=3.6e-80, PFam score of 279.7
MEVDIRPQSSSGTDAGSHLPTPGQLSRPRAWVNKKGLSVEKKFLEIPGKDKEDRMELLGKPITAETYYPDSLKRSNGSDNGSLKITKQNLARAVPGVVQTKDYVNIFNSLADELALVDVLEDKLKGEMMDLQHGSLFLQTPKIVADKDYSVTANSKIVVVTAGVRQQEGESRLNLVQRNVNVFKFIIPQIVNAYEVIKLKGYTNWAIGLSVADLIESMLKNLSRIHPVSTMVKGMYGIENEVFLSLPCILNARGLTSVINQKLKDDEVAQLKKSADTLWDIQKDLKDL

SEQ ID NO: 49545 - protein, 45 aa, Homo sapiens; identical to SEQ ID NO: 49538
  misc_feature (1)...(45): Xaa = X or * as defined in Table 2

SEQ ID NO: 49546 - protein, 301 aa, Homo sapiens
  DOMAIN (113)..(168): ELEMENT INSERTION TRANSPOSABLE SEQUENCE TRANSPOSASE FOR domain identified by eMATRIX, accession number PD02662D, p-value= 3.973e-10, raw score of 21.71
  misc_feature (1)...(301): Xaa = X or * as defined in Table 2
HHTAHCQXCWLXSDHGINPLRSWVGTGXVGVRGKVQYADLGAENWKPISNLHDMSSSHSKTLGYKRLTKSNPISCQILLYKSRSKGRKNQRSTRTHCHHPSPKIYSASAKEPWVLATNLPVEIRTPKQLVNIYSKRMQIEETFRDLKSPAYGLGLRHSRTSSSERFDIMLLIALMLQLTCWLAGVHAQKQGWDKHFQANTVRNRNGSLLTNWPSVPPTIKEEENSEEELAAATTSKEQEPIGTDLDAVRTPEPLEEFPKREDQEGSPPETSLPYKWVVEAANLLIPAVGSSLSEALDLIES

SEQ ID NO: 49547 - protein, 183 aa, Homo sapiens
MGVNDLWQILEPVKQHIPLRNLGGKTIAVDLSLWVCEAHPVKKMMGSVMKKHLRDFADFGTTIKQDFRLLGQTSVDRLLQLSQGQAAYPIPDDQVQSVLISMLLIALMLHLTCGLAGVHAQKQGWDKHFQANTVRNRNVLSTVRLGMEVLRHSGYTITREDSLVAATLLTQNLFTHGYVLGKL

SEQ ID NO: 49548 - protein, 116 aa, Homo sapiens; identical to SEQ ID NO: 49539
  misc_feature (1)...(116): Xaa = X or * as defined in Table 2

SEQ ID NO: 49549 - protein, 116 aa, Homo sapiens; identical to SEQ ID NO: 49532
  misc_feature (1)...(116): Xaa = X or * as defined in Table 2

SEQ ID NO: 49550 - protein, 80 aa, Homo sapiens
  misc_feature (1)...(80): Xaa = X or * as defined in Table 2
AGLFKSRKVSSICIRFEXILTSCLGVRISTGKLVARTHGSFADASFSTDLYHGTLKPASLTMSGVVLLGRMLARSARNWS

SEQ ID NO: 49551 - protein, 495 aa, Homo sapiens; identical to SEQ ID NO: 35537
  DOMAIN (239)..(294): ELEMENT INSERTION TRANSPOSABLE SEQUENCE TRANSPOSASE FOR domain identified by eMATRIX, accession number PD02662D, p-value= 3.973e-10, raw score of 21.71

SEQ ID NO: 49552 - protein, 43 aa, Homo sapiens
  misc_feature (1)...(43): Xaa = X or * as defined in Table 2
YAQTDDNRRNLILNGTPLRRVKVLVFDIEYPXXKVYGYNSTLA

SEQ ID NO: 49553 - protein, 292 aa, Homo sapiens
MCELDILHDSLYQFCPELHLKRLNSLTLACHALLDCKTLTLTELGRNLPTKARTKHNIKRIDRLLGNRHLHKERLAVYRWHASFICSGNTMPIVLVDWSDIREQKRLMVLRASVALHGRSVTLYEKAFPLSEQCSKKAHDQFLADLASILPSNTTPLIVSDAGFKVPWYKSVEKLGWYWLSRRMQIEETFRDLKSPAYGLGLRHSRTSSSERFDIMLLIALMLQLTCWLAGVHAQKQGWDKHFQANTVRNRNNTASRAALQTPIWTADGWRRLAGGACGPWQPLASPAVVDS

SEQ ID NO: 49554 - protein, 116 aa, Homo sapiens; identical to SEQ ID NO: 49532
  misc_feature (1)...(116): Xaa = X or * as defined in Table 2

SEQ ID NO: 49555 - protein, 524 aa, Homo sapiens
  DOMAIN (264)..(314): ELEMENT INSERTION TRANSPOSABLE SEQUENCE TRANSPOSASE FOR domain identified by eMATRIX, accession number PD02662B, p-value= 1.000e-40, raw score of 20.18
  DOMAIN (219)..(494): Transposase (IS4 family) domain identified by PFam, accession name Transposase_11, E-value=1.6e-100, PFam score of 347.4
MGSVTKSRGPTDSSAFFQINRDYSFLDYILGGCQLMFTPWARLLQSTCCEQCSKKAHDQFLADLASILPSNTTPLIVSDAGFKVPWYKSVEKLGWYWLSRVRGKVQYADLGAENWKPISNLHDMSSSHSKTLGYKSLTISNPISGQILLYKSRSKGRKNQRSTRTHCHHPSPKIYSASAKEPWILATNLPVEIRTPKQLVNIYSKRMQIEETFRDLKSPAYGLGLRHSRTSSSERFDIMLLIALMLQLTCWLAGVHAQKQAFRFMRLVDGTAISAPGGGSAEWRLHMGYDPHTCQFTDFELTDSRDAERLDRFAQTADEIRIADRGFGSRPECIRSLAFGEADYIVRVHWRGLRWLTAEGMRFDMMGFLRGLDCGKNGETTVMIGNSGNKKAGAPFPARLIAVSLPPEKALISKTRLLSENRRKGRVVQAETLEAAGHVLLLTSLPEDEYSAEQVADCYRLRWQIELAFKRLKSLLHLDALRAKEPELAKAWIFANLLAAFLIDDIIQPSLDFPPRSAGSEKKN

SEQ ID NO: 49556 - protein, 728 aa, Homo sapiens
  DOMAIN (681)..(696): FKBP-type peptidyl-prolyl cis-trans isomerase proteins domain identified by eMATRIX, accession number BL00453A, p-value=1.857e- 13, raw score of 15.57
  DOMAIN (666)..(708): FKBP-type peptidyl-prolyl cis-trans isomeras domain identified by PFam, accession name FKBP, E-value=6.1e-16, PFam score of 54.2
MATPDAGLPGAEGVEPAPWAQLEAPARLLLQALQAGPEGARRGLGVLRALGSRGWEPFDWGRLLEALCREEPVVQGPDGRLELFWGTCITPDLRRFTYSTRSEEQDRRTEQTCIQTTRTTEGLEPGAVLRTVATRYLHPYSPLPNSITVPFSLTLCLGATSPSAVLYPGPAQTELLCCLVKMESLEPDAQVLMLGLTLACHALLDCKTLTLTELGRNLPTKARTKHNIKRIDRLLGNRHLHKERLAVYRWHASFICSGNTMPIVLVDWSDIREQKRLMVLRASVALHGRSVTLYEKAFPLSEQCSKKAHDQFLADLASILPSNTTPLIVSDAGFKVPWYKSVEKLGWYWLSRVRGKVQYADLGAENWKPISNLHDMSSSHSKTLGYKRLTKSNPISCQILLYKSRSKGRKNQRSTRTHCHHPSPKIYSASAKEPWVLATNLPVEIRTPQQLVNIYSKRMQIEETLRDLKSPAYGLGLRHSRTSSSKRFDIMLLIALMLQTTCGVRAFMLRKKMDLLCAQLQLPQLSDLGLLRLCTWLLALSPDLSLSNATVLTRSLFLGRPGSEQYRRAFELADQLGLKHPDCIEHVFPTYADEQCTHVLTEEDFFSTEEREGVDRCIGVICSSTMTTDEGAKNNEESPTATVAEQGEDITSKKDRGVLKIVKRVGNGEETPMIGDKVYVHYKGKLSNGKKFDSSHDRNEPFVFSLGKETCSVIGAGMQWHHHNSLQH

SEQ ID NO: 49557 - protein, 46 aa, Homo sapiens
  misc_feature (1)...(46): Xaa = X or * as defined in Table 2
AGLFKSRKVSSICIRFEXILTSCLGVRISTGKLVARIHGSFADADT

SEQ ID NO: 49558 - protein, 45 aa, Homo sapiens; identical to SEQ ID NO: 49536
  misc_feature (1)...(45): Xaa = X or * as defined in Table 2

SEQ ID NO: 49559 - protein, 42 aa, Homo sapiens
KVVATRLGLLAPASFTNDSALGNLRVHRIVFSSAPSSGGAVW

SEQ ID NO: 49560 - protein, 32 aa, Homo sapiens
  misc_feature (1)...(32): Xaa = X or * as defined in Table 2
KLIEAIWSSXFITGSSLRHNERLGASTSSGEY

SEQ ID NO: 49561 - protein, 45 aa, Homo sapiens; identical to SEQ ID NO: 49538
  misc_feature (1)...(45): Xaa = X or * as defined in Table 2

SEQ ID NO: 49562 - protein, 546 aa, Homo sapiens
  DOMAIN (200)..(226): Acyltransferases ChoActase / COT / CPT family proteins domain identified by eMATRIX, accession number BL00439H, p-value=8.435e- 14, raw score of 18.24
MDRNYPSAGFGDPLGAGAGWSYERSAKARQRILVDRKEWSVCPLESGHGLVPLHGKSRMFPGLVYGSSRTSHPETDILHRQAYAAPHPLQSYATNHHPADPQSFLANRAGVEEDPQCLAPFRVAVDKHQALLKAAMSGQGVDRHLFALYIVSRFLHLQSPFLTQVHSEQWQLSTSQIPVQQMHLFDVHNYPDYVSSGGGFGPADDHGYGVSYIFMGDGMITFHISSKKSSTKTLRLAESSAELFLPQTQDLRALGLLFLEVRDVDFPGNRHLHKERLAVYRWHASFICSGNTMPIVLVDWSDIREQKRLMVLRASVALHGRSVTLYEKAFPLSEQCSKKAHDQFLADLASILPSNTTPLIVSDAALKCHGRKNQRSTRTHCHHPSPKIYSASAKEPWVLATNLPVEIRTPKQLVNIYSKRMQIEETFRDLKSPAYGLGLRHSRTSSSERFDIMLLIALMLQLTCWLAGVHAQKQGWDKHFQANTVRNRNVLSTVRLGMEVLRHSGYTITREDLLVAATLLGSKFNHTWSLRPQRRRTASKTGLQTS

SEQ ID NO: 49563 - protein, 35 aa, Homo sapiens
  misc_feature (1)...(35): Xaa = X or * as defined in Table 2
ALHPRNRHLHKERLGCIPVACXLYLFGQYDAHCTC

SEQ ID NO: 49564 - protein, 451 aa, Homo sapiens
  DOMAIN (268)..(323): ELEMENT INSERTION TRANSPOSABLE SEQUENCE TRANSPOSASE FOR domain identified by eMATRIX, accession number PD02662D, p-value= 3.973e-10, raw score of 21.71
MCELDILHDSLYQFCPELHLKRLNSLTLACHALLDCKTLTLTELGRNLPTKARTKHNIKRIDRLLGNRHLHKERLAVYRWHASFICSGNTMPIVLVDWSDIREQKRLMVLRASVALHGRSVTLYEKAFPLSEQCSKKAHDQFLADLASILPSNTTPLIVSDAGFKVPWYKSVEKLGWYWLSRVRGKVQYADLGAENWKPISNLHDMSSSHSKTLGYKRLTKSNPISCQILLYKSRSKGRKNQRSTRTHCHHPSPKIYSASAKEPWVLATNLPVEIRTPKQLVNIYSKRMQIEETFRDLKSPAYGLGLRHSRTSSSERFDIMLLIALMLQLTCWLAGVHAQKQGWDKHFQANTVRNRNVLSTVRLGMEVLRHSGYTITREDLLVAGTLLAQNLFTHETWMQLEAIILNELMGKRKIKYRIFSRISETGTLGTHEHGDRNNRYCGLLKEAGRE

SEQ ID NO: 49565 - protein, 562 aa, Homo sapiens
  DOMAIN (127)..(140): DNA-POLYMERASE GAMMA (FAMILY A) SIGNATURE domain identified by eMATRIX, accession number PR00867A, p-value=7.375e-15, raw score of 12.55
MSRLLWRKVAGATVGPGPVPAPGRWVSSSVPASDPSDGQRRRQQQQQQQQQQQQQPQQPQVLSSEGGQLRHNPLDIQMLSRGLHEQIFGQGGEMPGEAAVRRSVEHLQKHGLWGQPAVPLPDVELRLPPLYGDNLDQHFRLLAQKQSLPYLEAANLLLQAQLPPKPPAWAWAEGWTRYGPEGEAVPVAIPEERALVFDVEVCLAEGTCPTLAVAISPSACLTLACHALLDCKTLTLTELGRNLPTKARTKHNIKRIDRLLGNRHLHKERLAVYRWHASFICSGNTMPIVLVDWSDIREQKRLMVLRASVALHGRSVTLYEKAFPLSEQCSKKAHDQFLADLASILPSNTTPLIVSDAGFKVPCECQIEETFRDLKSPAYGLGLRHSRTSSSERFDIMLLIALMLQLTCWLAGVHAQKQEHPLWSLALVRRRSPAQSPHVGTGSSGSTGCSSQAPCMKSNNALIVILGTVTLDAVGIGLVMPVLPGLLRDIVHSDSIASHYGVLLALYALMQFLCAPVLGALSDRFGRRPVLLASLLGATIDYAIMATTPVLWIYPLVNSPSC

SEQ ID NO: 49566 - protein, 116 aa, Homo sapiens; identical to SEQ ID NO: 49532
  misc_feature (1)...(116): Xaa = X or * as defined in Table 2

SEQ ID NO: 49567 - protein, 863 aa, Homo sapiens
  DOMAIN (575)..(600): L-LACTATE DEHYDROGENASE SIGNATURE domain identified by eMATRIX, accession number PR00086B, p-value=2.385e-25, raw score of 13.67
  DOMAIN (525)..(863): lactate/malate dehydrogenase domain identified by PFam, accession name ldh, E-value=1.1e-135, PFam score of 464.1
  misc_feature (1)...(863): Xaa = X or * as defined in Table 2
MAMFMLLAAALLSTFLTNDVALYTVVPLTITLKRLCEIPYNRLIIFEGAGSQRWFATDANWQPAKYSYLGTFWSFVCRIYCPNGTAGWRNDADAPAPVLAMQYHTGVQTPEWKPRLVWSCLGLYIVFLTALEFKQELWGLVIVAAGFALLARRVVLSVDWTLLLVFMAMFIDVHLLTQLPALQGVLGNVISNVPSTILLLNYVPPSLLLVWAVNVGGFGFLTCRHARIAAPADLKDGLAVHEKRETRSLTEKTGKMLLPKLGVGSRECGGNVKEVGIRAIEEFGPYKINGDKEIMRRMDDLLQGFDAQHRMKLPAQPTSLATKSARRVRYPLFCPSIFNGFFEEFIFHRFLAEQALEFFNLLHGGSKFRGRNNLFSGGDSSRKNQRSTRTHCHHPSPKIYSASAKEPWVLATNLPVEIRTPKQLVNIYSKRMQIEETFRDLKSPAYGLGLRHSRTSSSERFDIMLLIALMLQLTCWLAGVHAQKQGWDKHFQANTVRNRNCKMATLKEKLIAPVAEEEATVPNNKITVVGVGQVGMACAISILGKSRAMEHTTAGAPYTPRQQTCQCNMMSLADELALVDVLEDKLKGEMMDLQHGSLFLQTPKIVADKDYSVTANSKIVVVTAGVRQQEGESRLNLVQRNVNVFKFIIPQIVKYSPDCIIIVVSNPRDILTYGTWKLSGLPKHRVIGSGCNLDSARFRYLMAEKLGIHPSSCHGWILGEHGDSSVAVWSGVNVAGVSLQELNPEMGTDNDSENWKEVHKMVVESAYEVIQAXKGYTHWAIGLSVAEILNESMLKNLSRIHPVSTMVKGMYGIENEVFLSLPCILNARGLTSVINPKVKDDEVAQLKKSADTLWDIQKDLKDL

SEQ ID NO: 49568 - protein, 113 aa, Homo sapiens
  misc_feature (1)...(113): Xaa = X or * as defined in Table 2
RWLATHYLTVKLSLLPNLAVTCQPKREQNITSNESTDCXVIVTSTKSDSLYTVGMLALSVRAIRCPCRLVDWADIPEQKQLMVLRASVALHGRSVTLYEKAFPAFRAMFKRSS

SEQ ID NO: 49569 - protein, 394 aa, Homo sapiens
  DOMAIN (192)..(211): L-LACTATE DEHYDROGENASE SIGNATURE domain identified by eMATRIX, accession number PR00086D, p-value=4.600e-24, raw score of 15.53
  DOMAIN (184)..(226): lactate/malate dehydrogenase domain identified by PFam, accession name ldh, E-value=0.00015, PFam score of 19.1
  misc_feature (1)...(394): Xaa = X or * as defined in Table 2
LCLLRHDCYRGLQSLLLILCKMATLKEKLIAPVAEDEATVPNNKITVVGVGQVGMACAISIPGKVSWPDELALVGCFWEDKLKGGNDGSFQHGELIFFQTPXNCGQDKGLFLXPANSXRFVSWXLAGSPVQPRRGRIRLQSWVPEKWLMVFQIPLFLKIVQVQSLICIIIGGFNPQLDILTYVTWETKVGLPKHRVIGSGCNLDSARFRYLMAEKTWHFIPSSCHGWNFGGNMGDSSVAVWNGVNVAGVSLQELNPENGNLTNDKLKIWKEGAXIWWLKSAYEVIKLKGYPQLGAIWIXVLAESYWNPMLKKSYPRIHPGCPTNGXRQGMYGHWRMESPSLEPSLCIPQCPRGLNPAVIQPRSLKDDEVASASRKSARIPLWDNPEWTLKRPLT

SEQ ID NO: 49570 - protein, 118 aa, Homo sapiens
  misc_feature (1)...(118): Xaa = X or * as defined in Table 2
HVEAAGSRXCAAPAGALLRFLGTPSFEDVSIPEKPKLRFIERAPLVPKVRREPKTLSDIRGPSTEATEFTEGNFAILALGGGYLHWGHFEMMRLTINRSMDPKNMFAIWRVPAPFQAH

SEQ ID NO: 49571 - protein, 261 aa, Homo sapiens
  DOMAIN (126)..(163): Ribosomal protein L16 proteins domain identified by eMATRIX, accession number BL00586B, p-value=3.215e-15, raw score of 17.00
  DOMAIN (137)..(200): Ribosomal protein L16 domain identified by PFam, accession name Ribosomal_L16, E-value=4.6e-09, PFam score of 34.9
MWRLLARASAPLLRGFVQEGHSCVWESAPRDPGWPFAEPEPLSPFSGIRIPHLKTPPAEENRSFEMYSFTLSWLSVLLLDVSIPEKPKLRFIERAPLVPKALGGGYLHWGHFEMMRLTINRSMDPKNMFAIWRVPAPFKPITRKSVGHRMGGGKGAIDHYVTPVKAGRLVVEMGGRCEFEEVQGFLDQVAHKLPFAAKAVSRGTLEKMRKDQEERERNNQNPWTFERIATANMLGIRKVLSPYDLTHKGKYWGKFYMPKRV

SEQ ID NO: 49572 - protein, 127 aa, Homo sapiens
  misc_feature (1)...(127): Xaa = X or * as defined in Table 2
LLAEWTMGHTPVGGFRGAISLDAAPXEQGTMLVSWLCDLFLVLRILVGKTVSSKNIFIERVNGDGKHENIPMSSPPRSWFPSEKRFTNRRKTSSHLQNLVLGAVSLRQHWRGGVPRNLTRAPAGAAH

SEQ ID NO: 49573 - protein, 19 aa, Homo sapiens
  misc_feature (1)...(19): Xaa = X or * as defined in Table 2
MWRLLARASAPLLRVPLSX

SEQ ID NO: 49574 - protein, 273 aa, Homo sapiens
  misc_feature (1)...(273): Xaa = X or * as defined in Table 2
CAAPCGCPCQIPGALLPASAGVKTLLPVPSFEDVSIPEKPKAXDLLERAPTCAQKXRREPXKFKVTIRGPSHXKPTEFYRKAIFAILGIGVVGYLHWGHFXKXWRLTIQPALWTPRTWFAIWRVPAPFKPITRKSVGASHGGEAKGAIXHYLTPVKAGRLVVEMGGRCEFARSAKVSLTQVALRSCPFASKRLXACGTPREGCEQDQEERERQQPRTPWTIXAEXPTAQHGWAYGKVPEPHMTLTPQGEILGARFYMPKTCVVSVGDILYIGY

SEQ ID NO: 49575 - protein, 173 aa, Homo sapiens
  DOMAIN (70)..(95): VACUOLAR ATP SYNTHASE 16 KD SUBUNIT SIGNATURE domain identified by eMATRIX, accession number PR00122B, p-value=7.868e- 23, raw score of 8.60
  DOMAIN (28)..(93): ATP synthase subunit C domain identified by PFam, accession name ATP-synt_C, E-value=1.7e-09, PFam score of 45.0
PPRAAELAPSPPADMFESKNGPEYASFFPVMGASAAMVFSALGPAYGTTKSGTGISAMSVIRPEQIMKSIIPVVMAGIIAISGLVVAVLIANSLECSVYADDLEMSFLFPRMFIYKDLACSCVSGTALVSQLFITLVRGSPCGFLLFRLPGWNRPPRRARGPARNCVPQSFWM

SEQ ID NO: 49576 - protein, 216 aa, Homo sapiens
  DOMAIN (74)..(99): VACUOLAR ATP SYNTHASE 16 KD SUBUNIT SIGNATURE domain identified by eMATRIX, accession number PR00122A, p-value=6.192e- 29, raw score of 11.44
  DOMAIN (59)..(128): ATP synthase subunit C domain identified by PFam, accession name ATP-synt_C, E-value=0.014, PFam score of 13.0
  misc_feature (1)...(216): Xaa = X or * as defined in Table 2
SAAADGPDRLRRRPPANLRARPVLAPASATASARRACSPPHPQTMSESKSCPEYASFFAVMGASAAMVFSALGAAYGTAKSGTGIAAMSVMRPEQIMKSIIPVVMAGIIAMLRPGWVAVLIANSLNDDISLYKSFLQLGAGLSVGLSGLAQPAFAIGFVGDAGVRGTAMHAADIFRGAXFLILIFAEVLRLYGLIVALILFHKVDLFRAHQPTEYL

SEQ ID NO: 49577 - protein, 42 aa, Homo sapiens
HCRQVCGYKLLYLGAGPIYPVRPSLVKKQTGLIFPPLTCNST

SEQ ID NO: 49578 - protein, 182 aa, Homo sapiens
  misc_feature (1)...(182): Xaa = X or * as defined in Table 2
NDRGKEGSLSTVPSIRNTDSGHLAPRRKPQLLKPSLNTSFPKARKIHKGEHEVASAGGNPPAPILPKVPPXFNIHRRGPPWPDHVRFGSLFNTLFLNWCCLGVSLAFRLLPXKSRDTGKMGLGDVEPGAQALCLPPPKCLNIWALILGILMTIGFILLLVFGSVDSLTILWFQIIQGKTGGY

SEQ ID NO: 49579 - protein, 85 aa, Homo sapiens
FSSQELASLFAPSMGLPGGGSPTTFLFRTMSESPHMFDSPPSPQDSLSDQEGYLSSSSSSHSGSDSPTSHKSRRLPIFSRLSISD

SEQ ID NO: 49580 - protein, 407 aa, Homo sapiens
  DOMAIN (235)..(246): Zinc finger C-x8-C-x5-C-x3-H type (and similar) domain identified by eMATRIX, accession number PF00642, p-value=3.700e-16, raw score of 11.59
  DOMAIN (183)..(252): Zinc finger C-x8-C-x5-C-x3-H type domain identified by PFam, accession name zf-CCCH, E-value=6.3e-25, PFam score of 92.5
  misc_feature (1)...(407): Xaa = X or * as defined in Table 2
MGRARKSGLGQRSRPTASRSEAAVQPGVRKARGAGNWRVGLQTGEAAPSPHRDLRDTPDPRPWLARTHRMTTTLVSATIFDLSEVLCKGNKMLNYSAPSAGGCLLDRKAVGTPAGGGFPRRHSVTLPSSKFHQNQLLSSLKGEPAPALSSRDSRFRDRSFSEGGERLLPTQKQPGGGQVNSSRYKTELCRPFEENGACKYGDKCQFAHGIHELRRLTLHTKDXTELCRTFHTIGFCPYGPRCHFIHNAEERRALAGARDLSADRPRLQHSFSFAGFPSAAATAAATGLLDSPTSITPPPILSADDLLGSPTLPDGTNNPFAFSSQELASLFAPSMGLPGGGSPTTFLFRPMSESPHMFDSPPSPQDSLSDQEGYLSSSSSSHSGSDSPTLDNSRRLPIFSRLSISDD

SEQ ID NO: 49581 - protein, 84 aa, Homo sapiens
  DOMAIN (60)..(84): Aconitase family (aconitate hydratase) domain identified by PFam, accession name aconitase, E-value=5.3e-07, PFam score of 25.1
VKASPAQSAFLALSLPRKKRGPKQRRPGEERRHLFLLFEDSIACSRGVCFHSSRLNRPLTLSEKIVYGHLDDPASQEIERGKSY

SEQ ID NO: 49582 - protein, 107 aa, Homo sapiens
  DOMAIN (10)..(24): ACONITASE FAMILY SIGNATURE domain identified by eMATRIX, accession number PR00415F, p-value=1.000e-14, raw score of 11.66
  DOMAIN (1)..(82): Aconitase family (aconitate hydratase) domain identified by PFam, accession name aconitase, E-value=1.3e-42, PFam score of 141.6
  misc_feature (1)...(107): Xaa = X or * as defined in Table 2
IVEYHGPGVDSISCTGMATICNMGAEIGATTSVFPYNHRMKKYLSKTGREDIANLADEFKDHLVPDPGCHYDQLIEINLSEMVXPDMLPAPRLAHGVTVVVVGGFLK

SEQ ID NO: 49583 - protein, 43 aa, Homo sapiens
  DOMAIN (3)..(29): Aconitase family (aconitate hydratase) domain identified by PFam, accession name aconitase, E-value=3.2e-07, PFam score of 25.9
LAHGLKCKSQFTITPGSEQIRATIERDGYVSAHIPLPISPTPC

SEQ ID NO: 49584 - protein, 93 aa, Homo sapiens
MHLVWGPEPVPVSPNFLPHTLASAKHQWVASVFFATANNHVPLSPRGLVWVSFTQASLALRQQARKGPSSPFTGSLRMPRRQVGEARQVGPDR

SEQ ID NO: 49585 - protein, 68 aa, Homo sapiens
FRMAPYSLLVTRLQVSELRDLWVHGGGVPPTVPAAVGEAGRGGPNLGPTSRVPVPVVGPAPVPASLVP

SEQ ID NO: 49586 - protein, 78 aa, Homo sapiens
  DOMAIN (61)..(75): ACONITASE FAMILY SIGNATURE domain identified by eMATRIX, accession number PR00415I, p-value=2.946e-13, raw score of 13.62
  DOMAIN (2)..(77): Aconitase family (aconitate hydratase) domain identified by PFam, accession name aconitase, E-value=4.6e-42, PFam score of 139.8
  misc_feature (1)...(78): Xaa = X or * as defined in Table 2
XLIGSCTNSSYEDMGRSAAVAKQALAHGLKCKSQFTITPGSEQIRATIERDGYAQILRDLGGIVLANACGPCIGQWDS

SEQ ID NO: 49587 - protein, 188 aa, Homo sapiens
  DOMAIN (123)..(138): ACONITASE FAMILY SIGNATURE domain identified by eMATRIX, accession number PR00415G, p-value=1.900e-13, raw score of 14.24
  DOMAIN (14)..(158): Aconitase family (aconitate hydratase) domain identified by PFam, accession name aconitase, E-value=8.5e-55, PFam score of 181.5
  misc_feature (1)...(188): Xaa = X or * as defined in Table 2
PWEXSPKGIGVSCGPLSGWSSPKDVILKVQGILRFKGGTVQIVESTGLGXTPFSCTGMRQFCNMGAEIGATTSVFPYNHRMKKYLSKTGREDIANLADEFKDHLVPDPGCHYDQLIEINLSELKPHINGPFTPDLAHPVAEVGKVAEKEGWPLDIRVDALACQSLAFGAAWVQCGCEEHGAWSQMAWA

SEQ ID NO: 49588 - protein, 814 aa, Homo sapiens
  DOMAIN (440)..(464): Aconitase family proteins domain identified by eMATRIX, accession number BL00450D, p-value=6.464e-17, raw score of 21.14
  DOMAIN (71)..(547): Aconitase family (aconitate hydratase) domain identified by PFam, accession name aconitase, E-value=1.7e-149, PFam score of 491.2
  misc_feature (1)...(814): Xaa = X or * as defined in Table 2
GQHCLLPWGVFPFLKKALGVRQXHVASVLCQRARVAMSHFEPNEYIHYDLLEKNINIVRKRLNRPLTLSEKIVYGHLDDPASQEIERGKSYLRLRPDRVAMQDATAQMAMLQFISSGLSKVAVPSTIHCDHLKEPQVGGEKDLRRAKDINQEVYNFLATAGAKYGVGFWKPGSGIIHQIILENYCVPWLSFXLGPDFHTPNGGGLGGICIGSCGWPNAWEWNGLGIPWELKCPQVIGVKLTGSLSGWSSPKDVILKVAGILTVKGGTGAIVEYHGPGVDSISCTGMATICNMGAEIGATTSVFPYNHRMKKYLSKTGREDIANLADEFKVHLVPDPGCHYEPTELKINLSELKPHIQWGPFTPDRGSPCWQEVGKVGREGKGWPLDIRGGSXLVACTNFKLWKIWGRSAAVAKQALAHGLKCKSQFTITPGFPRQIRATFERDGYAQILRDLGGIVLANACGPCIGQWDRKDIKMGEKNTIVTSYNRNFTGRNDPNPETHAFVTSPEIVTALAIAGTLKFNPETDXPDGARMGKKFQAWRFPDADXVFPKGEFXPRGRDTYQHPPKDSSGQHVGTXAPRSQRLQLLDPFDKWDGKDLEDLQILIKVKGKCTTDHISAAGPWLKFRGHLDNIPNNHLLIGAINIENGKANSVGNAVTQEFGPAPXQLARYYQETLASRLGWXIGRRETTGEGSSRGALQLWEPRHLGGRAIHHQESLPGIHETNLEGNRALLPFGPFAGPGXLPTKIHPVDKLTIQGPERTSPPGKAPXKCIIKHPNGDPRRTIPPXTTPFNEDARLKWFRAGSALQQKXRNLQQ

SEQ ID NO: 49589 - protein, 436 aa, Homo sapiens
  DOMAIN (115)..(127): Sushi domain proteins (SCR repeat proteins domain identified by eMATRIX, accession number PF00084B, p-value=3.700e-09, raw score of 9.45
MPMATVLLLAPVLFQCPGSCHCPPALGTAFAVDSGNDVTDIADDGCPKPPELHMAMWSTRFATSVRTLQTAHRRRWSIHLNDKKQWINKAVGDKLPDVKQRRLPEAPRDCTWLCGALVRYQCKNYYKLRTEGDSSQYPSEQIYCFHFADKETEAQTGVYTLNNEKQWINKLLEINFLNVKQGVKRTDVTLSHQGLAISVKLPHRHPADSSINFNRGGRSMIRRAAMAIWEHEHLLVKTFLLWTKHLLPKQTPGRKLGVLGALMGCSELKSFQELPISLPLVILERMYGVTWGCHFPPALGTTAFCTVLGNDVTDISDDRFPKPLRLQMAMWSTCFATSEELLQTAHRRRWSITLNDKKQWINKAVGDKFLNVKQKMQQERHCPYFNTLCGEKAALEIEKVVLHPNYHQGLAISVKLSSQAPADSSINFNRLALVGQ

SEQ ID NO: 49590 - protein, 458 aa, Homo sapiens
  DOMAIN (59)..(71): Sushi domain proteins (SCR repeat proteins domain identified by eMATRIX, accession number PF00084B, p-value=3.250e-09, raw score of 9.45
  DOMAIN (113)..(166): Sushi domain (SCR repeat) domain identified by PFam, accession name sushi, E-value=0.032, PFam score of 20.8
  misc_feature (1)...(458): Xaa = X or * as defined in Table 2
PRVRPRVRARPTKMSALGSLSLPSVLWGQLFAVDSGNDVTDIADDGCPKPPEIAHGYVEHSVRYQCKNYYKLRTEGDGVYTLNTIEKQWIKLRLFGDKLPXIVEADDGCPKPPEIAHGYVEHSVRYQCKNYYKLRTEGDGVYTLNNEKQWINKAVGDKLPECEAVCGKPKNPANPVQRDPGVGHLDCQRSFFPWARLKDGFPHHXSSTHQGPRWIQLNQWLAXPRLKNLLSLNHSENCQQRKDICPYFXHFMWGKKQLVGDXGRLFLQPXLTPRVDIGLIKLQTEGCSCXLRRVMPICLPSKGLWQKXGRVGLCFLAGGRNAQFXNLLTHLKVCPCCPVAXPKTQCHKAIYERPSNKSPRKRKNTRKKPLXGVQAPILKXNTPFLCLAMSXRYPKERHPAYGQNAGASALCPFHRPLEEDTPGMPTGILSFDKSCAVAEYGVYVKVTSIQDWVQKTIA

SEQ ID NO: 49591 - protein, 200 aa, Homo sapiens
  misc_feature (1)...(200): Xaa = X or * as defined in Table 2
GVRGFWAGTMASRAGPRAAGTDGSDFQHRERVAMHYQMSVTLKYEIKKLIYVHLVIWAAAWLLRXAVGHPEALVDMIRWPCPIQWEYPVFCXAFLPSLLGPSFPFPRNNIRLTWVLYHESSMGIFFSIGSIHFIGQHGDVPWLHSSFYRHGKAYRFLFGFSAVSIMYLVLVLAVQVHAWSLYYSKKLLDSWVHQHTGEEA

SEQ ID NO: 49592 - protein, 200 aa, Homo sapiens; identical to SEQ ID NO: 49591
  misc_feature (1)...(200): Xaa = X or * as defined in Table 2

SEQ ID NO: 49593 - protein, 396 aa, Homo sapiens
  DOMAIN (218)..(256): Short-chain dehydrogenases/reductases family proteins domain identified by eMATRIX, accession number BL00061B, p-value=8.364e- 17, raw score of 25.79
  DOMAIN (90)..(278): short chain dehydrogenase domain identified by PFam, accession name adh_short, E-value=3.4e-40, PFam score of 147.0
  misc_feature (1)...(396): Xaa = X or * as defined in Table 2
RCSKSLRMSTFFSDTAWICLAVPTVLCRTVFCTYKKSSGQLWSWMVCLAGLCAVCLLILSPFWGLILFSESCFLMHTYLSGQELLPVDQKAVLPTGGDCGLDHALSKYLDELGFTVFAGVLNENGPGAEELRRTCSPRLSVLQMDITKPVQIKDAYSKVAAMLHDRGLWAAINNAGVLGFPTDGELLLMTDYQRCMVVNFFGTVEVTKTFLPLLRXSKGRLVNVTSMGGGAPMERLASYGSSKAAVTMFSSVMRLELSKWGIKVASIQPGEGFLTNIAGTSDKWEKLEKDILGPPPPLRVQEDYGQDYILAQRNFLLLINSLASKDFSPVLRDIQQAILAKSPFAYYTPGKGAYLWICLAHYLPIGIYDYFAKRHFGQDKPMPRALRMPNYKKKAT

SEQ ID NO: 49594 - protein, 287 aa, Homo sapiens
MGLISDYPENEYRGRREDGLQLYSVSKRKKNLKDIREELTGETEENVGLCGIRPRKEFQEKGIRTISESAEPSSCREKFIISGSLSIAAGIRTTKGLVVQILTALMSLSMGITMMCMASNTYGSNPISVYIGYTIWGSVMCPENSHHQYSRAHAQARPPKLPGICHGVMGHELHTVSLLEKALPFCYIDCLFLVGSDEGTAQQGLDTLLIHMQQPSWAINTDKIKRPNNIQMKLIKLLGIIQKAEKPLIAKMIVKILNFSVPPHQKPQKKPQQLVDLFGYWYHSYNT

SEQ ID NO: 49595 - protein, 227 aa, Homo sapiens
  misc_feature (1)...(227): Xaa = X or * as defined in Table 2
DVHQLGNMAVIHSHLWEGLQEKFLKGEPKVLGVVQILTALMSLSMGITMMCMASNTYGKXPLFPCISGYTIWGSVMFIISGSLSIAAGIXNTKGLVRGSLGMNITSSVLAASGILINTFSLAFYYSITPYCNYYGQPPNXLSMGTMSHLKGVWMGMVLLLSVLEFCIAVSLSAFGMXSALLVPPGGGCVNSAITFFTWAETASSTTLNEGLRGTQRFNRQMLPEIYA

SEQ ID NO: 49596 - protein, 333 aa, Homo sapiens
  DOMAIN (270)..(283): LUTEOVIRUS ORF6 PROTEIN SIGNATURE domain identified by eMATRIX, accession number PR00910A, p-value=6.889e-10, raw score of 2.51
  misc_feature (1)...(333): Xaa = X or * as defined in Table 2
RNLRLPSSALAGVAPSHREPRVRTISQTDRRKDAPDPARRDRVELAPAYTSPPRCSANVGTSTRRLRALCPARVRAPLRLPPPASSPLGSEEQRRKVPAAARMRPRAGAGRSTLPWLPATWPGLPSLPLYLXICGGNNSYXRXRKGEQFEXRNSSXDYRYLPSSPASPNVRERQPNENGPDDKEKDRPERPSPLDTSPLLDPPAVSDIAGKMSDEFSLADALPEHSPAKTSASYPDHMVLPTDPAAAGPLGPWGSMSSGPWVPGMGGQYPTPNMPYPSPGPYPVPPPPQASGAAPPVPWGTVPLGAWGPPAPYPAPTGSYPTPGLYPTPSNPF

SEQ ID NO: 49597 - protein, 265 aa, Homo sapiens
  DOMAIN (116)..(152): Synapsins proteins domain identified by eMATRIX, accession number BL00415Q, p-value=1.189e-10, raw score of 2.23
  misc_feature (1)...(265): Xaa = X or * as defined in Table 2
SDPSPLLDPTAVSDIAGKMSDEFSLADALPEHSPAKTSAVSNTKPGQPPQGWPGSNPWNNPSAPSSVPSGLPPSATPSTVPFGPAPTGMYPSVPPTGPPPGPPAPFPPSGPSCPPPGGPYPAPTVPGPGPTGPYPTPNMPFPELPRPYGAPTDPAAAGPLGPWGSMSSGPWAPGMGGQYPTPNMPYPSPGPYPAPPPPQAPGASTILFHGAPFPPGAWGPPAPYPAPTGSYPTPGTLSXFPPGAWGPPAPYPAPTGSYPTPGTLS

SEQ ID NO: 49598 - protein, 42 aa, Homo sapiens; identical to SEQ ID NO: 33114
  misc_feature (1)...(42): Xaa = X or * as defined in Table 2

SEQ ID NO: 49599 - protein, 82 aa, Homo sapiens
  misc_feature (1)...(82): Xaa = X or * as defined in Table 2
RHKGSPSPHQTQEPSWLHPVDPALGPQVELPASLVLCARTPQPLGGRXDWVPGTPAGPQESRAAPVPASAPPSTPRGRGGRI

SEQ ID NO: 49600 - protein, 167 aa, Homo sapiens
  misc_feature (1)...(167): Xaa = X or * as defined in Table 2
WAPVRPEPPRRAPPPAPQRPVPSTTQGLRSAGAPAPGLAGSYPCSPGYVNAPIDSLYLATFMGIRVKRPPNRPLCEQXSFYHLGAGEXPGKSRVPIPQFQSPGDPTVRVVPRRXSVPPTSCATPRSWCCSDTPGHPLGSPEQLPQPGPAAELPGGVVPRSTPPCPAL

SEQ ID NO: 49601 - protein, 111 aa, Homo sapiens
VKLQTFLVNVTALKVAHLELFIPPGGFVVLLASGVKLQTFVVSVTAHKGSVEPKSEQQQDLLQRAKEQNSHSVEGDPNRLPVLARHKDSPSPHQTQEPSWLHPVDPAQGPQ

SEQ ID NO: 49602 - protein, 148 aa, Homo sapiens
  DOMAIN (58)..(73): WILM'S TUMOUR PROTEIN SIGNATURE domain identified by eMATRIX, accession number PR00049D, p-value=6.339e-09, raw score of 0.00
  misc_feature (1)...(148): Xaa = X or * as defined in Table 2
CACTPQPLGGRWDWAPWSRGRRSSGRLRLHRNPRRRGKAQAWRAAVPRPAPREGSXGPGRPAAPSAGPPSPRPPGTPAGPQAPRAAPVPAPRLPPHLPASXGSGLRPSPAQKGAPTVQPVGXRAPQVPPKWEPRQRRRRERARAVRTA

SEQ ID NO: 49603 - protein, 208 aa, Homo sapiens
  DOMAIN (147)..(180): PROLINE-RICH PROTEIN 3 domain identified by eMATRIX, accession number DM00215, p-value=2.068e-09, raw score of 19.43
  misc_feature (1)...(208): Xaa = X or * as defined in Table 2
QHAGSPQSPRLLSAPPLPGLPLWWHLRSPSAPPLHCGSPFLGWPRLEPTPSACREVWRERHKWEPGPACGACGPAGVPGGRGPWWAPHSEHPASPAGPGPMGNLAPGPVAAEGVLSPPAVPAHRRCARFLAGPXLPFPRGRAWDLQPAMPEPPTPPWAPVPAEPPXRAPPPAPQRPVPSPPKGAQDWQAAPPAAPVRDPLGEASWAPE

SEQ ID NO: 49604 - protein, 272 aa, Homo sapiens
  DOMAIN (206)..(221): WILM'S TUMOUR PROTEIN SIGNATURE domain identified by eMATRIX, accession number PR00049D, p-value=3.288e-09, raw score of 0.00
  misc_feature (1)...(272): Xaa = X or * as defined in Table 2
MWESLTLSRDFLNGFDQNADSGIDNKVQVEVASDEDEELVGNWNKERENPFSGEKLKPAAEICISYKEPNANHQDNGENVARACQRPLQHPLPSQAQRPRRKQRFPGPGSGPTWDLVPCIPGAPRLDXKGPRKPKSWYSEGQRYESPSFGIPLGSDLFPTNALLLKPYKLPPSRPRDYCGRAAFPRGRVRDLQPAMPEPPTPPWAPVRPEPPRXAPPPAPPAPSPIDHPRAEECEHTAQDWQAAPPAAPVRDPLGEASWAPESGGDVESLYV

SEQ ID NO: 49605 - protein, 221 aa, Homo sapiens
MNEGSGISLSGCDLGTALQLLSQAIVECLKLFQMLNRSTILGSGGQQPSSHSSTKLRPDSGAQLASPSGSCTGAAGGAACQSRTVCSHSSALGWSMGLGAVEQGVVLVGEAQAAQEPMEGVGGSGMAGCRSRALPHGKAAKARRAIEHSTGGLALLGDPVHSPQPLARVLSPSLPRASRAGWLLRVRAHQAHTHPELQLAHKRRTQPRFPLAPLPPHLPAS

SEQ ID NO: 49606 - protein, 309 aa, Homo sapiens; identical to SEQ ID NO: 33125

SEQ ID NO: 49607 - protein, 91 aa, Homo sapiens; identical to SEQ ID NO: 38932

SEQ ID NO: 49608 - protein, 373 aa, Homo sapiens
MLAVLRALACSRHLTCLGSHFGGIEEPFSPPTALWEPLAGLAKAGAHSLSLQGGVEGEARAGTGAACHACRPAGVPGGRGLGRPRTWSSQPALLAPGNGGLSSQASGCGGCTESPSSASPPALFSIFRQALAAFPRGRAQDLQPAMSEPPTHSMDSRAARASPTSTTPYSTAPSPIDHPRAEECKRTTRDWQAAPPAALVRDPLDAPKIGCEPGSSSLIISGHQGARQKRASVGPDSKKPASHSNHISKIQVNLFTTPLPKHSCFLNCPRTPFLSSHRQTFASATPLPCPHKPSRPHIHRRALALQRPLSMSGRPAKLECIRKAALLSGASVHAQGVFWYMADYTEWRYKQTAADSCGRGQISADSECSHPFK

SEQ ID NO: 49609 - protein, 655 aa, Homo sapiens
  DOMAIN (134)..(167): PROLINE-RICH PROTEIN 3 domain identified by eMATRIX, accession number DM00215, p-value=2.678e-09, raw score of 19.43
  misc_feature (1)...(655): Xaa = X or * as defined in Table 2
KGLRLKLCSFVQLRFSIRNFRLGILTYWKKEFEIVGWPRLEPTPLACREVWRERREREPGLRAALAGQLEFRVGVGLAGPSLGAAGQPCWPRVIRDLAPGPVAAEGVLGPPAVPAHRRCAGFLTEPXLPSRGAGLGTCSPPCLSLPPTPWAPVRPKPPQRAPPPAPPAPSPIDHPRAEECERRAHDWQTAPPAALVPDPLGEASWAPESGISDEYITPMFSFYKSIGELKMTQEEYALLTAIVILSPAWATERHPVFKKRERKKPSNCLEGVIKAAAELAVGLPWNLGKFHTGDGTSAGLQGIAPNSVGPGQPAPEWMWGWERLLTDQDKTQGSAFSCTATFQDAQKQLLQARFIHLSGLWEQQDGLWLSNWLSLKGQIGGPALTEPLRLSVNRGTWPPKLRDARRRSAGRADRRAPTGRVLPGSPGAGPQTTPPPYDWSLRNRRRPAATDPEAQAAAAAAAVGQGRVGPAQIEPSCRPAGRSDPPAPGPEAEVCWVSRLREPVRSAFAWLRQSRALIGSWGRQGDVAPAFTCPPNAERGATGVRGGWGCWCGRAQLGRRDPAATRPALNPERYQSPKSMQGLERPHVRNWGIELETLRDAFRPQPSVWRTARGEAGKRKGRLVECLGSQRKVLEGVLLYAVTRGSFPNLFTPRD

SEQ ID NO: 49610 - protein, 138 aa, Homo sapiens
  misc_feature (1)...(138): Xaa = X or * as defined in Table 2
MCIEKSKGFYKKATRTTDFIEMQSCVRNWWVLGLTDFKNEAVDPRDSGAQLASPSGSCTGAAGGAACQSCAGRSHSSALAWSMGLGAVEQGVVLVGEAQAAQEPMDWVGGSGMAGCRSRALPRGKAAKAQREIERSAX

SEQ ID NO: 49611 - protein, 167 aa, Homo sapiens
FQTQEPSWLHLVDPTPGLQVELPASPVPCAHIPQPLGGRWDWVPWSRGWCSSGRLGPHRSPWSGWEAQAWQAAGPEPCPMGRQVRPGEKSSAVPVGQPGSGHSVHPPQPLARVLSPPLPGASRAGRLLRVWGPPSPRPPGTPAGPQARHTAPVPARASPSTPPCKLR

SEQ ID NO: 49612 - protein, 183 aa, Homo sapiens
  DOMAIN (30)..(42): MOLLUSCAN RHODOPSIN C-TERMINAL TAIL SIGNATURE domain identified by eMATRIX, accession number PR00239E, p-value=8.699e- 10, raw score of 1.58
LPSRGAGLGTCSPPCLSLPPTPWAPVRPEPPQGAPPPAPPAPSPIDHPRAEECERTARDWQAAPPAALVRDPLGEASWAPESGGEPTPSGPGVAGSGSTHTHALTHACTHAHTRAEPLRLPPPPRPLPPPLSPPPPAPLLPSKPFSLSTDRISSKSRQQKVPFGPRDPEPRGVRAGSWNRTTH

SEQ ID NO: 49613 - protein, 183 aa, Homo sapiens
MRPHSSALGWSMGLGAVEQGAALIGEARDAQEPMEGVGGSGMAGCRSRALPRGKAAKARREMERSASGPALLGDPVHPPQPLARCSGGLKGSSSVTKVGAQAEEVPRASEGCEDCQHAVTSPNHLDSVIWFGCVPTEISSSVVAPIIPTCHGKELVGVGGAAQAMHAQAHRTAQAMRAEQMNT

SEQ ID NO: 49614 - protein, 171 aa, Homo sapiens
  misc_feature (1)...(171): Xaa = X or * as defined in Table 2
AHFPRAGTGAACSACWPAGVPGGRGLGGPRTRSSRPCWPRAKGDLAPGPAAAEGVLGPAAVPAHRRCARFLAGPXLPYHGAGLGTCSPPCLSLPPTPSGSCAPEPPRRAPPPAPRHPVPSTTQGPPWETCLLSIYGNAMNDERAWSLEGFWVLKPSDSWMTSLSERTISFF

SEQ ID NO: 49615 - protein, 174 aa, Homo sapiens
  DOMAIN (104)..(139): Prion protein domain identified by eMATRIX, accession number BL00291A, p-value=8.655e-09, raw score of 4.49
  misc_feature (1)...(174): Xaa = X or * as defined in Table 2
WIPHWGCRWSCLPVLRRALAFLSPWVVDGTGRRGVGSGAGRGGSGRTGAHGVGGRLRHGGLQVPSPAPREGSXGPARNRAQPGGPALLGDSVHPPQPLAQVLSPPFPGPAGLAGCSECRGPPSPRPPGTPAGPQAPHAAPVPARASPSTPPLVHLTNDVLRVKVKWAFFFTLHK

SEQ ID NO: 49616 - protein, 350 aa, Homo sapiens
  DOMAIN (302)..(335): PROLINE-RICH PROTEIN 3 domain identified by eMATRIX, accession number DM00215, p-value=2.125e-10, raw score of 19.43
  misc_feature (1)...(350): Xaa = X or * as defined in Table 2
MGLAERCPLNHLTLTVSSVKCSFLLAHILSVAGACYGVLRGAPHTFPGITCPGCSQENNPIKKWAEDLNRHLIQEDTQMANKHLKDAPHRYIIRELQVKPTMRYCHAPTGVAHIQSTNTPNAGEDVEHQELTFIADGSPVTTRGHMDLVQTSLSRTLGVRSTGSWSACAEFSHGYCLAKRLLQLLKHGNGNSNSGGNAECITRHCQKPLTGILSFILALNKVKNTRPFDRCHSEGSEKEPSFCVTCPRRPEVNQPSPYMPQPGKSSTHLSVVQLRALEVGEPQAFPPVEPEGPAGLRHPLWLXVXGQGSGPSSPPCLSLPPTPWAPVWPEPPRRAPPPAPQRPVPRPPKG

SEQ ID NO: 49617 - protein, 227 aa, Homo sapiens
  misc_feature (1)...(227): Xaa = X or * as defined in Table 2
KWCSKRTAFSFSLQGGVEGEARAGTRAACGACGPAGVAGRRGLGGPPHSGQPASPAGPGPVRDLAPGPVAAEGVLGPPAVPAPPALCSISPPGCSCLPAGPRLRTCSPPCLSLPPPPWAPVRPKPPRXATPPAPRRPVPSTNPRAEECGRTARDWQAAPPAAPVRDPLGEASWAPESGGDVENLYVQLRDCKYTNQHPVSSSGFVNAPISTLYLVNLVGTWRIFMSS

SEQ ID NO: 49618 - protein, 259 aa, Homo sapiens
MPEPPTHSMGSCAARASPTSTTPCSTAPSPIDHPRAEECERTAQDWQAAPPAALVRDPLGVKLQTFMVSVTALKAARLELFVPPGGLVVLLASGVKLQTFEVSVTAHKSSVDPKNIKVLHVPTRLRSPAGFTQWILHWGLQVELPASPGAVRLHSSALGWSMGLGAVEQGAVLIGEARAAQEPTEWVGGSGMAGCRSRALPRGKAAKARREIEHSAAFNPYKQLRKSYVYKQLPVPIPLLRATPLLRHHRPYGNTEVLC

SEQ ID NO: 49619 - protein, 98 aa, Homo sapiens
  DOMAIN (27)..(53): DEAD-box subfamily ATP-dependent helicases proteins domain identified by eMATRIX, accession number BL00039B, p-value=8.800e- 20, raw score of 19.19
  DOMAIN (3)..(52): DEAD/DEAH box helicase domain identified by PFam, accession name DEAD, E-value=3.2e-15, PFam score of 51.0
FICLGYDVIAQAQSGTGKTATFAISILQQIELDLKATQALVLAPTRELAQQVRVASIPSFRADLGMMSIIQGPEKSSLITTLGGRHGCPNTLETCWVN

SEQ ID NO: 49620 - protein, 424 aa, Homo sapiens
  DOMAIN (58)..(97): DEAD-box subfamily ATP-dependent helicases proteins domain identified by eMATRIX, accession number BL00039A, p-value=4.522e- 28, raw score of 18.44
  DOMAIN (55)..(268): DEAD/DEAH box helicase domain identified by PFam, accession name DEAD, E-value=4.3e-15, PFam score of 50.6
  misc_feature (1)...(424): Xaa = X or * as defined in Table 2
SRVEPRVRSASQDSRSRDNGPDGMEPEGVIESNWNEIADSFDDMNLSESLLRGIYAYGFEKPSAIQQRAILPCIKGYDVIAQPQSGTGKTATFAISILQQIELDLKATQGLGSXAPTRENLAQQIQKVVMALGDYMGASCHACIRGAPTCVAEVQKLQMEAPHIIVGYPLGRVFDMLYRRYLSPKYIKMFVLDEADEMLSRGFKGQIYGHIQKAQAAPPRVVLLSATMPFDVLEVTKKFMRGPHIRILVRKEELTLEGIRQFYINVEREEWRLDTLCDLYETPDPSPQASHLPSTTRRKVDWPHPRRMHALRFPWESAQHEDMAQKERRDVIMKEFRLASSRVLITTDLLARGIDVQQVSLSHQLNYSFPTTRENYIHRIGRGGRFGRKGVPINMLTEEKTKRNLEDIETFYNTSIEEMPLNVA

SEQ ID NO: 49621 - protein, 122 aa, Homo sapiens
  misc_feature (1)...(122): Xaa = X or * as defined in Table 2
NCGIVISKHLVFTLAXMMCHFLASLQRKGILKRSASVXAHSHDPSFHMKIYNAGWGHRTXHPAGGFAGPPPWGSVWGLAARTRENAPRPALPLPRPAPSGLAHGADGDSNTEKIQSRDNRKG

SEQ ID NO: 49622 - protein, 238 aa, Homo sapiens
  DOMAIN (48)..(92): Adenylate kinase proteins domain identified by eMATRIX, accession number BL00113B, p-value=5.667e-32, raw score of 20.49
  DOMAIN (26)..(215): Adenylate kinase domain identified by PFam, accession name adenylatekinase, E-value=4.2e-116, PFam score of 399.1
ETSADMAPSVPAAEPEYPKGIRAVLLGPPGAGKGTQAPRLAENFCVCHLATGDMLRAMVASGSELGKKLKATMDAGKLVSDEMVVELIEKNLETPLCKNGFLLDGFPRTVRHAEMLDDLMEKRKEKLDSVDLNFSIPDSLLIRRITGRLIHPKSGRSYHEEFNPPKEPMKDDITGEPLIRRSDDNEKALKIRLQAYHTQTTPLIEYYRKRGIHSAIDASQTPDVVFASILAAFSKATS

SEQ ID NO: 49623 - protein, 319 aa, Homo sapiens
  DOMAIN (265)..(280): ADENYLATE KINASE SIGNATURE domain identified by eMATRIX, accession number PR00094E, p-value=4.522e-14, raw score of 11.25
  DOMAIN (40)..(293): Adenylate kinase domain identified by PFam, accession name adenylatekinase, E-value=4.2e-09, PFam score of 36.5
  misc_feature (1)...(319): Xaa = X or * as defined in Table 2
VASGTRTELQDRRFRDTSGDMFPSVPPXEPEYTKGIRTVLLWPPGAGKGTQSGETEVXMACSLGYIASNLQSLHLNDSKAPALSAAIYCPRHPNWAENFCVCHLATGDMWRAMVASGSSELGKKLEGNLWDGWGNWVEXWKWVSWSSFGEGILENPLVAKNGFLLDGFPSGPVKARQKSPMDLMGEGGKEKLDFCXFEFSIPDSLLIRRNHKEGLIPPPKKWAGSYPRREFQPLPKEPPXKMNITGGNPLIRRSRXXMKRPLKIRPASPTHTQTTPLIEYYRKRGIHSTIDASQTPDVVFASILAAFSKATCKDLVMFI

SEQ ID NO: 49624 - protein, 120 aa, Homo sapiens
  misc_feature (1)...(120): Xaa = X or * as defined in Table 2
SGRKRRGCGGQSVKQAPALTPGPPAPVFPIPEAPAACAPHHPGQGNRRKCNFPPVCPTPKTASSCPEPLPPPPSLQRXPCPCHPWHHLEFSFLDEVTFSFNKTFPKRLVSSKMLPLKVGH

SEQ ID NO: 49625 - protein, 291 aa, Homo sapiens
MKENISSKGDEGEKKSTFMDLAKEDIKDNDRTLQQQPEMKKDCSLPLTVLTCAKACPHMATCGNVLFEGRTVQLGKLCCTGVETEDDEDTESNSSVEQASVEVPDGPTLHDPDLYIEIVKNTKSVPEYSEVAYPDYFGHIPPPFKEPILERPYGVQRSYNGLNPGRRGCAFCMSSCSFVVEKSKESTARVVVWREIGVQRSYTMESTLCGCDQGKYKECLAVRTLDPLVNTTSRKRRKRCPKNRRPIPTSKKTNKRQRTRMNVKEQGAKTYSRQQKNRITESRKRHADTEK

SEQ ID NO: 49626 - protein, 108 aa, Homo sapiens
  misc_feature (1)...(108): Xaa = X or * as defined in Table 2
MEKDDPPQLVTPTSVKAIILRIEAAQLTRAQEDISTQLSDILDNVNCVINRFQEELGYDLKENAKSQQRDPKGKKRFILLEKIASFSKDAMMKEKHLYDILRWLGDWX

SEQ ID NO: 49627 - protein, 729 aa, Homo sapiens
EELGYDLKENAKSQQRDPKGKKRFILLEKIASFSKDAMMKEKHLYDILRWLGDWGDTLTYEIGHRKSEEEAAALDEWIEVTEKVLPLSLIATKRGIESLTALCSTLIEGQKKRSQVSKRTFWQGWQGRSPQTSPSHPQPLSPEQMLQDQHTMNTKASEVTSMLQELLDSTMFSKGEVRAIRYMATVVENLNKALILQHKENRSLETKYRHLQMQATKELSSQRLHFQQFMEVLESRRDALLKQVEILGGRYHDLLLMKQALEFQLKKAQNATGQAEDLAEVSVDSPGPSERETLPRKETVMEESQQEPMKEEQLFSPLPPSPMAMIRDSGAIAAGHQPLSTMTVRSRVADVFGSKDTESLEPVLLPLVDRRFPKKWERPVAESLGHKDKDQEDYFQKGGLQIKFHCSKQLSLESSRQVTSESQEEPWEEEFGREMRRQLWLEEEEMWQQRQKKWALLEQEHQEKLRQWNLEDLAREQQRRWVQLEKEQESPRREPEQLGEDVERRIFTPTSRWRDLEKAELSLVPAPSRTQSAHQSRRPHLPMSPSTQQPALGKQRPMSSVEFTYRPRTRRVPTKPKKSASFPVTGTSIRRLTWPSLQISPANIKKKVYHMDMEAQRKNLQLLSEESELRLPHYLRSKALELTTTTMELGALRLQYLCHKYIFYRRLQSLRQEAINHVQIMKETEASYKAQNLYIFLENIDRLQSLRLQAWTDKQKGLEEKHRECLSSM

SEQ ID NO: 49628 - protein, 116 aa, Homo sapiens
CEARGGSGHGGRAERAGVCGGPAELLPKGSKEEQRDYVFYLAVGNYRLKEYEKALKYVRGLLQTEPQNNQAKELERLIDKAMKKDGLVGMAIVGGMALGVAGLAGLIGLAVSKSKS

SEQ ID NO: 49629 - protein, 162 aa, Homo sapiens
GSVSKSTQFEYAWCLVRSKYNDDIRKGIVLLEELLPKGSKEEQRDYVFYLAVGNYRLKEYEKALKYVRGLLQTEPQNNQSKELERLIDKAIRKDGLVGMAIVGGMALGVAGLAGLIGLAVSKSKSSLSFPCSPPAPRLYPLWPSANFCSPEIRPSAPSCALG

SEQ ID NO: 49630 - protein, 168 aa, Homo sapiens
  misc_feature (1)...(168): Xaa = X or * as defined in Table 2
GSRGQWPSEAVLNELVSVEDLLKFEKKFQSEKAAGSVSKSTQFEYAWCLVRSKYNDDIRKGIVLLEELLPKGSKEEQRGFTSFYLARGGGTTRLQGITEKALKLRSAGLLAAQEPQEQPRPKETGNGLIDKALXKKDGLRGAWPIVGGMALGVLAGTCRSSSDFAVFQ

SEQ ID NO: 49631 - protein, 437 aa, Homo sapiens
  DOMAIN (35)..(95): Laminin G domain identified by PFam, accession name laminin_G, E-value=8.6e-05, PFam score of 21.1
  misc_feature (1)...(437): Xaa = X or * as defined in Table 2
MACHLQAGSPGNLVVYFQSKPEGLRTREPMMSVPVQVKGPSTRKLMMSEDPLTLGNWHELRVSRTAKNGILQVDKQKIVEGMAELQQVVGKNMDSGVGPVVHGGGLTRTGYLLNPESLQQKAFERRQIQGCDEKLACVGKQTLGTWPLSESPSLTRLYCRRQLTQGSLRMSLNNAGVPGQTAPDQRSGEGVAAPAGPGEEVGREEGEGAAAGKRQCPCQQGSLCVDTSRPRLPKSQAQIPSSSRSSPSSSEQQRGQLPSVREHVEGGQGEERAPHCDGGGRVLLASGLAWLGTENIMDLASSPKDDWGVAVPSRGCERPSTFTLVLVPSPIVRRRACSGQPISPGGGQETHGADTSHLTNPXICLLSKAFCCRDSGLSKXPVLVRPPPCPQALPQSPCSYLLLAVALPFPPLSSAYPPVRFHSLLCEIHEARASCPG

SEQ ID NO: 49632 - protein, 142 aa, Homo sapiens
  DOMAIN (12)..(27): WILM'S TUMOUR PROTEIN SIGNATURE domain identified by eMATRIX, accession number PR00049D, p-value=9.336e-13, raw score of 0.00
  misc_feature (1)...(142): Xaa = X or * as defined in Table 2
WVSSFSSSSFSSFPPPPPPPPPPPPPPSFLPPPPPPPPPIXDRARRCQQTSIPLNKLNINKLLLLLLSPRPDDREKFTPQPQSARQREPIKGTASRRGEGPICPTLSLYFLHVFLCFSCLSSQIHIYILRLSTVLVLIKNSQ

SEQ ID NO: 49633 - protein, 292 aa, Homo sapiens
  DOMAIN (247)..(268): RIBOSOMAL PROTEIN L7A FAMILY SIGNATURE domain identified by eMATRIX, accession number PR00882G, p-value=4.462e-18, raw score of 10.27
  misc_feature (1)...(292): Xaa = X or * as defined in Table 2
FPFSLLPPPKMPKGKKAKGKKVAPAPAFVRKQDAQEXWLNPLFKKRPXDFRIGQDIQPQKRPPPLLXKWPRYIRLQRQRAILYKRLKVPSAITPVSPRALDPANQLLSLLKLAHKYRPRDKAQRSKQRLLARAEKKAAGKGDRPNQRDPPVLRARSXHPSPTLVEEQEKLSWVVIAHDVDSIELGLSFLAALCRKNGGSPYCIIKGKGQDLGRLVHRKDLAPLVAFTQVNSEDKRRFWLKLVGSYQGPNYNDRYRYDEIRRHWGGNVLGPKSVARIAKLEKAKAKELATKLG

SEQ ID NO: 49634 - protein, 162 aa, Homo sapiens
  misc_feature (1)...(162): Xaa = X or * as defined in Table 2
AKEALDWEEGHQXDQRLXSRNSQLGICGGLRGFRGDRAASVFSRXAEKESVRQLXARVPGALGVAARANKHQRRWREGDSTQTATNTVDRRATRGRPMEWRATRVADEEDGDRRRGDNRPQARTFRPRTSVRRAAGTNNSEGRRPTNAGTNGGRGVDIYTVN

SEQ ID NO: 49635 - protein, 497 aa, Homo sapiens
  misc_feature (1)...(497): Xaa = X or * as defined in Table 2
MRRSTPGVLPAAVGGARVRRAVGLSGTGAEAGRAGAMVEKEEAGGGISEEEAAQYDRQIRLWGLEAQKRCHRMKEALSTAPFTDKETHPKVSLAQVTRSSASVMVYGAFEVIGQRQSSAAKPRRSQSESLGPEFQGLWEWLPASQHIMRSLKKQDGMGQGYRVSLEWEVGQLIFLEEKVTPEDPGAQFLIRTGSVGRNRAEASLERAQNFNPMVDMLKVDTEDIEKKPESFFTQFDAVCLTCCSRDVIVKIDQICHKNSIKFFTGDVFGYHGYTFANLGEHEFVEEKTKVAKVSQGVEDGPDTKRAKLDSSETTMVKNKVFFCPVKEALDGWILDACDEMQMAALKRTTSDYILLQVLLKFRVTDKGRDPSSDTYEEDSELLLQIGNDVLDSLGISPDLLPEDFVRYCFSEMAPVCAVVGGILAQEIVKALSSAGTLPPTTNFFFFRWAXKGEWGLWECLGPQVNSGFGQPQRCQLQHAHLYSLFPFFMKASPGKEN

SEQ ID NO: 49636 - protein, 136 aa, Homo sapiens
  misc_feature (1)...(136): Xaa = X or * as defined in Table 2
PGTSQGVFSPHRLGGAVRSPCPPPQDSRQASAGGAESQLKQRGFPGEXGCRSPVSCAWPQNRMGXGPQHREAGAWSGEXKTPIWLKQERCNRPGLLVTAELAAPAPRPDGMAPGCGGIRCTPGRPRRLLHSGPPSP

SEQ ID NO: 49637 - protein, 47 aa, Homo sapiens
LWGDTKELQSPHSANPGSAGGQSQVSGEPALAGSGELPSPGEKGSIR

SEQ ID NO: 49638 - protein, 275 aa, Homo sapiens
  misc_feature (1)...(275): Xaa = X or * as defined in Table 2
LATQPEGAGRVPSIHPQGGPEAALQDLRTLMGSSRLHSGKESIGHNSSAGSSSQGPHHPRRKTAILEKGGKQPHRMLPFSPGLGSSPEPANAGSPDTWLCPPAAARVLXNPVKPRKGRSEPRSGWASQLPGGDSRLPLRPGTSQGVFSPAPAGXAGKLVLGVLSLSLKQRGFPGEXGCRSPVSCAWPQNRMGCRTSPGPSPTSPTAAGEXGSRPRRRKPGRVQGLQRDGPTLTQEDALTAAKRCPLPVTSVPQTPETSTGAAAPGSQPVGAPPSR

SEQ ID NO: 49639 - protein, 126 aa, Homo sapiens
MRPRSGTFTMGRKSLYLLIVGILIAYYIYTPLPDNVEEPWRMMWINAHLKTIQNLSETPSQQRQQQQQQELYQSNTHSLQYTSLVRVLRQAIPSLALLGTQICESNRSPSLQGLERRISQGVSLGI

SEQ ID NO: 49640 - protein, 416 aa, Homo sapiens
  misc_feature (1)...(416): Xaa = X or * as defined in Table 2
QRPRSGTFTMGRKSLYLLIVGILIAYYIYTPLPDNVEEPWRMMWINAHLKTIQNLATFVELLGLHHFMDSFKVVGSFDEVPPTSDENVTVTETKFNNILVRVYVPKRKSXSTKEGGLFYIPCGGWRRGSYSLIVYDLPSSWTVERPGSSLVSNHLRLATXFHFPLQLGELYDALRXFLRKKVLAKYGCEPXGESGISGDSAGRGIXLSAVTQQLLDDPDVQDPNFKIQSXIYPALSASWMXVLPSYQGKFKFSYFYSKSLQCRFWSEYFTTDRSLEKAMLSRQHVPVESSHLFKFINWSSLLPXEGLLKGHVYNNPNYGSSELAKKYPGFLDVRAAPLLADDNKLRGLPLTYVITCQYDLLRDDGLMYVTRLRNTGVSGXLNNHVEGGFHGAFSFLGLKISHRLINQYIEWLKENL

SEQ ID NO: 49641 - protein, 218 aa, Homo sapiens
  misc_feature (1)...(218): Xaa = X or * as defined in Table 2
DAWADAWVPVSSEVAYLFGGCHTCGGLPVAHPMMPRGSRSRTSRMAPPASRAPQMRAAPRPAQVGQPPAAAPPSAVGSSAAAPRQPGLMAQMATTAAGVAVGSAVGHTLGHAITGAFSGRKXLPEPARPXHHFNQEASGTPPAQHSKQQRHPHLQQPCPYEIQTVFWEFCPGTRGDIQALCEGFNEVLKQCRLANGFGPNEEVSTFGRDWKFSSHNLS

SEQ ID NO: 49642 - protein, 387 aa, Homo sapiens
  DOMAIN (88)..(116): Quinone oxidoreductase / zeta-crystallin proteins domain identified by eMATRIX, accession number BL01162B, p-value=3.328e- 15, raw score of 18.11
  DOMAIN (41)..(387): Zinc-binding dehydrogenases domain identified by PFam, accession name adh_zinc, E-value=3.2e-53, PFam score of 190.2
  misc_feature (1)...(387): Xaa = X or * as defined in Table 2
RHQSDQTVPRLSRPHVQSQKSSMAAAAKPNNLSLVVHGPGDLRLENYPIPEPGPNEVLLRMHSVGICGSDVHYWEYLSRFGNFIVKKPMVLGHEASGTVEKVGSSVKAPXNQGDRVAIEPGCSPEENXWNSCKMGRYNLSPSIFFCATPPDDGNLCRFYKHNAAFCYKLPDNVTFEEGALIEPLSVGIHACRRGGVTLGHKVLVCGSWANRGWVTLLVAKAMGAAQVVVTDLSATRLSKAKEIGADLVLQISKESPQEIARKVEGLLGCKPEVTIECTGAEASIQAGIYATRSGGTLVLVGLGSEMTTVPLLHAAIREVDIKGVFRYCNTWASGGFSMLCVPKSVNVKPLVTHRVSSWRKVLEAFETFKKGLGLKIMLKCDPSDQNL

SEQ ID NO: 49643 - protein, 143 aa, Homo sapiens
  DOMAIN (66)..(108): Serpins proteins domain identified by eMATRIX, accession number BL00284C, p-value=6.538e-29, raw score of 28.56
  DOMAIN (2)..(142): Serpins (serine protease inhibitors) domain identified by PFam, accession name serpin, E-value=3.7e-62, PFam score of 212.7
DNIFLSPLSISTAFAMTKLGACNDTLQQLMEENAEQSRAAINKWVSNKTEGRITDVIPSEAINELTVLVLVNTIYFKGLWKSKFSPENTRKELFYKADGESCSASMMYQEGKFRYRRVAEGTQVLELPFKGDDITMVLILPKP

SEQ ID NO: 49644 - protein, 108 aa, Homo sapiens
  DOMAIN (40)..(67): Serpins proteins domain identified by eMATRIX, accession number BL00284D, p-value=3.793e-17, raw score of 16.34
  DOMAIN (20)..(108): Serpins (serine protease inhibitors) domain identified by PFam, accession name serpin, E-value=1.7e-34, PFam score of 119.2
  misc_feature (1)...(108): Xaa = X or * as defined in Table 2
ARGSTRLMESRVQHLXCTRKELTPEVLQEWLDELEEMMLVVHMPRFRIEDGFSLKEQLQDMGLVDLFSPEKSKLPGIVAEGRDDLYVSDAFHKAFLEVNEEGSEAAAS

SEQ ID NO: 49645 - protein, 122 aa, Homo sapiens
  DOMAIN (86)..(107): Serpins proteins domain identified by eMATRIX, accession number BL00284B, p-value=3.483e-13, raw score of 17.99
  DOMAIN (15)..(121): Serpins (serine protease inhibitors) domain identified by PFam, accession name serpin, E-value=2.2e-20, PFam score of 71.6
DTLQHTREVFKRDTISEKTSEQIHLFFAELKCPLYRKALKCCRLEPGTRLSGDKYLTFNETYQDITEVVYGAKLQPLDFKENAEQSRAAINKWVSNKTEGRITDVIPSEAINELTVLVLVNT

SEQ ID NO: 49646 - protein, 707 aa, Homo sapiens
  DOMAIN (263)..(287): Serpins proteins domain identified by eMATRIX, accession number BL00284A, p-value=3.739e-18, raw score of 15.64
  DOMAIN (236)..(660): Serpins (serine protease inhibitors) domain identified by PFam, accession name serpin, E-value=7e-163, PFam score of 553.1
MAQFSIVGMCLGLFNQSPTDGSGVQLFVIMNQVMAANLAETHAALCPTLSSGTSARFRGKNQFSGGLPQITLSPLAQPCGRLAAMYSNVIGTVTSGKSLPSTSPLVPLLLSGFAPLFLKGLQNWTQTTQEGKSPSAAPASSQPQACPTDHVRESALGACLSLPGEDGKIQKVYLLSLLLIGFWDCVTCHGSPVDICTAKPRDIPMNPMCIYRSPEKKATEDEGSEQKIPEATNRRVWELSKANSRFATTFYQHLADSKNDNDNIFLSPLSISTAFAMTKLGACNDTLQQLMEVFKFDTISEKTSDQIHFFFAKLNCRLYRKANKSSKLVSANRLFGDKSLTFNETYQDISELVYGAKLQPLDFKENAEQSRAAINKWVSNKTEGRITDVIPSEAINELTVLVLVNTIYFKVLRMALERPQGLPLALQLTPFFFKWRDRSPERANGLPKATQGLWKSKFSPENTRKELFYKADGESCSASMMYQEGKFRYRRVAEGTQVLELPFKGDDITMVLILPKPEKSLAKVEKELTPEVLQEWLDELEEMMLVVHMPRFRIEDGFSLKEQLQDMGLVDLFSPEKSKLPGIVAEGRDDLYVSDAFHKAFLEVNEEGSEAAASTAVVIAGRSLNPNRVTFKANRPFLVFIREVPLNTIIFMGRVANPCVNLSEALAVLVVNLTTLMKRTHGESLDFMERKRRPAESILLVSPPKCQ

SEQ ID NO: 49647 - protein, 532 aa, Homo sapiens
  DOMAIN (260)..(281): Serpins proteins domain identified by eMATRIX, accession number BL00284B, p-value=5.050e-10, raw score of 17.99
  DOMAIN (176)..(504): Serpins (serine protease inhibitors) domain identified by PFam, accession name serpin, E-value=8.9e-10, PFam score of 35.7
  misc_feature (1)...(532): Xaa = X or * as defined in Table 2
PALCPTLSSGTSARFRGKNQFSGGLPQITLSPLAQPCGRLAAMYSNVIGTVTSGKRKVYLLSLLLDSFGDCVTCHGSPVDICTAKPRDIPMNPMCIYRSPEKKATEDEGSEQKIPEATNNRRVWELSKANFPLLLTTFLFSTWADSKDXHXLTFFCSPLSIFQGFLLWTKVGACNDTLQQLMEVFKFDTISEKTFXSRSHFFFAKLNCRLYRKANKSSKLVSANRLFGDKSLTFNETYQDISELVYGAKLQAPGTSRENAEQSRAAINKWVSNKTEGRIHRCSFPSGRPFNELTVLGGGFNTIYFQGACWKSKFSPENTRKELFYKADGESCSASMDVTREGKFRYSGAWLEGTQVLVVCPFKGDDITMVLILPKPXEGAWAKVEKELTPEVLAKSGWDXFWREMMLVVHMPRFRIEDGLQVXREQPAKNMGPLSDLFSPRKSPQTPPGIVAEGRDDPPMSSDAIPIRHFLEVNEEGSEAACKYPLLXLPGRSLNPNRVTFQGQQAFPWVFIREVPLNTIYLHGAELANPCV

SEQ ID NO: 49648 - protein, 244 aa, Homo sapiens
  DOMAIN (163)..(186): Immunoglobulins and major histocompatibility complex proteins domain identified by eMATRIX, accession number BL00290A, p-value= 1.529e-14, raw score of 20.89
  DOMAIN (35)..(227): Immunoglobulin domain identified by PFam, accession name ig, E-value=1.1e-17, PFam score of 62.0
TMAWTLLLLVLLSHCTGSLSQPVLTQPSSHSASSGASVRLTCMLSSGFSVGDFWIRWYQQKPGNPPRYLLYYHSDSNKGQGSGVPSRFSGSNDASANAGILRISGLQLEVEADYYCGTWHSNSKNVRVFGGGTKLTVLGQPKAAPSVTLFPPSSEELQANKATLVCLISDFYPGAVTVAWKADSSPVKAGVETTTPSKQSNNKYAASSYLSLTPEQWKSHKSYSCQVTHEGSTVEKTVAPTECS

SEQ ID NO: 49649 - protein, 235 aa, Homo sapiens [sequence omitted]

SEQ ID NO: 49650 - protein, 251 aa, Homo sapiens
  DOMAIN (170)..(193): Immunoglobulins and major histocompatibility complex proteins domain identified by eMATRIX, accession number BL00290A, p-value= 1.529e-14, raw score of 20.89
  DOMAIN (48)..(234): Immunoglobulin domain identified by PFam, accession name ig, E-value=3e-18, PFam score of 63.8
CWGLRRQRSQDVTTMAWALLILTLLTQGTGSWAQSALTQPPSASGSLGQSVTFSCSGTSSDIGNYNYVSWYRQHPGKAPKLMIYEVTKRPSGVPNRFSGSKSGNTASLTVSGLQAEDEADYYCCSYAGDYTPGVVFGGGTKLTVLGQPKAAPSVTLFPPSSEELQANKATLVCLISDFYPGAVTVAWKADSSPVKAGVETTTPSKQSNNKYAASSYLSLTPEQWKSHRSYSCQVTHEGSTVEKTVAPTECS

SEQ ID NO: 49651 - protein, 588 aa, Homo sapiens
  DOMAIN (242)..(265): Immunoglobulins and major histocompatibility complex proteins domain identified by eMATRIX, accession number BL00290A, p-value= 1.563e-15, raw score of 20.89
  DOMAIN (34)..(571): Immunoglobulin domain identified by PFam, accession name ig, E-value=6e-28, PFam score of 95.1
MAWIPLFLGVLAYCTGSVASYELTQPPSVSVSPGQTASITCSGDKLGDKYACWYQQKPGQSPVLVIYQDSKRPSGIPERFSGSNSGNTATLTISGTQAMDEADYYCQAWDSSTAHSDTGRCGIVGRPPVRQCWPLLLLGLAMVAHGLLRPMVAPQSGDPDPGASVGSSRSSLRSLWGRLLLQPSPQRADPRCWPRGFWSEPQSLCYVFGTGTKVTVLGQPKANPTVTLFPPSSEELQANKATLVCLISDFYPGAVTVAWKADGSPVKAGVETTKPSKQSNNKYAASSYLSLTPEQWKSHRSYSCQLQWGLGLGASQGGFLYEPVSQCVVFGGGTKLTVLGQPKAAPSVTLFPPSSEELQANKATLVCLISDFYPGAVTVAWKADSSPVKAGVETTTPSKQSNNKYAASSYLSLTPEQWKSHRSYSCQKPNHASHGTSRMPSVSAPVSGLKSCWSGTGDRSALGQMPGPCHGIPDPMQQASDSGQPKAAPSVTLFPPSSEELQANKATLVCLISDFYPGAVTVAWKADSSPVKAGVETTTPSKQSNNKYAASSYLSLTPEQWKSHKSYSCQVTHEGSTVEKTVAPTECS

SEQ ID NO: 49652 - protein, 236 aa, Homo sapiens
  DOMAIN (155)..(178): Immunoglobulins and major histocompatibility complex proteins domain identified by eMATRIX, accession number BL00290A, p-value= 1.529e-14, raw score of 20.89
  DOMAIN (34)..(220): Immunoglobulin domain identified by PFam, accession name ig, E-value=7.2e-19, PFam score of 65.8
MAWALLLLTLLTQDTGSWAQSALTQPASVSGSPGQSITISCTGTNNDVGSYNLVSWYQQHPGKAPKIMIYEVSKRPSGVSNRFSGSKSGNTASLTISGLQAEDEADYYCCSYTSSRPDVVFGGGTKLTVLGQPKAAPSVTLFPPSSEELQANKATLVCLISDFYPGAVTVAWKADSSPVKAGVETTTPSKQSNNKYAASSYLSLTPEQWKSHRSYSCQVTHEGSTVEKTVAPAECS

SEQ ID NO: 49653 - protein, 226 aa, Homo sapiens
  DOMAIN (145)..(168): Immunoglobulins and major histocompatibility complex proteins domain identified by eMATRIX, accession number BL00290A, p-value= 1.529e-14, raw score of 20.89
  DOMAIN (27)..(209): Immunoglobulin domain identified by PFam, accession name ig, E-value=1.1e-17, PFam score of 62.0
LPLLTFCTVSEASYELTQPPSGSVSPGKTARITCSGDALPKKYAYWYQQKSGQSPVLVIYEDTKRPSGIPERFSFSSSGTMSTLTISGAQVEDEADYYCYSTDRRGNHRVFGGGTKLTVLGQPKAAPSVTLFPPSSEELQANKATLVCLISDFYPGAVTVAWKADSSPVKAGVETTTPSKQSNNKYAASSYLSLTPEQWKSHKSYSCQVTHEGSTVEKTVAPTECS

SEQ ID NO: 49654 - protein, 247 aa, Homo sapiens
  DOMAIN (166)..(189): Immunoglobulins and major histocompatibility complex proteins domain identified by eMATRIX, accession number BL00290A, p-value= 1.529e-14, raw score of 20.89
  DOMAIN (48)..(230): Immunoglobulin domain identified by PFam, accession name ig, E-value=1.7e-20, PFam score of 71.1
RGVIQGSSTGGASAMAWTFLFLGLLSHCTASVTSFVLAQPPSVSVAPGETARITCGADNIGRRSVHWYQQRPGQAPVLVIYYDSDRPSEIPQRFSGSNSGDTATLTISGVEAGDEADYYCQVWDDDNSHVVFGGGTKLTVLGQPKAAPSVTLFPPSSEELQANKATLVCLISDFYPGAVTVAWKADSSPVKAGVETTTPSKQSNNKYAASSYLSLTPEQWKSHRSYSCQVTHEGSTVEKTVAPTECS

SEQ ID NO: 49655 - protein, 244 aa, Homo sapiens
  DOMAIN (163)..(186): Immunoglobulins and major histocompatibility complex proteins domain identified by eMATRIX, accession number BL00290A, p-value= 1.529e-14, raw score of 20.89
  DOMAIN (41)..(227): Immunoglobulin domain identified by PFam, accession name ig, E-value=5.7e-17, PFam score of 59.7
RSRDVSTMAWALLLLTLLTQGTGSWAQSALTQPASVNGSPGQLIIISCTGPSSDIGDYQYISWYQQHPGKAPKLIIYDVDKRPSGVSNRFSGSKSGNTASLTISGLQAEDEADYYCSSYRGSATFEVVFGGGTKVTVLRQPKAAPSVTLFPPSSEELQANKATLVCLISDFYPGAVTVAWKADSSPVKAGVETTTPSKQSNNKYAASSYLSLTPEQWKSHRSYSCQVTHEGSTVEKTVAPTECS

SEQ ID NO: 49656 - protein, 238 aa, Homo sapiens
  DOMAIN (157)..(180): Immunoglobulins and major histocompatibility complex proteins domain identified by eMATRIX, accession number BL00290A, p-value= 1.529e-14, raw score of 20.89
  DOMAIN (39)..(221): Immunoglobulin domain identified by PFam, accession name ig, E-value=3.5e-17, PFam score of 60.4
WGVSTMAWTPLWLTLLTLCIGSVVSSELTQDPTVSVALGQTLRIKCQGDTIRSYYASWYQQKPGQAPTLLINGKDNRPSGIPDRFSGSTSGNTASLTITGTQAEDEADYYCNSRDSSAHHLVFGGGTKLTVLSQPKAAPSVTLFPPSSEELQANKATLVCLISDFYPGAVTVAWKADSSPVKAGVETTTPSKQSNNKYAASSYLSLTPEQWKSHRSYSCQVTHEGSTVEKTVAPTECS

SEQ ID NO: 49657 - protein, 236 aa, Homo sapiens
  DOMAIN (155)..(178): Immunoglobulins and major histocompatibility complex proteins domain identified by eMATRIX, accession number BL00290A, p-value= 1.563e-15, raw score of 20.89
  DOMAIN (34)..(220): Immunoglobulin domain identified by PFam, accession name ig, E-value=1.3e-19, PFam score of 68.2
MAWALLFLTLLTQGTGSWAQSALTQPASVSGSPGQSITISCTGSSSDVGGYNYVSWYQQHPGKAPKLIHYEGSKRPSRVYDRFSGSMSANTASLTISGLQADDEADYYCCSFAGSSALRIFGSGTRVIVIGQPKANPTVTLFPPSSEELQANKATLVCLISDFYPGAVTVAWKADGSPVKAGVETTKPSKQSNNKYAASSYLSLTPEQWKSHKSYSCQVTHEGSTVEKTVAPTECS

SEQ ID NO: 49658 - protein, 238 aa, Homo sapiens
  DOMAIN (157)..(180): Immunoglobulins and major histocompatibility complex proteins domain identified by eMATRIX, accession number BL00290A, p-value= 1.529e-14, raw score of 20.89
  DOMAIN (41)..(221): Immunoglobulin domain identified by PFam, accession name ig, E-value=4.5e-16, PFam score of 56.9
SIGGASAMAWIPLFLGVLAYCTGSVASYELTQPPSVSVSPGQTASITCSGDTLGDKYACWYQQKPGHSPVLVIFQDSKRPSGIPERFSGSNSGNTATLTISGTQAMDEADYYCQAWDSSTAVFGGGTKLTVLGQPKAAPSVTLFPPSSEELQANKATLVCLISDFYPGAVTVAWKADSSPVKAGVETTTPSKQSNNKYAASSYLSLTPEQWKSHRSYSCQVTHEGSTVEKTVAPTECS

SEQ ID NO: 49659 - protein, 237 aa, Homo sapiens
  DOMAIN (84)..(118): IMMUNOGLOBULIN V REGION domain identified by eMATRIX, accession number DM00031B, p-value=1.608e-10, raw score of 15.41
  DOMAIN (34)..(209): Immunoglobulin domain identified by PFam, accession name ig, E-value=3.1e-22, PFam score of 76.7
MAWTPLLLLFLSHCTGSLSQAVLTQPSSLSASPGASASLTCTLRSGINVGTYRIYWYQQKPGSPPQYLLRYKSDSDKQQGSGVPSRFSGSKDASANAGILLISGLQSEDEADYYWSWAQSVLTQPPSASGTPGQRVTISCSGSSSNIGSNTVNWYQQLPGTAPKLLIYSNNQRPSGVPDRFSGSKSGTSASLAISGLQSEDEADYYCAAWDDSLNGPTVLQANGELRQEPPSSSVRR

SEQ ID NO: 49660 - protein, 250 aa, Homo sapiens
  DOMAIN (168)..(191): Immunoglobulins and major histocompatibility complex proteins domain identified by eMATRIX, accession number BL00290A, p-value= 1.529e-14, raw score of 20.89
  DOMAIN (47)..(237): Immunoglobulin domain identified by PFam, accession name ig, E-value=6.5e-17, PFam score of 59.5
  misc_feature (1)...(250): Xaa = X or * as defined in Table 2
RRQDSGQSPAWPAGALLLTLLTHCAVPGSWAQSVLTQPPSASGTPGQRVTISCSGSSSNIGINDVTWYQQVPGTAPKLLMYSDNHRPSGVPDRFSGSKSGTSASLGPSVGLQSEDEADYYCGTWGLAAXMVFMSSAGGTTLTVTSQPKAAPSVTLFPPSSEELQANKATLVCLISDFYPGAVTVAWKADSSPVKAGVETTTPSKQSNNKYAASSYLSLTPEQWKSHRSYSCQVTHEGSTVEKTVAPTECS

SEQ ID NO: 49661 - protein, 100 aa, Homo sapiens
MAGFPLLLTLLTHCVRVLGPVCADLSHPQRLGPPGRGSPSLVLEAAPTSEVIMYTGGFIPGELLTVGLEGKMAAPVKAGSGDHPKPSKTEQQQVRGQQLH

SEQ ID NO: 49662 - protein, 250 aa, Homo sapiens
  DOMAIN (84)..(118): IMMUNOGLOBULIN V REGION domain identified by eMATRIX, accession number DM00031B, p-value=1.563e-13, raw score of 15.41
  DOMAIN (34)..(117): Immunoglobulin domain identified by PFam, accession name ig, E-value=1.7e-10, PFam score of 38.8
  misc_feature (1)...(250): Xaa = X or * as defined in Table 2
MAWTPLLLLFLSHCTGSLSQAVLTQPSSLSASPGTSASLTCTLRSDINVGSPFIYWYQQKPGSPPQFLLRYKSDSDNQQGSGVPSRFSGSKDASANAGILLISGLQAEDEADYYCSSYVGTNNFGVLFGGGTKLTRPXGQPKACPPRVTLFPHPPSEEASKPNKATLVCLISDFLPGKPXQLPWKAAXQPPSLAGVETPPHPPTRSNNKYAASSYLSLTPEQWKSHRSYSCQVTHEGSTVEKTVAPTECS

SEQ ID NO: 49663 - protein, 74 aa, Homo sapiens
  misc_feature (1)...(74): Xaa = X or * as defined in Table 2
YISLPAGVLSLACCTLYGISWQFDPCCKYQVEYDAYKLXRLPLHTLTCSRPTRDNRVFRSPHSVRQQSLGRCLA

SEQ ID NO: 49664 - protein, 236 aa, Homo sapiens
  misc_feature (1)...(236): Xaa = X or * as defined in Table 2
ESTVQVSVFCHRVPARTSSQTALPVLLGLLGFTVSGPLNLPEPSVIVGNGELVGPQTCLHCGMEIYNGENAQDQFXVTELGAGPXEGPVTSYIVIEPTRIGDETARWITVGNCLHKTAVLAGTALLLHPGLRCTLRFIPHHISPAPLGVLSLACCNLYGISWQFEPFACKXQVEVRTPNKLSRLPLHTLTLLPPRVVLVRKDDLHRKRLHNPIGTGPPLVYCVKKIYELYAVMIFK

SEQ ID NO: 49665 - protein, 282 aa, Homo sapiens
  misc_feature (1)...(282): Xaa = X or * as defined in Table 2
MRLGIGFACPWKGLADEFDLKIEKQRNQGRLLGFKLQHLVPFTEMEKMGGDRQKHRTAPRQAERRRSGRVSFQPPLQPLDVTLLPGATREGNCPRASRGRRPSPISHCQETQGPEGRSDCTIRGVLSSIPAARPLRKGSGFPTVCEKRPEQGQQPALGPAGPAAVPAPAASRTQWGSRCPCGAGARRGYWRGLLGLCNLISPLDPGSPGSGRWGSAGALSRPADSCPPWWPRAGAXRRGAAAEAGNSPSRCGASRPAEEQSGAFAGPLPSSPSQXRAPGAEV

SEQ ID NO: 49666 - protein, 109 aa, Homo sapiens
  DOMAIN (39)..(97): P21-Rho-binding domain identified by PFam, accession name PBD, E-value=5.6e-08, PFam score of 39.9
  misc_feature (1)...(109): Xaa = X or * as defined in Table 2
TRSSCVTLVCXLAMVSLRVARPHGVPGTMFGKRKKRVEISAPSNFEHRVHTGFDQHEQKFTGLPRQWQSLIEESARRPKPLVDPACITSIQPGAPKEVCSPRASGTRSR

SEQ ID NO: 49667 - protein, 620 aa, Homo sapiens
  DOMAIN (395)..(443): Receptor tyrosine kinase class II proteins domain identified by eMATRIX, accession number BL00239B, p-value=1.217e-11, raw score of 25.15
  DOMAIN (350)..(601): Eukaryotic protein kinase domain identified by PFam, accession name pkinase, E-value=1.2e-81, PFam score of 284.7
PEAPRGVVTCLRALLSHQHQTRPHRVPGTMFGKRKKRVEISAPSNFEHRVHTGFDQHEQKFTGLPRQWQSLIEESARRPKPLVDPACITSIQPGAPKTIVRGSKGAKDGALTLLLDEFENMSVTRSNSLRRDSPPPPARARQENGMPEEPATTARGGPGKAGSRGRFAGHSEAGGGSGDRRRAGPEKRPKSSREGSGGPQESSRDKRPLSGPDVGTPQPAGLASGAKLAAGRPFNTYPRADTDHPSRGAQGEPHDVAPNGPSAGGLAIPQSSSSSSRPPTRARGAPSPGVLGPHASEPQLAPPACTPAAPAVPGPPGPRSPQREPQRVSHEQFRAALQLVVDPGDPRSYLDNFIKIGEGSTGIVCIATVRSSGKLVAVKKMDLRKQQRRELLFNEVVIMRDYQHENVVEMYNSYLVGDELWVVMEFLEGGALTDIVTHTRMNEEQIAAVCLAVLQALSVLHAQGVIHRDIKSDSILLTHDGRVKLSDFGFCAQVSKEVPRRKSLVGTPYWMAPELISRLPYGPEVDIWSLGIMVIEMVDGEPPYFNEPPLKAMKMIRDNLPPRLKNLHKVSPSLKGFLDRLLVRDPAQRATAAELLKHPFLAKAGPPASIVPLMRQNRTR

SEQ ID NO: 49668 - protein, 390 aa, Homo sapiens
  DOMAIN (204)..(235): Protein kinases ATP-binding region proteins domain identified by eMATRIX, accession number BL00107A, p-value=2.038e-12, raw score of 18.39
  DOMAIN (201)..(262): Eukaryotic protein kinase domain identified by PFam, accession name pkinase, E-value=2.1e-10, PFam score of 41.4
  misc_feature (1)...(390): Xaa = X or * as defined in Table 2
PPWAAVHGDRPHRVPGTMFGKRKKRVEISAPSNFEHRVHTGFDQHEQKFTGLPRQWQSLIEESARRPKPLVDPACITSIQPGAPKWGETGSWPPFRHLPEGXHGPPIPGCQREPQRVSHEQFRAALQLVVDPGDPRSYLDNFIKIGEGSTGIVCTPPSGKLVAVKKMDLRKQQRRELLFNERPWQCPXHPRRXEAQVPLPVLQALSVLHAQGVIHRDIKSDSILLTHDGQVSKEVPRRKSLVGTPYWMAPELISRLPYGPEVSPGWLGCPAVDSVRCHFQLQRWREMGPSLGSHCQNGALDKEEGQRPSHTGSLQWGSLGVERTLRVNMYECVHACNSFYLVNKLFQKDSTQEASVTMVPDPDKDGKNRASQKRKAHSQGARRPTGTENS

SEQ ID NO: 49669 - protein, 72 aa, Homo sapiens
  DOMAIN (50)..(63): PROTEIN ZINC-FINGER METAL-BINDI domain identified by eMATRIX, accession number PD00066, p-value=7.000e-13, raw score of 13.92
  DOMAIN (32)..(56): Zinc finger, C2H2 type domain identified by PFam, accession name zf-C2H2, E-value=5.5e-06, PFam score of 33.3
  misc_feature (1)...(72): Xaa = X or * as defined in Table 2
TCGEGLSWTRPLPTASSLQVHXSLSAGERPYLCDYPDCGKAFVQSGQLKTHQRLHTGEKPFVCSENGVNLVF

SEQ ID NO: 49670 - protein, 146 aa, Homo sapiens
  misc_feature (1)...(146): Xaa = X or * as defined in Table 2
GPAGRCPADCSEEKEGPSAGDSGRPPSCTXPWKGLPVMAILPGEAPVPGPGWPEPDAGGPLWRWGSPSPCAAALHRPSGTTPPGRALSGPGLERAKQRSPRVSPAPRAAPHGHPTHCLPIPAGPRPAKDHPAYGPPASCHHHLAAS

SEQ ID NO: 49671 - protein, 252 aa, Homo sapiens
  DOMAIN (68)..(112): Synapsins proteins domain identified by eMATRIX, accession number BL00415N, p-value=1.550e-10, raw score of 4.29
  misc_feature (1)...(252): Xaa = X or * as defined in Table 2
TAGSLVLAARGTXGPPPRARKXGPAGRCPADCSEEKEGPSAETPGTTPPGRALSGPGLERAKQRSPRVSPAPRAAPHGHPTHCLPIPAGPRPAKDHPPTHQKPPPRTEGSTGGHCCGPPIFLIPNTSMLTVYPSGPVMPAGFTLSPSDTRPSLLNGQEVLRKMNGAVQYLSLCDYIIPTCQCLATTVLCSVSMSLTVFAVSYMVELLLLQNAQVHQLVLQNWMLKALPPALQDPPHVPPRVPRAARTRLPAV

SEQ ID NO: 49672 - protein, 827 aa, Homo sapiens
  DOMAIN (628)..(654): Calponin family repeat proteins domain identified by eMATRIX, accession number BL01052B, p-value=8.875e-26, raw score of 15.31
  DOMAIN (743)..(807): Calponin family domain identified by PFam, accession name calponin, E-value=1e-20, PFam score of 71.8
  misc_feature (1)...(827): Xaa = X or * as defined in Table 2
MRSGDLKFGKSAAWPSGQKEKLVFRGKIEEGLEYLHKKKPSANSQDNGKEASKAFHGPLQQPLLSQALGPDREEWFPGQAPWPHCCVHPQDTAGCIPVVPAPAMAQRCTGTAWVTASEVAPSLDCFHIVLSQQVYRIHRPTSSLHPQYGKATRHTTPAVSMRAAAGAEPCKATGADWPKTLGAQPSHPCTMDVGQGFKKDDSGAALAPMAALMGWAGIECLWLFHTEGVNCWPWDLGEKNGLLGQPRGPAAVCSLRTLLPASQQPQLLLRPWLKDAQVQLGSLLQRVQAIGLGGFYIVLSQFIDPSKASYPPWVKNSRHSTAAQPMRAAAGAEHCKATGAELPKALGAQPSCPCVLDVGQGFKKNDFGAVGLNNWPAGFWNVMGTCKSRLCFVLLSGKKSSFRVEVLTQCLDSHTLETYQFYNREVAFEDVLESSQTGLVVQKPQTDRLTKRGRGEATRNLRGLVPSMPRSLLPSTAQPTAWKCQRGPSPYTHQDMALIPSPTARCLSPAKEPKQEEVGEKSLLPDPTLPLTDPRLTGSTEQAHAEGLAALMSALRVSHLQGRGGVVTLVDSQLGVIAVSSTQFNKGPSYRLLADVQNRLLPKYDSQKEAELRSWIKGFTGLSIRPDFQKGLKDGIILCTLVNKLQPGSVPKINASVXNWHXLENLSNFLKAMVSYGMNPVDLFEANNLFESGNNMQVRVSLLALAGKAKTKGLRSGVDIRDKYSEKQNFDDTTMKASQCVIRLQITNKCASQSGMTAYGTRRHLYDPKNRILPPMDNSTISLQMGTNKCASQVGMTAPGTQRHIYDTKLGIDKCENSSMSLKMGYT

SEQ ID NO: 49673 - protein, 433 aa, Homo sapiens
  DOMAIN (319)..(339): CALPONIN SIGNATURE domain identified by eMATRIX, accession number PR00889D, p-value=6.365e-21, raw score of 5.49
  DOMAIN (305)..(407): Calponin family domain identified by PFam, accession name calponin, E-value=4.8e-20, PFam score of 69.7
  misc_feature (1)...(433): Xaa = X or * as defined in Table 2
MHQEDLRAWYLDLGLPSHQNETTDVSVVYERFSLTDATYPKQAKQWDFPFLRVSTAQPTAWKCQRAPSPYTHQDTALIPSPTARWLSPEKEPKQGEVGEKSLLPDPTLPLTDPRLTGSTEQKKDLAAGPVGSALRRRPPAVSSTQFNKGPSYRLLADVQNRLLPKYDSQKEAELRSWIKGFTGLSIRPDFQKGLKDGIILCTLVNKLQPGSVPKINASVXNWHXLENLSNFLKAMVSYGMNPVDLFEANDLFESGNNMQVRVSLLALAGKAKTKGLRSGVDIRDKYSKKQNFDDTTMKASQCVIRLQITNKCASQSGMTAYGTRRHLYDPKNRILPPMDNSTISLQMGTNKYASQVGMTAPGTQRHIYDTNLGIDKCENSSMSLKMGYTQVANHSGQVFGLGRQIYEPKYQPGGPVAHGAPSAGNCPGPGEAP

SEQ ID NO: 49674 - protein, 51 aa, Homo sapiens
  misc_feature (1)...(51): Xaa = X or * as defined in Table 2
HREEESKSSVFLNPRGVQGTGVGDHRMILGRGRAVLSKEXAAGPRGGRHES

SEQ ID NO: 49675 - protein, 317 aa, Homo sapiens
  DOMAIN (236)..(260): PROHIBITIN SIGNATURE domain identified by eMATRIX, accession number PR00679F, p-value=6.478e-28, raw score of 8.03
  misc_feature (1)...(317): Xaa = X or * as defined in Table 2
KGQYLNPNRGKGGPEPPFEPPVPPASRSDMAQNLKDLAGRLPAGPRGMGTALKLLLGAGAVAYGVRESVFNVEGGHRAIFFNRIGGVQQDTILAEGFHFRIPWFQYPHIIYDIRAKTSKKSPPLQGSKDLQMVNISPAKCWSRPNAQELSXACTSRLGLGLTRERRCLPSIVNEVLKAVWVAKFNCLTAXFTQRAPGYSLLDSAGSLTERAKGLSSLILDDVGQSQKLSFSPRSYTAAVEAKQVAQQEAQRAQFLVEKAKQEQRQKILQGRGXGRGLPKMLGEALSKNPGYIKTSQRFEPAPEIILQRRIAHIHRNP

SEQ ID NO: 49676 - protein, 286 aa, Homo sapiens
  misc_feature (1)...(286): Xaa = X or * as defined in Table 2
LDDSWEPVHPGCGDFICQWSEESGLWSTAEVWRERRGREPGLCEGARGTARVPGGRGPPHQSGQPVPPAPGSXGAXPGPAAVEGVPGPPAVPPASAALEFSRGFSCLPRCHLVVTKIGKQEDDVSIKRKNRPDYWPAPEPVAGCEGSDQEQVKPNATLEKHFLTEGTGPRSPSCLSWPPSGPHAAADPAMVPETPEPDRPQLTKKFCEARVMAVGTSNVLGQTLKPSRTGGTSWSWVFYLLTANRLPFDVKRKGGGPSSIKPRPHYDHRLLQDFKEQVIHHFVRSS

SEQ ID NO: 49677 - protein, 38 aa, Homo sapiens
ISQRQGAWPGGPAPGAGLPTSPGGGGRHGHPGLLALST

SEQ ID NO: 49678 - protein, 113 aa, Homo sapiens
QSILEYFILPKSKSIPSAFLIPLFSSTHPSPRQPLIYFLSLEICLFWKLHLLLLFPGGVLLLPVLLQPFPVFPPALHSQCPPPVCKGLPTSSGIRNYRRDTYLALYGRSLKEK

SEQ ID NO: 49679 - protein, 207 aa, Homo sapiens
MGSEGFQDMDLGEIQEQIDTMPEELTKDDWMEMSASQPVSAEEEEEAAAVQWVILDKLIKKLDMRLNEDISSLSTEELRQFVDAVVAHIVNPALVKDQLGGTDVTPKESLLTVIHMVLTEHDPFKHSADSELKALVCMALNEQRLMSWVNLICKCGSLIETHYQPGSYIAHTGFESALNLHSRLSSLKFSLPVDLAMRQLKNIKDAF

SEQ ID NO: 49680 - protein, 611 aa, Homo sapiens
  misc_feature (1)...(611): Xaa = X or * as defined in Table 2
MAAVEAAAEPVTVVAAVGPKAKDEEEEEEEPLPPCEALRWAPVLWRGPAWATAFLEEATAEEPGAAPGSPPDSPDRTLRRLRAERRRLDSSLLALSSDFAQVQFRLRQVVRGAPAEQQRLLRELEDFALKGIPDILGYEGPGDPASDEGDGLPGDRPRLRGEDQSEQEKQERLETQREKQKELILQLKTQLDDLETFAYQEGSYDSLPQSVVLERQRVIIDELIKKLDMNLNEDISSLSTEELRQRVDAAVAQIVNPARVKEQLVEQLKTQIRDLEMFINFIQDEVGSPLQTGGGHCECKAGGKTGNGCSRTGSSRTPPGNSRTKAEDVTKVRKTGLHLMRRALAVLQIFAVTRLVVPQARSLQPCGRGSRLTETTLPCXRELEASVDRVKQLALTAEPHDHVITSANLQDLSLXGKDELTMAVRKELTVAVRDLLAHGLYASSPGMSLGMATIAXLLPAFSSVPEAMHPRELFVKYYHAKNGRAYVESPARKLSQTFALPVTGGTVVTPKQSLLTAIHMVLTEHDPFKRSADSELKALVCMALNEHRLVCWMNLICKSGSLIEPHYQPWSYMAHTGFESALNLLSRLSSLKFSLPVDLAVRQLKNIKDAF

SEQ ID NO: 49681 - protein, 36 aa, Homo sapiens
HITKFRIDPNLEPDPLGSGRKQLSHHHAGYIRLSLE

SEQ ID NO: 49682 - protein, 142 aa, Homo sapiens
  DOMAIN (37)..(69): Phosphoglycerate mutase family phosphohistidine proteins domain identified by eMATRIX, accession number BL00175C, p-value= 8.962e-26, raw score of 23.75
  DOMAIN (4)..(142): Phosphoglycerate mutase family domain identified by PFam, accession name PGAM, E-value=9.9e-67, PFam score of 235.1
WNSRDAGYEFDICFTSVHLYAIRTLWTVLDAIDQMWLPVVRTWRLNERHYGGLTGLNKAETAAKHGEAQVKIWRRSYDVPPPPMEPDHPFYSNISKDRRYADLTEDQLPSCESLKDTIARALPFWNEEIVPQIKEGKRVLIA

SEQ ID NO: 49683 - protein, 296 aa, Homo sapiens
  DOMAIN (77)..(97): Phosphoglycerate mutase family phosphohistidine proteins domain identified by eMATRIX, accession number BL00175A, p-value= 9.514e-17, raw score of 15.42
  DOMAIN (78)..(194): Phosphoglycerate mutase family domain identified by PFam, accession name PGAM, E-value=2e-42, PFam score of 154.3
  misc_feature (1)...(296): Xaa = X or * as defined in Table 2
MRTRRTPRGEHSLSAFSSCVDKISRVCKSFGLELENSIQTLWAEREQSICLVAAGHLVSSSGMRNWCHARRHAAYKQVLIRHGEVAWNLENRFGGWYDANLNPAGDEEAKRWEQALPDAGYEFDICFKRTIRTLWTVPDAIDQMWLPVNVSKDRRYADLTEDQLPSCNSLKDTLARALPFWNEEIVPQIKEGKWSDHCLGALVIPVKDGCNLHGDVTTVSSLTPEERALEEPLNRPTNAPXHQEGXCWESHQKPVPFQTLGCLCEFSRGASRRKQARVVFRERSNLCRSISGGEGF

SEQ ID NO: 49684 - protein, 146 aa, Homo sapiens
  DOMAIN (1)..(53): Phosphoglycerate mutase family phosphohistidine proteins domain identified by eMATRIX, accession number BL00175D, p-value= 9.640e-39, raw score of 27.67
  DOMAIN (1)..(64): Phosphoglycerate mutase family domain identified by PFam, accession name PGAM, E-value=7.9e-23, PFam score of 86.6
RALPFWNEEIIPQIKEGKRVLIAAHGNSSGAIVKHLEGLSEEAIMVLNLPTGIPIVYELDKNLKPIKPMQFLGDEETVRKAMEAVAALVCVLESLPALFHGSEMPLGPVQVYLSLISESCSSCLTLPHGSSVHLSITVLNPFSISV

SEQ ID NO: 49685 - protein, 333 aa, Homo sapiens
  DOMAIN (37)..(57): Phosphoglycerate mutase family phosphohistidine proteins domain identified by eMATRIX, accession number BL00175A, p-value= 7.333e-20, raw score of 15.42
  DOMAIN (38)..(238): Phosphoglycerate mutase family domain identified by PFam, accession name PGAM, E-value=4.9e-54, PFam score of 192.9
  misc_feature (1)...(333): Xaa = X or * as defined in Table 2
AVLALLRGRRGGLLLRNLLIPVGAASPARRQWPPYKLVLGRHGESAWNLENRFSGWYDADLSPAGHEEAKRGGQALRDAGYEFDICFTSVHLYAIRTLWTVLEMPLSEMWLPVVRTWRLNERHYWGSXPGLNXKQKLAAKHGLRPRLKIWRRSYDVPPPPMEPDHPFYSNISKDRRYADLTEDQLPSCESLKDTIARALPFWNEEIVPQIKEGKRVLIAAHGNSLQGHCSRLLEGLFEEAIHGSLNLPDLVFPLSIELDKNFESLSSPMQFLGDEETVRKAMEAVACPGQGPRSEGRRGRILSPGCTLPCPVFVPSSPSHLAHVTLDHICKTS

SEQ ID NO: 49686 - protein, 115 aa, Homo sapiens
  misc_feature (1)...(115): Xaa = X or * as defined in Table 2
VYVSTMSLSCPASELAVRRQRWSSQFQDHPPGPLQPRPVXEMLLLXPTLDLQPVVPPAVAILSWKPSALTISSQIVTPGLKTRSFFTRKTFMKIWNHRQKYQKTMLVMFPRYPSL

SEQ ID NO: 49687 - protein, 101 aa, Homo sapiens
ATWLFISPTTTTCQLSKTLLVPLNFLEKQYLTFLLFLEFPTFSLFFRHTEDHLMRSGCLKVCSISPLSPLPPSSSHVRHLTPSLPFAMIVSFLRAPQKLSR

SEQ ID NO: 49688 - protein, 43 aa, Homo sapiens
  misc_feature (1)...(43): Xaa = X or * as defined in Table 2
HFRKIFTVFQLKLVEYNLLSGHSTQQSHPGGTVLLXDLVCPVV

SEQ ID NO: 49689 - protein, 75 aa, Homo sapiens
  misc_feature (1)...(75): Xaa = X or * as defined in Table 2
SPKGGPPNPSHGTKFHTRPCEETTKQALCEEHGCLFHLGAGGLSPKRESAKGDKGGASVHVVCHISXSPCSXLGP

SEQ ID NO: 49690 - protein, 280 aa, Homo sapiens
  misc_feature (1)...(280): Xaa = X or * as defined in Table 2
MGTPFSCHNWYRTGSCTSQVHWLQDQCSMSVCPKTPVIVAYHSNLFWTSGHLNQLVGNTEFQCKDPHSLHSPFLSILILFPCCSASGWWRGGVENRTGGFVVVTKSCGFQEHYGAPRPHFGAMWKPSSTNRGGKSRRRGEHHTGMAEKERKEGASEQGVWLGTEIEKIGCWMTVLQPVWWSLHMDAHEIWCRDLDQGTSLGRSVPSSCSLLHEKDPPMTSGPQTDQPKKHLTNFKSEIKETCFIRGPKTLAPVMDWEGSLSLVFNHCKDAFLIIHPRFKX

SEQ ID NO: 49691 - protein, 121 aa, Homo sapiens
MPSLRTRREEAEMELSVPGPSPWTPAAQARVRDAPAVTHPGSAACGTPCCSDTELEAICPHYQQPDCDTRTEDKEFLHKEDIHEDLESQAEISENYAGDVSQVPELGDLCDDVSERDCGVP

SEQ ID NO: 49692 - protein, 258 aa, Homo sapiens
MAWSVEYGPSLRAWALHPLAQNRSPERTAGGSIQVKGQAVLPKDSFQIWEIGSGKACLHRVLESQSYDGATFCGGPDKGLSSSMRTREVSITGADFTALLVDIIGNSTSYLTEIFKSTSILSVNQSNESDCIFICVMTGKSGRNLSDFWEIEEKYPIINYTFTSGLSGVLALLLTQSLFGGLFTRTRMKFGAVTRIGGPPLGNQSPSSCSLLHEKDPPTTSGPQTDQPKKHLTNFKSGCSSPGRARSQLFLSLHSSTL

SEQ ID NO: 49693 - protein, 86 aa, Homo sapiens
QAPVGGGSGGTPGRCGSGIWKFLCAGDVAAVCLTVEARNCNFFLLLYTLKARLIKSCPFSRKAGLAAKGEGPRQASLRGLTPLKHG

SEQ ID NO: 49694 - protein, 24 aa, Homo sapiens
  misc_feature (1)...(24): Xaa = X or * as defined in Table 2
NVGEXSERHPCYDXTPREVCPPSP

SEQ ID NO: 49695 - protein, 102 aa, Homo sapiens
RMLGLPTWCLIPQSRGSCGPEAPGPVSTVLPGEMRVLGPERPRTYLDTLLSPAKKMLPLLGGWRCKHSLSGAGSKNPGEHSLGILQCGILQGLLSGSQPRPW

SEQ ID NO: 49696 - protein, 101 aa, Homo sapiens; identical to SEQ ID NO: 49687

SEQ ID NO: 49697 - protein, 293 aa, Homo sapiens
  DOMAIN (129)..(150): NEUROHYPOPHYSIAL HORMONE SIGNATURE domain identified by eMATRIX, accession number PR00831E, p-value=9.338e-10, raw score of 11.64
  misc_feature (1)...(293): Xaa = X or * as defined in Table 2
GQMASSSVSLQQGVPQAADPGWVTAGASLTRAWAAGVQGDGPGTESSISASSRRVLRLGMTRTLLWACVLLWVCILLLGLCPAVGPVSSVGPVSYCGPVPYCGPYPAVGPCPAVGPVPCCGPYPSVGPVPCCGPVSCCGPVSCCGAVSCCGPVSSVGPVSCVLGLCPAVGPVSSXCGPXPAVGLCPAVGPVPCCGPYPSVGPVPCCGPVSCCGPVSCCWACVLLLGLCPAVGPVSSVGPVPCCGPVPCCGPVSCCGPVSVVGPVSCCGPVSCCGPVSCCDHSSHSLLLTFTML

SEQ ID NO: 49698 - protein, 45 aa, Homo sapiens
TAMLLTQSLFGGLFTRTRMKFGAVTRIGGPPLGESIPCTPVFFAP

SEQ ID NO: 49699 - protein, 759 aa, Homo sapiens
  DOMAIN (262)..(280): FAD-dependent glycerol-3-phosphate dehydrogenase proteins domain identified by eMATRIX, accession number BL00977C, p-value= 1.000e-22, raw score of 12.84
  DOMAIN (7)..(451): FAD-dependent glycerol-3-phosphate dehyd domain identified by PFam, accession name FAD_Gly3P_dh, E-value=1.7e-137, PFam score of 470.2
  misc_feature (1)...(759): Xaa = X or * as defined in Table 2
MLKPLMGGGAHRRAAAGARKWDGTAIIASTSGLEVLWVTTSRSKTVESVGLAKPGQHNDARMNLAIALTAARYGAATANYMEVVSLLKKTDPQTGKVRVSGARCKDVLTGQEFDVRAKCVINATGPFTDSVRKMDDKDAAAICQPSAGVHIVMPGYYSPESMGLLDPATSDGRVIFFLPWQKMTIAGTTDTPTDVTHHPIPSEEDINFILNEVRNYLSCDVEVRRGDVLAAWSGIRPLVTDPKSADTQSISRNHVVDISESGLITIAGGKWTTYRSMAEDTINAAVKTHNLKAGPSRTVGLFLQGGKDWSPTLYIRLVQDYGLESEVAQHLAATYGDKAFEVAKMASVTGKRWPIVGVRLVSEFPYIEAEVKYGIKEYACDCCGYDFTSYSPGLSEMSRQQRKPYPGLLNXCGRELNWDDYKKQEQLETARKFLYYEMGYKSRSEQLTDRSEISLLPSDIDRYKRRCHKFDADQRGFMTVVEVQRVLESINVQMDENTLHEILNEVDLNKNGQVELNEFLQLMSAIQKGRVSGSRLAILMKTAEENLDRRVPIPVDRSCGGLYFCVRNWWVLGLTDFKNEAADPSGVKLQTFTVSVTARKGSVDPKNSGAQLASPSGSRTGAAGGAACQSRALRLHSSALGWSMGLGAVEHGAVLIGEARAAQEPMEGVGGSGMAGCRSQVLPRGKAAKTPRNHLRFLGAASTQLLKLKMLTSAKIYFFIPISSAKIDYTIQGFSLNANTQGLCTDLADTSSVHAALEV

SEQ ID NO: 49700 - protein, 367 aa, Homo sapiens
  DOMAIN (241)..(262): GELSOLIN FAMILY SIGNATURE domain identified by eMATRIX, accession number PR00597D, p-value=3.392e-10, raw score of 12.77
  DOMAIN (111)..(322): Gelsolin repeat domain identified by PFam, accession name Gelsolin, E-value=4.3e-19, PFam score of 72.2
MAGCRSRALPRGEEAEARREIERSAGGPALLGDLAHPPQLLARGAASPDGKHYKVAANKVPPAALGLVQDQRYHASPGASRAGAMARELYHEEFARAGKQAGLQVWRIEKLELVPVPQSAHGDFYVGDAYLVLHTAKTSRGFTYHLHFWLGFYPHHAACGSGRQKLRFIRKLASSDRSIIKIYIYIFMVFSVRVRIPNRQKNDTRVLSDCKIAGKECSQDESTAAAIFTVQMDDYLGGKPVQNRELQGYESNDFVSYFKGGLKYKAGGVASGLNHVLTNDLTAKRLLHVKGRRVVRATEVPLSWDSFNKGDCFIIDLGTLTMIQSHLTHSHIWEMAVIIPVSKGETKALGFRSSSENVLVMGIDDPW

SEQ ID NO: 49701 - protein, 139 aa, Homo sapiens
CLSLPPTPWAPVRPEPPRRCATPCSTAPSPIDHPRAEECERTVQDWRAAPPAAPVRDPLETGKIDQEIHKYNTPGFTGCLSRVQFNQIAPLKAALRQTNASAHVHIQGELVESNCGASPLTLSPMSSATDPWHLDHLDS

SEQ ID NO: 49702 - protein, 34 aa, Homo sapiens
  misc_feature (1)...(34): Xaa = X or * as defined in Table 2
GTCWELEXRKGKPIFWGEIKASCRNLHKLQGAKC

SEQ ID NO: 49703 - protein, 72 aa, Homo sapiens
  misc_feature (1)...(72): Xaa = X or * as defined in Table 2
DLYPHHLSWQSRNAARKRKSXRGQRPIPAISXGRSQKQQQNVNTSTPSHCPRLPYECRPLLHGAQSHRPPKG

SEQ ID NO: 49704 - protein, 83 aa, Homo sapiens
MPEPPTPSMGSCAARASPMSTAPCSTAPSPIDHPRAEECRRRARDWQAAPPAAPVRDPLGEANWAPEFFGSTLPLRAVTLTVK

SEQ ID NO: 49705 - protein, 159 aa, Homo sapiens
  misc_feature (1)...(159): Xaa = X or * as defined in Table 2
RLSTSPPDSGAQLASRSGSHTGAAGGAACQSRTMRSHSSALGWSMGLGAPLQRHXINSSGGSWLVDKESFPVPSALNFSPLGRKSSPCSKVLYMPNPVSHSMIPSGSERSMDTNGSCWYLTCSLSAPGRRDTRIRKVFSQGRLLVLTLMISPSVGHSTA

SEQ ID NO: 49706 - protein, 73 aa, Homo sapiens
  misc_feature (1)...(73): Xaa = X or * as defined in Table 2
SGVSPMSFNTFTSAPAFNRSWTTCLCPKXHARCRGVQPKLDLLLPLQLMSAITSFLAMVSNSCLTSSALPFLA

SEQ ID NO: 49707 - protein, 300 aa, Homo sapiens
  DOMAIN (173)..(186): PROTEIN ZINC-FINGER METAL-BINDI domain identified by eMATRIX, accession number PD00066, p-value=9.143e-12, raw score of 13.92
  misc_feature (1)...(300): Xaa = X or * as defined in Table 2
GSRICSFQTRSGHPECPQCHWTRQNHSSIQQPHKAAYTKKTTIHPPNRSNSCSSIWCKLQKLYMCGPXGRSFNFSANLHQPQKGHSGERPFEKNKGRAILLKSHRVHTQEMPFPCSKVGKGYLVSSGLFQHQAIHNEKPCRSAMYGDMFHTQQGHFKCIDYGEAFSPKDTPGQHQIIHTGEKPYVCTECEKTCTRSSNLIQHKPKGLLSLLVLSPSTGNALFSTLSQLTQLLLTFDVRSDATFFRKGSGRHQLWLALPEDARARVTSVSGTRRRDHGGARGVVCLIHGCVPDTRSSPDVW

SEQ ID NO: 49708 - protein, 388 aa, Homo sapiens
  DOMAIN (318)..(362): Copper/Zinc superoxide dismutase proteins domain identified by eMATRIX, accession number BL00087B, p-value=4.033e-09, raw score of 23.74
MIREQKVKEVYICAGKKKSHMHLWHNGEKYNRLGRKDRKMTHEGWLIKIPHFPGRKYKASGLHWEQMKHMGGRGKVHLEFTEMYVAGRRGEVKDEVLEPMSLTEVYIPTENDREVWRERRLRAPGLCAALEGQLEFRVGVGLAGSALEAAGQPCWPRAGRARDLQPAMPEPPPASVGSCAARASLRSAAPCSTAPSPIGHPRAEECERTAQDWQAAPPAAPVRDPLGEASWAPESVMWPPLDSRQSEEVSVSKRHMDATDKIKFPWLKEKRTIEFGEAAGYVCHRRYKDMEPHEKMGEAAKKVHWVQMRSRARDLQPAMPEPPTHSKGSCAARASPTTHHPLLHDAQSHRPPKGLRSAGTWRGTGRQLHLQPQCGIHWVKPAGLLSLL

SEQ ID NO: 49709 - protein, 148 aa, Homo sapiens
  DOMAIN (46)..(66): Nerve growth factor family proteins domain identified by eMATRIX, accession number BL00248A, p-value=2.286e-16, raw score of 16.15
  misc_feature (1)...(148): Xaa = X or * as defined in Table 2
XGCGGVGETLNDRARVHLSLHVDVPGNGHTDAMVTFATILQVNKVMSILFYVIFLAYLRGIQGNNMDQRSLPEDSLNSLIIKLIQADILKNKLSKQMVDVKENYQSTLPKAEAPREPERGEPAKSAFQPVIAMDTELLRQQRRYNSPR

SEQ ID NO: 49710 - protein, 262 aa, Homo sapiens
  DOMAIN (228)..(243): Lipoate-protein ligase B proteins domain identified by eMATRIX, accession number BL01313A, p-value=5.190e-09, raw score of 14.19
  misc_feature (1)...(262): Xaa = X or * as defined in Table 2
LSHYLACSLRLPSGSRIRSAWLIPSIMLLNYTSPGLPRHRSKSENRLDDTARRSPGMAGPGCPPLPGGVPDVRAAYGAPTSAQRPRVGWPPGGRWPRGARGARSFLKKPFRGTPTQVRGAWQCPPPPLTVEKXPWHPCGRFQGRRHEEKGGRELGHSKSPPPRRSHYPAGEKGEEERKEREESSCAGLRRGAHEHAQGQSLPGELPAPGDPHPGRCVGGQGRSRMGPCSXSLAQHPPVCTRGQREKQERRATNKPVRGAPKV

SEQ ID NO: 49711 - protein, 87 aa, Homo sapiens
  DOMAIN (1)..(50): kw TRANSCRIPTASE REVERSE II ORF2 domain identified by eMATRIX, accession number DM01354Z, p-value=5.974e-21, raw score of 9.06
  misc_feature (1)...(87): Xaa = X or * as defined in Table 2
TWLKSGISFPPALFTIAKTWRXPKCPSMIDWIKKMWHIYTMEYYAAIEKDEFMYFAGTWMTLDTVILSKLSQEQKTKHRMFSLISGS

SEQ ID NO: 49712 - protein, 237 aa, Homo sapiens
  DOMAIN (35)..(73): Ribosomal protein L6 proteins 2 domain identified by eMATRIX, accession number BL00700A, p-value=1.529e-10, raw score of 19.34
  misc_feature (1)...(237): Xaa = X or * as defined in Table 2
EWSSVRRILVEKRALRRPHPQCLCFRMKTILSNQTVDHSQKNVDITLKGTPQXSCKGPRGTLRRDFNHIKCGTSALLGKEQQRGFRVDKWWGNRKGNWATRSGLFGSHVQDHDPRGVTTGASGYKDEGPVYASPSPHPTVVIPGRNGSSLLKSRNFLGEKYIPQGFRMKTRVLLCSVSQSPEKMKLILEGNDIELVFKFQRALIQQATTVKNKGIRKFFGWVSMSLEKGTVQPGLIE

SEQ ID NO: 49713 - protein, 60 aa, Homo sapiens
  misc_feature (1)...(60): Xaa = X or * as defined in Table 2
MGSLKLRLAAIVSTGSKQAEQVLQKESFFQYVXQXGNRAQVDFKXCQFFLVIQRRQLHQV

SEQ ID NO: 49714 - protein, 492 aa, Homo sapiens
  DOMAIN (163)..(181): DEAH-box subfamily ATP-dependent helicases proteins domain identified by eMATRIX, accession number BL00690B, p-value=5.320e- 15, raw score of 13.38
  DOMAIN (339)..(435): Helicases conserved C-terminal domain identified by PFam, accession name helicase_C, E-value=0.07, PFam score of 2.0
MDERREEQIVQLLNSVQAKNDKESEAQISWFAPEDHGYGTEVSTKNTPCSENKLDIQEKKLINQEKKMFRIRNRSYIDRDSEYLLQENEPDGTLDQKLLEDLQKKKNDLRYIEMQELVNLIDNHQVTVISGETGCGKTTQVTQFILDNYIERGKGSACRIVCTQPRRISAISVAERVAAERAESCGSGNSTGYQIRLQRYLSSVSHIVLDEIHERNLQSDVLMTVVKDLLNFRSDLKVILMSATLNAEKFSEYFGNCPMIHIPGFTFPVVEYLLEDVIEKIRYVPEQKEHRCQFKRGFMQGHVNRQEKEEKEAIYKERWPDYVRELRRRYSASTVDVIEMMEDDKVDLNLIVALIRYIVLEEEVFKRTPPGVRKIVIATNIAETSITIDDVVYVIDGGKIKETHFDTQNNISTMSAEWVSKANAKQRKGRAGRGCLNAYPSGGGYSALIKETVVERVRLQPLKVINVHGVKFKYCQKVCTEKQVPLYDWFGA

SEQ ID NO: 49715 - protein, 107 aa, Homo sapiens
ITIDDVVYVIDGGKIKETHFDTQNNISTMSAEWVSKANAKQRKGRAGRGCLNAYPSGGGYSALIKETVVERVRLQPLKVINVHGVKFKYCQKVCTEKQVPLYDWFGA

SEQ ID NO: 49716 - protein, 84 aa, Homo sapiens
  misc_feature (1)...(84): Xaa = X or * as defined in Table 2
HRPFPQDRKAGECLLHEYEDLVPIRDTLRLFPGGRYLPRAKHVAPSEPDPGWLVLGXFYCXFCHSPALLSGFCLAVNVYRERSV

SEQ ID NO: 49717 - protein, 933 aa, Homo sapiens
  DOMAIN (222)..(232): DEAH-box subfamily ATP-dependent helicases proteins domain identified by eMATRIX, accession number BL00690A, p-value=1.818e- 13, raw score of 6.87
  misc_feature (1)...(933): Xaa = X or * as defined in Table 2
SARTISYDYYQNWGRDGGPRSSGGGYGGGPAGGHGGNRGSGRGGGGGGGGRGWQGPASRAPERPRNRHVVREKTGAEEQGSWRGKRELLVHMDERREEQIVQVLDSGQAENGXRVRTTDFRFAPEDHGYGTEVSTKNTPCSENKLGHPGKEVDKSRKKNVSESGTDHILTRDSEYLLQENEPDGTLDQKLLEDLQKKKNDLRYIEMQELVNLIDNHQVTVISGETGCGKTTQVTQFILDNYIERGKGSACRIVCTQPRRISAHSSCGKSSCRKGQNLVASGNSTGYQIRLPESVAQGNRVLSYTVPTRNHPSSGSQSDPYLSSVSHIVLDEIHERNLQSDDFKXLLVKDLLNFRSDLKVILMSATLNAEKFSEYFGNCPMIHIPGFTFPVVEYLLEDVIEKIRYVPEQKEHRSQFKRGFMQGHVNRQEKEEKEAIYKERWPDYVRELRRRYSASTVDVIEMMEDDKVDLNLIVALIRYIVLEEEDGAILVFLPGWDNISTLHDLLMSQVMFKSDKFLIIPLHSLMPTVNQTQVFKRTPPGVRKIVIATNIAETSITIDDVVYVIDGGKIKETHFDTQNNISTMSAEWVSKANAKQRKGRAGRVQPGSLLFICINGSXEASLLGWTIQLPEIFEEPFWEGTLFTKXRFLRLGEIAYFLSRXMDPPSNEPVLLSIRHLRSLNALDKQEELTPLGSHLARLPVEPHIGKMILFGALFCCLDPVLTIAASLKFQSPFVIPLGKEKIADARRKELAKDTRSDHLTVVNAFEGWEEARRRGFRYEKDFCWEYFLSSNTLQMLHNMKGQFAEHLLGAGFVSSRNPKDPESNINSDNEKIIKAVICAGLYPKVAKIRLNLGKKRKMVKVYTKTDGLVAVHPKSVNVEQTDFHYNWLIYHLKMRTSSIYLYDCTEVSPLLSLVFWEGGHFHPEGITIRKLLL

SEQ ID NO: 49718 - protein, 703 aa, Homo sapiens
  DOMAIN (516)..(562): DEAD-box subfamily ATP-dependent helicases proteins domain identified by eMATRIX, accession number BL00039D, p-value=6.667e- 37, raw score of 21.67
  DOMAIN (231)..(442): DEAD/DEAH box helicase domain identified by PFam, accession name DEAD, E-value=8.5e-57, PFam score of 182.5
  misc_feature (1)...(703): Xaa = X or * as defined in Table 2
FRKTTRRLRKVKGRTAGCARFRKWLLRQHGLRTLGLICNHTSRMTRCRWSAESDSGDEEEEGPIVLGRRQKALGKNRSADFNPDFVFTEKEGTYDGSWALADVMSPLMKKRAATTLHEKIEKARKRRKTEDKEAKSGKLEKEKEAKEGSEPKEQEDLQENDEEGSEDEASETDYSSADENILTKADTLKVKDRREEEEERTGSRRIFXRCISATMKTSSFQDMNLSRPLLKAITAMGFKQPTPIQKACIPVGLLGKDICACAAPGTGKTPPFALPVLERLIYIPSPGSSLTRVLVLVPTRELGMQVHSVTRQLAQFCNITTCLAVGGLDVKSQEAALRAAPDILIATPGRLIDHLHNCPSFHLSSIEVLILDEADRMLDEYFEEQMKEIIRMCSHHRQTMLFSATMTDEVKDLASVSLKNPVRIFVNSNTDVAPFLRQEVIRNRPNREGDREAIVAALLTRTFTDHVMLFTQTKKQAHRMHILLGLLGVQVGELHGNLSQTQRLEALRRFKDEQIDILVATDVAARGLDIEGVKTVINFTMPNTIKHYVHRVGRTARAGRAGRSVSLVGEDERKMLKEIVKAAKAPVKARILPQDVILKFRDKIEKMEKDVYAVLQLEAEEKEMQQSEAQINTAKRLLEKGKEAVVQEPERSWFQTKEERKKEKIAKALQEFDLALRGKKKRKKFMKDAKKKGEMTAEERFSV

SEQ ID NO: 49719 - protein, 30 aa, Homo sapiens
  misc_feature (1)...(30): Xaa = X or * as defined in Table 2
RQHAHXESSPLPNLTYPGTQILRKAAGTSA

SEQ ID NO: 49720 - protein, 115 aa, Homo sapiens
  DOMAIN (10)..(29): Eukaryotic  RNA-binding region RNP-1 proteins domain identified by eMATRIX, accession number BL00030A, p-value=4.750e- 15, raw score of 14.39
  DOMAIN (10)..(84): RNA recognition motif. domain identified by PFam, accession name rrm, E-value=6e-21, PFam score of 83.0
TAMSSEEGKLFVGGLNFNTDEQALEDHFSSFGPISEVVVVKDRETQRSRGFGFITFTNPEHASVAMRAMNGEVGPPICRGTLSPSAASFILFVFPSVSARGSVAHQAPQCPLTGA

SEQ ID NO: 49721 - protein, 106 aa, Homo sapiens
TSQCFTKQYCCPQVPPPALRRFFPISVDGAYNRVLYRDIPLPRDRQETDAFLLSQLQEAFLPLLLILLSTDPLRVSGWGTVRSFPSHEAIFQTFTWGETLDNTWLS

SEQ ID NO: 49722 - protein, 166 aa, Homo sapiens
  DOMAIN (10)..(29): Eukaryotic  RNA-binding region RNP-1 proteins domain identified by eMATRIX, accession number BL00030A, p-value=4.750e- 15, raw score of 14.39
  DOMAIN (10)..(76): RNA recognition motif. domain identified by PFam, accession name rrm, E-value=5e-14, PFam score of 60.0
  misc_feature (1)...(166): Xaa = X or * as defined in Table 2
TAMSSEEGKLFVGGLNFNTDEQALEDHFSSFGPISEVVVVKDRETQRSRGFGFITFTNPEHASSCQXRSQXTGEVSWNGRQIPLLDHAGKSCSGEPRGRWALGPMGVGSQLILEVVGDQGYGSGRYYDSRPGGYGYGYGRSRDYNGRNQGGYDRYSGGNYRDNYDN

SEQ ID NO: 49723 - protein, 138 aa, Homo sapiens
  DOMAIN (42)..(64): TRANSFORMING PROTEIN P21 RAS SIGNATURE domain identified by eMATRIX, accession number PR00449A, p-value=3.769e-16, raw score of 13.20
  DOMAIN (43)..(138): Ras family domain identified by PFam, accession name ras, E- value=1.4e-13, PFam score of 17.6
GRVGPPRRAGGPRASAAGDPARGGAAPKMSQTAMSETYDFLFKFLVIGNAGTGKSCLLHQFIEKKWSVTRSYYRGAAGALLVYDITSRETYNALTNWLTDARMLASQNIVIILCGNKKDLDADREVTFLEASRFAQEN

SEQ ID NO: 49724 - protein, 174 aa, Homo sapiens
  DOMAIN (112)..(135): TRANSFORMING PROTEIN P21 RAS SIGNATURE domain identified by eMATRIX, accession number PR00449E, p-value=3.368e-17, raw score of 13.50
  DOMAIN (3)..(174): Ras family domain identified by PFam, accession name ras, E- value=2.5e-26, PFam score of 100.9
  misc_feature (1)...(174): Xaa = X or * as defined in Table 2
GHRGAHRPRTLRSVVVRRAHRCSYSGIWDTAGPDRFRSVTRSYHXGRPGALLVYDITARETYNALTNWLTDARMLASQNIVIILCGNKKDLDADREVTFLEASRFAQENELMFLETSALTGENVEEAFVQCARKILNKIESERMGSGIQYGDAALRQLRSPRRAQAPNAQECGC

SEQ ID NO: 49725 - protein, 185 aa, Homo sapiens
  DOMAIN (122)..(166): Synapsins proteins domain identified by eMATRIX, accession number BL00415N, p-value=8.883e-09, raw score of 4.29
CAVHTPPPRAPATPPEPPAARVPHPGPKPRHLRDPSRGSGRATATLKTPAAQARPRATDAPRGPTRAPRQPGPRTVGFGHGRLRHLGSGAASRRVTVHSPAVRRRVSVGKDLGRGTGGGRGPTGPHGNRRSSQRLRPSRTPAPRRRQGPPPSVRPRPRGGRGDGLREARPTPRSRVRTGRPGRGA

SEQ ID NO: 49726 - protein, 161 aa, Homo sapiens
  DOMAIN (128)..(142): TRANSFORMING PROTEIN P21 RAS SIGNATURE domain identified by eMATRIX, accession number PR00449D, p-value=9.526e-13, raw score of 10.79
  DOMAIN (94)..(161): Ras family domain identified by PFam, accession name ras, E- value=0.016, PFam score of -108.2
MGSGLKRGKLSENESLWPPTHLPYLFPGRWQPERVGTLTGFWGVAEMDTRLAVKKRKLQGRDAGGCRAVVTMDSCGDYGFHRAERWRELEEMEKIVPGSGVDEELAENRETYNALTNWLTDARMLASQNIVIILCGNKKDLDADREVTFLEASRFAQENGK

SEQ ID NO: 49727 - protein, 85 aa, Homo sapiens
  misc_feature (1)...(85): Xaa = X or * as defined in Table 2
RKATKMATIWASGTPKQPCPRELLAQERRQTRTRYNQXDQXQERRSRQRIMGVGCLHMLRSEKAPQQRSFAHCTPKSSRPSARLT

SEQ ID NO: 49728 - protein, 148 aa, Homo sapiens
  DOMAIN (2)..(25): TRANSFORMING PROTEIN P21 RAS SIGNATURE domain identified by eMATRIX, accession number PR00449C, p-value=3.160e-15, raw score of 17.27
  DOMAIN (1)..(137): Ras family domain identified by PFam, accession name ras, E- value=1.4e-17, PFam score of 63.4
IINVGGNYVKLQLWDTAGTDRFSSVTRSYYRGAAGALLVYDITSREPYNALTNWLTDARMLASQNIVIILCGNKKDLDADREVNLLRKPSRFAQENELMFLETSALTGGECRRGFCTSVQEKYLTKSNQVSWTQKEMGSGIQYWRWLP

SEQ ID NO: 49729 - protein, 152 aa, Homo sapiens
  misc_feature (1)...(152): Xaa = X or * as defined in Table 2
CHTQTQXQHTPXQPTPIDMAPTSHARMPFHTHFLTQILTLVSRSPDPGPHGGKVPTRIPIPPAQPWGPSTLPSSSFLGPPRPFPSPPVPGPGGENRKPFTSPPXAXGFPGPPSGPXAGGEGPPVVGRGATPSPPTPSPACGPLKCWWHLIKN

SEQ ID NO: 49730 - protein, 116 aa, Homo sapiens
  misc_feature (1)...(116): Xaa = X or * as defined in Table 2
LALHPTRPLIPATDDEVTVTEDKINAPHXKQPVVNVEPFAPGLFAKALANVNIGSLICNVGAGGPCCQPAGGCTQPGGSCPLHCWLLPAXGRRKWEAKKEGFRGSFDXLTWGFGSF

SEQ ID NO: 49731 - protein, 109 aa, Homo sapiens; identical to SEQ ID NO: 42042
  DOMAIN (40)..(65): ALDO-KETO REDUCTASE SIGNATURE domain identified by eMATRIX, accession number PR00069A, p-value=8.364e-29, raw score of 16.01
  DOMAIN (12)..(91): Aldo/keto reductase family domain identified by PFam, accession name aldo_ket_red, E-value=3.7e-46, PFam score of 165.9

SEQ ID NO: 49732 - protein, 394 aa, Homo sapiens
  DOMAIN (245)..(283): Aldo/keto reductase family proteins domain identified by eMATRIX, accession number BL00798E, p-value=1.000e-40, raw score of 20.32
  DOMAIN (7)..(370): Aldo/keto reductase family domain identified by PFam, accession name aldo_ket_red, E-value=1.1e-93, PFam score of 324.6
  misc_feature (1)...(394): Xaa = X or * as defined in Table 2
MASRLLLNNGAKMPILGLGTWKGSILRVGFGSSSREPPPYRGQPLMGGPPVRILGPSGRPKRHNARGRRGKWASQTGGPRAQTGTWSRRQGQVTEAVKVAIDVGYRHIDCAHVYQNENEVGVAIQEKLREQVVKREELFIVSKLWCTYHEERGLVKGACQEDTSSDLKLDLPGPLTLIHWPTGFKPGKEFFPLDESGNVGPSDTHISDTWAAMEKLVDEGLVKAIGISNFNHLQVEMILNKPGLKYKPAVNQIECHPYLTQEKLIQYCQSKGIVVTAYSPLGLSXTGPWPKPEDPSLLEDPRIQGGSQPKHNKTTAQVLIRGSPCKRNLVVIPKSVTPERIAENFKVFDFELSSQGYDPPXLSLPTRNWRVWCPCWSCTSHKDYPLPMKEVLKA

SEQ ID NO: 49733 - protein, 63 aa, Homo sapiens
  misc_feature (1)...(63): Xaa = X or * as defined in Table 2
MAQGSIPWNQNLWDATKAVLRGKFKCRTGSGAEAPGARGREGGDWQRNSXXLSRVYDRVSFPL

SEQ ID NO: 49734 - protein, 76 aa, Homo sapiens
  DOMAIN (31)..(66): Matrix protein (MA) p15. domain identified by eMATRIX, accession number PF01140D, p-value=6.373e-13, raw score of 15.54
  misc_feature (1)...(76): Xaa = X or * as defined in Table 2
CDHLQVSRPRIPATVPVEWKRSEMDSKEEEKEKKEKKEKRRRRXRRRGKEEEEERRRRRKRRRKKRGRKKXIKKRV

SEQ ID NO: 49735 - protein, 171 aa, Homo sapiens
  DOMAIN (84)..(119): Matrix protein (MA) p15. domain identified by eMATRIX, accession number PF01140D, p-value=1.000e-13, raw score of 15.54
  misc_feature (1)...(171): Xaa = X or * as defined in Table 2
MGLYKDLLDTRYLFYLVPGYGLTQIELEVIAKDSAKPVGTPRVGLKLEMGIYLSGHLDKFIFAMPFKIKDILSLKKEEEKERRRRRRRRKEEEDEEEEEEEEEEERRRRRKRRRKKKRKKKIDXKKEEEKEEEEGEEGEKKKKMKKKRKKKKKKKGGGGGKGGERRRGRKK

SEQ ID NO: 49736 - protein, 137 aa, Homo sapiens
  misc_feature (1)...(137): Xaa = X or * as defined in Table 2
PAGSLVCPNQCSSARLFSSFFCSSAVMSASPAVGKRGWAELTGSFLPKPPLKTLGSGREDRXGQVWWLTPVIPALWEAEVGGSLEGQEFETSLGNMVKPLLYWLGSNGWLWKLGRRLWQLLWLQDDWPTRGSHILVL

SEQ ID NO: 49737 - protein, 336 aa, Homo sapiens
  DOMAIN (41)..(139): PH domain identified by PFam, accession name PH, E-value= 0.045, PFam score of 12.5
  misc_feature (1)...(336): Xaa = X or * as defined in Table 2
SRPSWGTHWNEYARRLTLAPSWPLPXGHPVSPSLRVSCLPHYYESVLEKKGPCDRDYKKFWAGLQGLTIYFYNSNRDFQHVEKLNLGAFEKLTDEIPWGSSRDPGTHFSLILRNQEIKFKVETLECREMWKGFILTVVELRVPTDLTLLPGHLYMMSEVLAKEEARRALETPSCFLKVSRLEAQLLLERYPECGNLLLRPSGDGARQRVGHHAADAQRDAPWFRHYKVEAGRGPKYVIRCGTAVLLHLPWTTVVNYFVSHTKKALVPFLLDEDYEKVLGYVEADKENGENVWVAPSAPGPGPSPLHKVPPSRCQPASSQDKLPPLPPLRNPGREIT

SEQ ID NO: 49738 - protein, 471 aa, Homo sapiens
  misc_feature (1)...(471): Xaa = X or * as defined in Table 2
LISAMACARPLISVYSEKGESSGKNVTLPAVFKAPIRPDIVNFGSHPNLRKNNRQPVCWQGNXAGHQTSAESWGYWPRAVGSKFPRVRGGGTHRSGQGCFLETMCRGGRNVLHPTKTLGRRWHRRSSTQPKKRIRPSGSAPGCPQPLPALGHGLKGHLYXGKFPETSFWXVERXKLKGXQEEPREAVFAPLRKLKRPGNDIQKGSMASSAKXRAGQKAKLRKPVARIPAAGAPCIIYNEDNGYSFKAFRKHPWGLLMLNCXGKLEHFXKLAPLVGHVGRFLHLGLESALREVXDDLYGTWRXSHFPLQGVNLPIFSPWHKMINTDSXAESLKSPEIPREPLRAPRKKIHSQSSXRRNPLEKLXEIMLKAXTPFAKAHAAGTPFFGQARNHKLRVDKAAAAAAANLQANSDEKAAVAGKKPVVGKKGKKAAVGVKKQKKPLVGKKAAATKKPAPEKKPAEKKPTTEEKKPAA

SEQ ID NO: 49739 - protein, 237 aa, Homo sapiens
  DOMAIN (13)..(38): Ribosomal protein L13 proteins domain identified by eMATRIX, accession number BL00783A, p-value=1.600e-19, raw score of 14.55
  DOMAIN (12)..(145): Ribosomal protein L13 domain identified by PFam, accession name Ribosomal_L13, E-value=0.00086, PFam score of -10.9
  misc_feature (1)...(237): Xaa = X or * as defined in Table 2
KRLPKMAEVQVLVLDGRGHLLGRLAAIVAKQVLLGRKVVVVRCEGINISANFYRNRLKYLGFSPPSGMNTNPSRRPLTTSGAPSRIFWRTVRGMLPPQNPSGGQGRLLDRLQGVXRASPPPYGQEKSGMVVPAALKVVRLKPTRKFCLIWGRLAPEVGWKYQAVTAPPGGERGKRKAKIHYRKKKQLMRLRKQAREETWRKKIDKYTEVLKTHGLPGLSPIKTVNSSKKKKKKRAAA

SEQ ID NO: 49740 - protein, 217 aa, Homo sapiens
  DOMAIN (23)..(217): Ribosomal L18ae protein family domain identified by PFam, accession name Ribosomal_L18ae, E-value=2.8e-05, PFam score of - 30.8
  misc_feature (1)...(217): Xaa = X or * as defined in Table 2
PTRPRTRGRRTRKSTPMKGLGARYREYKVVGRCLPTPQNATRGPLLPACEIFAPNHVVAKVPAFWXLCILSXKKMKKFFQGKIVYLWGKVFXEGSPLRVERTFGDLGLRLLTPRERAPHNIVTGEYRGPXPTAGGCSTQLLTRDNGVARHRRPEAHFHFRFMEGWEGDRGPCKIPPGGLVKASSNDSKIKVSRWPHRVLAAFRNKARFTTKRPNTFF

SEQ ID NO: 49741 - protein, 140 aa, Homo sapiens
  DOMAIN (108)..(133): Vertebrate galactoside-binding lectin proteins domain identified by eMATRIX, accession number BL00309C, p-value=5.000e- 24, raw score of 18.65
  DOMAIN (75)..(140): Vertebrate galactoside-binding lectin domain identified by PFam, accession name Gal-bind_lectin, E-value=5.4e-37, PFam score of 128.5
  misc_feature (1)...(140): Xaa = X or * as defined in Table 2
EAGRLPGNILLDSIMACGLVASNLNLKPGECLRVRGEVAPDAKSXVLPARCVHGILSDRLVGQWGWSWPRWPHAHPLPPSFVLNLGKDSNNLCLHFNPRFNAHGDANTIVCNSKDGGAWGTEQREAVFPFQPGSVAEVCI

SEQ ID NO: 49742 - protein, 153 aa, Homo sapiens
  misc_feature (1)...(153): Xaa = X or * as defined in Table 2
ETQSWPCGLVASNLNFNTLESCLRFPKPSWLPDAKSFRCXNLGQRPPTTWCLHFQPSASTAHGSARHASLCNSQGTAGHEGGPTQREAVFPFQPGKCCRGVAFTFRTRANLNRSSLPDGITEFQVSPNGFNLEAINYMAADGGLSRSKCVAFD

SEQ ID NO: 49743 - protein, 145 aa, Homo sapiens
  DOMAIN (14)..(30): Anaphylatoxin domain proteins domain identified by eMATRIX, accession number BL01177B, p-value=6.400e-16, raw score of 13.61
KQQCRDTGDEVVCSCFVGYQLLSDGVSCEDVNECITGSHSRAFGESCINTVGSFRCQRISSCATGYELTEDNSCKDTLGSFRCRPKLQCKSGFIQDALGNCIDINECLSISAPCPIGVTCINTEGSYKCQKNVPNCGPLVNHLKE

SEQ ID NO: 49744 - protein, 686 aa, Homo sapiens
  DOMAIN (94)..(140): Vertebrate metallothioneins proteins domain identified by eMATRIX, accession number BL00203, p-value=5.979e-10, raw score of 13.94
  DOMAIN (183)..(571): EGF-like domain identified by PFam, accession name EGF, E- value=9.9e-27, PFam score of 102.2
PPPMERAAPSRRVPLPLLLLGGLALLAAGVDADVLLEACCADGHRMATHQKDCSLPYATESKECRMVQEQCCHSQLEELHCATGISLANEQDRCATPHGDNASLEATFVKRCCHCCLLGRAAQAQGQSCEYSLMVGYQCGQVFRACCVKSQETGDLDVGGLQETDKIIEVEEEQEDPYLNDRCRGGGPCKQQCRDTGDEVVCSCFVGYQLLSDGVSCEDVNECITGSHSCRLGESCINTVGSFRCQRDSSCGTGYELTEDNSCKDIDECESGIHNCLPDFICQNTLGSFRCRPKLQCKSGFIQDALGNCIDINECLSISAPCPIGHTCINTEGSYTCQKNVPNCGRGYHLNEEGTRCVDVDECAPPAEPCGKGHRCVNSPGSFRCECKTGYYFDGISRMCVDVNECQRYPGRLCGHKCENTLGSYLCSCSVGFRLSVDGRSCEDINECSSSPCSQECANVYGSYQCYCRRGYQLSDVDGVTCEDIDECALPTGGHICSYRCINIPGSFQCSCPSSGYRLAPNGRNCQDIDECVTGIHNCSINETCFNIQGAFRCLAFECPENYRRSAATRCERLPCHENRECSKLPLRITYYHLSFPTNIQAPAVVFRMGPSSAVPGDSMQLAITGGNEEGFFTTRKVSPHSGVVALTKPVPEPRDLLLTVKMDLSRHGTVSSFVAKLFIFVSAEL

SEQ ID NO: 49745 - protein, 706 aa, Homo sapiens
  DOMAIN (94)..(140): Vertebrate metallothioneins proteins domain identified by eMATRIX, accession number BL00203, p-value=5.979e-10, raw score of 13.94
  DOMAIN (183)..(526): EGF-like domain identified by PFam, accession name EGF, E- value=1.8e-29, PFam score of 111.3
PPPMERAAPSRRVPLPLLLLGGLALLAAGVDADVLLEACCADGHRMATHQKDCSLPYATESKECRMVQEQCCHSQLEELHCATGISLANEQDRCATPHGDNASLEATFVKRCCHCCLLGRAAQAQGQSCEYSLMVGYQCGQVFRACCVKSQETGDLDVGGLQETDKIIEVEEEQEDPYLNDRCRGGGPCKQQCRDTGDEVVCSCFVGYQLLSDGVSCEDVNECITGSHSCRLGESCINTVGSFRCQRDSSCGTGYELTEDNSCKDIDECESGIHNCLPDFICQNTLGSFRCRPKLQCKSGFIQDALGNCIDINECLSISAPCPIGHTCINTEGSYTCQKNVPNCGRGYHLNEEGTRCVDVDECAPPAEPCGKGHRCVNSPGSFRCECKTGYYFDGISRMCVDVNECQRYPGRLCGHKCENTLGSYLCSCSVGFRLSVDGRSCEDINECSSSPCSQECANVYGSYQCYCRRGYQLSDVDGVTCEDIDECALPTGGHICSYRCINIPGSFQCSCPSSGYRLAPNGRNCQDIDECVTGIHNCSINETCFNIQGAFRCLAFECPENYRRSAATLQQEKTDTVRCIKSCRPNDVTCVFDPVHTISHTVISLPTFREFTRPEEIIFLRAITPPHPASQANIIFDITEGNLRDSFDIIKRYMDGMTVGVVRQVRPIVGPFHAVLKLEMNYVVGGVVSHRNVVNVRIFVSEYWF

SEQ ID NO: 49746 - protein, 65 aa, Homo sapiens
  DOMAIN (17)..(29): Calcium-binding EGF-like domain proteins pattern proteins domain identified by eMATRIX, accession number BL01187A, p-value= 4.789e-11, raw score of 9.98
  misc_feature (1)...(65): Xaa = X or * as defined in Table 2
RDSSCGTGYELTEDNSCKDIDECESGIHNCLPDFICQNTLGSFRCRPKLQCKSGFIQDALGNCIX

SEQ ID NO: 49747 - protein, 638 aa, Homo sapiens
  DOMAIN (94)..(140): Vertebrate metallothioneins proteins domain identified by eMATRIX, accession number BL00203, p-value=5.979e-10, raw score of 13.94
  DOMAIN (39)..(148): Anaphylotoxin-like domain identified by PFam, accession name ANATO, E-value=6.2e-25, PFam score of 96.3
  misc_feature (1)...(638): Xaa = X or * as defined in Table 2
PPPMERAAPSRRVPLPLLLLGGLALLAAGVDADVLLEACCADGHRMATHQKDCSLPYATESKECRMVQEQCCHSQLEELHCATGISLANEQDRCATPHGDNASLEATFVKRCCHCCLLGRAAQAQGQSCEYSLMVGYQCGQVFQACCVKSQETGDLDVGGLQETDKIIEVEEEQEDPYLNDRCRGGGPCKQSCRDTGDEVVCSCFVGYQLLSDGVSCEDVNECITGSHSCRLGESCINTVGSFRCQRNSSCGTGYELTEDNSCKDIDECESGIHNCLPDFICQNTLGSFRCRPKLQCKSGFITRMLXGNLLLDIQWSVLSIQLPRCPIGDXHGINTEGFYNVPEGTCPNCGPLGYHLQRGRGTRCVDVDECAPPCLSPVGKGHRCVELFPGSFPLAECKDGVTIFDGISRDVLFDVQRSCQRLPRGACCGHKCTENTLGSYLCSCSVGFRLSVDGRSCEDINECSSSPCKPGSVANVYGSYQCYCRRGXPASAIVGWEFTCERTFDGVAALPHRGHTFWFLTAGIQTSWGSFPVAACPSSGLTGWAPNGPATCQDIDELCXLGIHNCFHSTEDLVSNIPGAGFRCLGLSSCPENYRRSAATXSXGNSCMRAIGAGWEKEKGKLAGSWKTTGHLSHFLM

SEQ ID NO: 49748 - protein, 78 aa, Homo sapiens; identical to SEQ ID NO: 40856
  misc_feature (1)...(78): Xaa = X or * as defined in Table 2

SEQ ID NO: 49749 - protein, 56 aa, Homo sapiens
  misc_feature (1)...(56): Xaa = X or * as defined in Table 2
VINKRLVCTRLLRRKWSCLQPHRMMXVQAGSRGSQPKYHRHEMGWTGHTDTPPHRL

SEQ ID NO: 49750 - protein, 103 aa, Homo sapiens
  misc_feature (1)...(103): Xaa = X or * as defined in Table 2
NFLPAQPCLSAPPSXSRSLLDNSPLNCKAFHSSSHHLLKLESCSENSPGPLLQPGGTCLGACPGCFSFSPGISAGKPLSKAASPPVCTGSGAETSTTPPSPLR

SEQ ID NO: 49751 - protein, 148 aa, Homo sapiens
MAESLRSPRRSLYKLVGSPALGKRLFRQRCLGEIEKPAGTGSLNRYRQAGSKWAREFSEQLSSSRGDGRRVECFAVSGELSRRLGSVGGADRHGCAGGNSTRKLINPRPCDTWAVIPLRAKLGLHIIPNGVEDNSFPLLKEPCTLQSF

SEQ ID NO: 49752 - protein, 304 aa, Homo sapiens
  misc_feature (1)...(304): Xaa = X or * as defined in Table 2
PAAPQVAGRLGLGCPLHLHVFAVVSAMLPLLRCVPRVLGSSVAGLRAAAPASPFRQLLQPAPRLCTRPFGLLSVRAGSERRPGLLRPRGPCACGSGCGSLHTDGDKAFVDFLSDEIKEERKIQKHKTLLKMSGGWELELNGTEAKLVRKVAGEKIPVPFNINNSIPPTFDGEEETLARARRFEDREPELTSLPKFVVEVIKNDXWQERPLVLDVHYPEDEVGQEDEAESDIFSIREVSFQSTGESEWKDTNYTLNPDSFWTGPLYDHLMGFPXPNRGVDNTFADELVELSTAPRSPPGVPLPFP

SEQ ID NO: 49753 - protein, 113 aa, Homo sapiens
  DOMAIN (42)..(69): Macrophage migration inhibitory factor family proteins domain identified by eMATRIX, accession number BL01158B, p-value=7.395e- 22, raw score of 17.07
  DOMAIN (1)..(112): Macrophage migration inhibitory factor (MIF) domain identified by PFam, accession name MIF, E-value=4.1e-57, PFam score of 203.1
LDTNLPANRVPAGLEKRLCAAAASILGKPADRVNVTVRPGLAMALSGSTEPCAQLSISSIGVVGTARDNRRHGAPFFGFSPRELALGQDRILIRFFPLESWQNGKIRTGMTFL

SEQ ID NO: 49754 - protein, 170 aa, Homo sapiens
  DOMAIN (15)..(60): Macrophage migration inhibitory factor family proteins domain identified by eMATRIX, accession number BL01158A, p-value=7.612e- 10, raw score of 21.81
  DOMAIN (14)..(142): Macrophage migration inhibitory factor (MIF) domain identified by PFam, accession name MIF, E-value=3.6e-09, PFam score of 43.9
  misc_feature (1)...(170): Xaa = X or * as defined in Table 2
SSARAVSVPLPAMPFLELDTNLPANRSARGGWRKRLCAAAASILGKPADRVNVDRYAGGFAIGAXAGSTEPCAQLSISSIRRQWGTAEDNRSHSAHFFXVSSPRELSPGARDRIILFRFFPLESWADWARXGTVIDFFMIWGTEGFQGHLVNLAASFQKRSSWAEVKGLG

SEQ ID NO: 49755 - protein, 116 aa, Homo sapiens
  DOMAIN (46)..(89): Chaperonins TCP-1 proteins domain identified by eMATRIX, accession number BL00750A, p-value=1.000e-32, raw score of 20.07
  DOMAIN (53)..(114): TCP-1/cpn60 chaperonin family domain identified by PFam, accession name cpn60_TCP1, E-value=1.2e-18, PFam score of 72.6
FLPATPRRLWALSIVSFSSAGAAMAAVKTLNPKAEVARAQAALAVNISAARGLQDVLRTNLGPKGTMKMLVSGAGDIKLTKDGNVLLHEMGLHPRIITEGFEAAQEEALQLLEEVT

SEQ ID NO: 49756 - protein, 103 aa, Homo sapiens
  DOMAIN (3)..(102): TCP-1/cpn60 chaperonin family domain identified by PFam, accession name cpn60_TCP1, E-value=1.1e-25, PFam score of 98.6
MKKRVEDAYILTCNVSLEYEKTEVNSGFFYKSAEEREKLVKAERKFIEDRVKKIIELKRKVCGDSDKGFVVINQKGIDPFSLDALSKEGIVALRRAKRRNMES

SEQ ID NO: 49757 - protein, 546 aa, Homo sapiens
  DOMAIN (61)..(78): TAILLESS COMPLEX POLYPEPTIDE 1 (CHAPERONE) SIGNATURE domain identified by eMATRIX, accession number PR00304A, p-value=7.088e- 16, raw score of 9.20
  DOMAIN (59)..(433): TCP-1/cpn60 chaperonin family domain identified by PFam, accession name cpn60_TCP1, E-value=4e-67, PFam score of 236.4
  misc_feature (1)...(546): Xaa = X or * as defined in Table 2
LEDPDSSSRPRRAGSGHSASFPFPPLEQLWRQVKTLNPKAEVARAQAALAVNISAARGLQDVLRTNLGPKGTMKMLVSGAGDIKLTKDGNVLLHRNCKFQHPTASLIAKVSNKPQEXYNLVDGTDFLIVLINWESLLKQADLYISEGLHPRIITEGFEGAKEKALQFLEEVKVSREMDRETLIDVARTSLRTKVHAELADVLTEAVVDSILAIKKQDEPIDLFMISVIMEMKHKSETDTSLIRGLVLDHGARHPDMKKRWRDAYILTCNVSLEYEKTEVNSGFFYKSAEEREKLVKAERKFIEDRVKKIIELKRKVCGDSDKGFVVINQKGIDPFSLDALSKEGIVALRRAKRRNMERLTLACGWGMPLNSFDDLSPDCLGHAGLVYEYTLGEEKFTFIEKCNNPRSVTLLIKGPNKAHTSLRIQRWQXGDGLXGAVKNAIDDGCVVPGAGAVGSGQWAGSPGFKHKPSCXRARAQLGSPKHLLDAFAHYFPKVLCFRNSGFLTFQGNIKLKFKAEHSESGQLVGVDPXTPGEPNWWPARSKAVWG

SEQ ID NO: 49758 - protein, 140 aa, Homo sapiens
  misc_feature (1)...(140): Xaa = X or * as defined in Table 2
EGPVMAPPNPGPATLGGPGPDPDLGRLPLHEVFLHIRVPARPRGAPLHRRGLRGRHAVRAVRQRRREPEDGAAGAVDRAGGAGVLGRGDRESEGPLTDXPREPADRAPLLQPERGRFSHPLPTLTCAPSPIIFPVAERWG

SEQ ID NO: 49759 - protein, 56 aa, Homo sapiens; identical to SEQ ID NO: 38272
  DOMAIN (11)..(29): Immunoglobulins and major histocompatibility complex proteins domain identified by eMATRIX, accession number BL00290B, p-value= 4.000e-21, raw score of 13.17

SEQ ID NO: 49760 - protein, 50 aa, Homo sapiens
  misc_feature (1)...(50): Xaa = X or * as defined in Table 2
LPLHEVFLHIRVPARPRGAPLHRRGLRGRHAVHXPSEPGDPARLLQPERG

SEQ ID NO: 49761 - protein, 116 aa, Homo sapiens
  misc_feature (1)...(116): Xaa = X or * as defined in Table 2
EDGRHGAPNPPPATLGGPGPDPDLGGLPLHEVFLHIRVPARPRGAPLHRRGLRGRHAVRAVRQRRREPKNGAAGAVDRAGGAGVLGPGDTEYEGPLTDXPSEPGDPARLLQPERGR

SEQ ID NO: 49762 - protein, 409 aa, Homo sapiens
  DOMAIN (292)..(310): Immunoglobulins and major histocompatibility complex proteins domain identified by eMATRIX, accession number BL00290B, p-value= 8.105e-11, raw score of 13.17
  DOMAIN (135)..(225): Class I Histocompatibility antigen, domains domain identified by PFam, accession name MHC_I, E-value=3.1e-38, PFam score of 140.5
  misc_feature (1)...(409): Xaa = X or * as defined in Table 2
GSTHASARMAVMAPRTLPPATLGGPGPDPDLGGLPLHEGFLHIRVPARPRGAPLHRRGLRGRHAVRAVRQRRREPEDGAAGARGXEARKGPEXLGRGNTESEGPTHRLDPSEPGDPARLLQPEXGRFFTPFQIMYGCDVGSDGAFSSAGYPQERLTNGKDYIALNEDLRSWTAADMAAQITKRKWETPPMRRRSLRAYLDGTCVEWLRRYLENGKETLQRTDPPKTHMTHHPISXPXRPLXRCWALAFYPCGDHTXPWQRDGEDQTQGHGSLLETRPAGAGTFQKWASMVVPSGQEQRYTCHVQQXRVLPKPLTLKMWEPSSQAHPSPIRGASFAGPWFSLGSLXITGAVGRCWXCXRKEQLRWRRGERXKKEGAYSQGCKASDQCPGASDVSLHSFVKVLRQLALCGD

SEQ ID NO: 49763 - protein, 130 aa, Homo sapiens
  DOMAIN (63)..(90): Insulinase family zinc-binding region proteins. domain identified by eMATRIX, accession number BL00143A, p-value=4.808e- 22, raw score of 20.91
  DOMAIN (45)..(130): Insulinase (Peptidase family M16) domain identified by PFam, accession name Peptidase_M16, E-value=0.0074, PFam score of -10.1
GAQVLLRARRSPALLRTQALRSTATFAQALQFVPETQVSLLDNGLRVASEQSSQPTCTVGVWIDVGSRFETEKNNGAGYFLEHLAFKGTKNRPGCASRREAYVSKRAGPGFVVPPPPQTQHFGSFNLCHR

SEQ ID NO: 49764 - protein, 73 aa, Homo sapiens
LREMQENDASMRDVVFNYLAEWESRIAEVDASVVREICSKYIYDQCPAVAGYGPIEQLPDYNRIRSGMFWLRF

SEQ ID NO: 49765 - protein, 166 aa, Homo sapiens
FSICYAETGLLGAHFVCDRMKIDDMMFVLQGQWMRLCTSATESEVARGKNILRNALVSHLDGTTPVCEDIGRSLLTYGRRIPLAEWESRIAEVDASVVREICSKYIYDQCPAVAGWESRIAEVDASVVREICSKYIYDQCPAVAGYGPIEQLPDYNRIRSGMFWLR

SEQ ID NO: 49766 - protein, 36 aa, Homo sapiens
  misc_feature (1)...(36): Xaa = X or * as defined in Table 2
XEQRIWPGSALEKEVESIEQLPDYNRIRSGMFLVRF

SEQ ID NO: 49767 - protein, 549 aa, Homo sapiens
  DOMAIN (75)..(102): Insulinase family zinc-binding region proteins. domain identified by eMATRIX, accession number BL00143A, p-value=4.808e- 22, raw score of 20.91
  DOMAIN (58)..(216): Insulinase (Peptidase family M16) domain identified by PFam, accession name Peptidase_M16, E-value=2.1e-30, PFam score of 114.5
  misc_feature (1)...(549): Xaa = X or * as defined in Table 2
MAASVVCRAATAGAQVLLRARRSPALLRTPALRSTATFAQALQFVPETQVSLLDNGLRVASEQSSQPTCTVGVWIDVGSRFETEKNNGAGYFLEHLAFKGTKNRPGSALEERRWRAWGAHLNAYSTREHTAYYIKALAKELPKAVELLGDIVQNCSLEDFTDXGRNVDVILREMQENDASMRDVVCNYLHATAFQGTPLAQALEGPSENVRKLSRADLTEYLSTHXQGPSKWCWAAAGREWEHQQLFRTFAQEGTSVGIPWTYAEDAVPTLTPCRFTGSEIRHRDDALPFAHVAIAVEGPGWASPDNVALQVANAIIGHYDCTYGGGVHLSSPLASGAVANKLCQSFQTFSICYAETGLLGAHFVCDRMKIDDMMFVLQGQWMRLCTSATESDVDRGKNILRNALVSHLDGTTPVCEDIGRSLLTYGRRIPLAEWESRIAEVDASVVREICSKYIYDQCPAVAGYGRSLGLPFHLCSRTAAQLTEQPVKAPSSSPQSPGCQGVLAQKTCPSSSLTACQGAFINTLHPSGPIEQLPDYNRIRSGMFWLRF

SEQ ID NO: 49768 - protein, 554 aa, Homo sapiens
  DOMAIN (139)..(154): Insulinase family zinc-binding region proteins. domain identified by eMATRIX, accession number BL00143B, p-value=3.077e- 13, raw score of 14.41
  DOMAIN (77)..(233): Insulinase (Peptidase family M16) domain identified by PFam, accession name Peptidase_M16, E-value=2.4e-40, PFam score of 147.5
  misc_feature (1)...(554): Xaa = X or * as defined in Table 2
AQSTLARRNRADCSWKMAASVVCRAATAGAQVLLRARRSPALLRTPALRSTATFAQALQFVPETQVSLLDNGLRVASEQSSQPTCTVGVWIDVGSRFETEKNDSGAGYFLEHLAFKGTKNPALAVPWEKEVESMGAHLNAYSTREHTAYYIKALSKDLPKAVGALGDIVQNCSLEDSQIEKERDVILREMQENDASMRDVVFNYLHATAFQGTPLAQAVEGPSENVRKLSTADFTRYLSTHYKAPESVLPQTEGVRTEQLLDLARNHRVHIPXTYAEGALPTITPCRFTGSEIRHPXDALPFAHVAIAVEGPGWPAPDNVALQVGNAIIGHYDCTFGGGVHLSSPLGSGACGPTKLCQSFQTLSICYAEDGLCWVHTLFCDRMKIDDMMFVLAQGHWMRLCTSATRSEVARGQKNIPQKMPLGISSXDGNYSLCVEDITPAALLTLWARRNPPGLKWESRIAGGGFQVVVRXDLAPRYIYGPSCPAVAGYWPHXSMLPDYNRIPXPACFWVAFFRAGKPMVKQKGRGGGLWSPPPPQTQHFRLLLTCCHRLTTE

SEQ ID NO: 49769 - protein, 125 aa, Homo sapiens
CKESYKLLLLKEPPHLTREGAGAQSRPKTCSKSPKKSMLESEPESLFPVTPGRCFFPAHAHGSAVQDRCALSWCSHIPLRGPRAPAQHGQLLIVGDKVALVIHNWLLIFPTAPARNRRPGNCGPE

SEQ ID NO: 49770 - protein, 331 aa, Homo sapiens
  misc_feature (1)...(331): Xaa = X or * as defined in Table 2
GPWAANGVVLAFPPCLGSPPAPHLAPQKAVPPKWGISSLCSFHFHIYQVGGVAFCGRIRFLSSTDFKRRAGGSGSLMSQEEKHELSGKIRSQIMDDHARPYLYTMSNCPCWAGALGPQESKCSRGRLLHRAFPSLVTLLLAGQATTGLLSCYQQQGAGWDKLDSHRPRNLAAWEEPCGMEAFPKPSQSLVEAKIAQLATPGLLDCKAACPWGAPCPRGPMQNATKVIGNMTEDHVDAPGSRNAEPPXKVYPPLKGSFPEKNLRHLKNTMETIEWKAFENWMHHWLLFELSKQSLWEQQSPLDAPPKENSLELEDPSSGLGVTKQDLGPVPM

SEQ ID NO: 49771 - protein, 475 aa, Homo sapiens [sequence omitted]

SEQ ID NO: 49772 - protein, 768 aa, Homo sapiens
  DOMAIN (293)..(307): LEUCINE-RICH REPEAT SIGNATURE domain identified by eMATRIX, accession number PR00019A, p-value=8.043e-10, raw score of 11.19
  DOMAIN (220)..(340): Leucine Rich Repeat domain identified by PFam, accession name LRR, E-value=9.3e-15, PFam score of 62.5
  misc_feature (1)...(768): Xaa = X or * as defined in Table 2
MARSEAAAAGPGPGPPGLAARERRGGRGCVRGCERASVRVWSVALRRARRAPARPYVARCRRVRRPARVAIGCGGVSSPAGVSGCARVSPERPPLRLCVWALSRAHGGAVCRAGPGPDSLKRGLTSHPPAFPLHHGSRTLLLGPLSPPPAALPFLLLLWAGHLVASACPGRCICQNVSPTLTMLCAKTGLLFVPPSIDRRVVELRLTDNFRRHFANMTSLVQLTLSRNTIGQVAAGAFVDLRALRALHLDSNRLAGCGGDQLRGLGNLRHLIVGNNQIRRVESAAFDDLLSTVEDLDLSYNNLEALPWEAVGQMVNLNTLTLDHNLIDHIAEGTFVQLQSWARAQAAHPLTVSFGGNPLHCNCELLWLRRLTREDDLETCASPNNLTDRYFWSIPEEESCTRCQRFCGXASLVAAELTSNSVLIRWSTQRPVPGIRMYQVQYNSSVDDSLVYRKYSLSTYMNPTRMIPSTSQTFLVNDLAAGRAYDLCVLAVYDDGATALPATRVVGCVQFTTAGDPAPCRPLRAHFLGGTMIIAIGGVIVASVLVFIVLLMIRYKVYGDGDSRRVKGSRSLPRVSHVCSQTNGAGTGAAAGPGPAGPGPLRGAARGGVPWLPPPSPSRPRPWRPRLASAEPEVVLGRSLGGSATSLCLLPSEETSGEESRAAVGPRRSRSGALEPPTSAPPTLALVPGGAAARPRPQQRYSFDGDYGALFQSHSYPRRARRTKRHRSTPHLDGAGGGAAGEDGDLGLGSARACLAFTSTEWMLESTV

SEQ ID NO: 49773 - protein, 53 aa, Homo sapiens
GRGGAGEEWERTRTQGDQCRWVSPLPALSTCPQSLAHLRVEKGLRTVGLPAFQ

SEQ ID NO: 49774 - protein, 539 aa, Homo sapiens
  DOMAIN (279)..(294): FUNGI-IV METALLOTHIONEIN SIGNATURE domain identified by eMATRIX, accession number PR00874C, p-value=7.625e-09, raw score of 4.37
  misc_feature (1)...(539): Xaa = X or * as defined in Table 2
EHAHDRDLHHAHYVQATLVRASLREAVVGSPTDAWLQQRTARSSASLLLARNRPATSVWLPRAGFIAGTGGRRERRGSEGWEGGGAGGTGAGLSAHSQTSACEGSCGGSAGRGRCLLSAATPPLQPPRPAPPTAGLVQPRQVPTAPPRASAGNEHHQGWSGRLXKSLAAARVGEAPGKLPRPRDFRKQSNGALARASLRVSAQPGTCSSSAAAFPPLGPAPLAAPARSCDESGPRQPDGRGGPVPGQQQRGAESEPCAAATRRPWVNRRRTSRREARTSVACTXCAWCRSRSCACSHSPWSSASSSSAAICSSSPRAXSTSSXRTGGRLRRWRRWSWGPTDPPYAPAATAPTPAHFASPACAPHYQRLGEANLSESIISLDCRPFGKKRPVSPSPSESPHAWQSEESAQTLNSAESGKKRAIRAQNFGRLLLTWNAGRPTVRRPFSTRRWAKLWGQVERAGRGETQRHXSPCDRKSDLLKATQQTHGVSQIRVRVRSPLFSLLPPCPRKGGANKIPLNCKRARFKKGFVFVCLEIQMFE

SEQ ID NO: 49775 - protein, 85 aa, Homo sapiens
  DOMAIN (21)..(65): GTP-binding nuclear protein ran proteins domain identified by eMATRIX, accession number BL01115A, p-value=3.438e-14, raw score of 10.22
  DOMAIN (22)..(85): Ras family domain identified by PFam, accession name ras, E- value=0.00039, PFam score of -89.9
TFWHPCGGIASWRSCPRFKISKVIVVGDLSVGKTCLINRFCKDTFDKNYKATIGVDFEMERFEVLGIPFSLQLWDTAGHERFKCI

SEQ ID NO: 49776 - protein, 197 aa, Homo sapiens
  DOMAIN (72)..(95): TRANSFORMING PROTEIN P21 RAS SIGNATURE domain identified by eMATRIX, accession number PR00449C, p-value=8.920e-15, raw score of 17.27
  DOMAIN (47)..(197): Ras family domain identified by PFam, accession name ras, E- value=2.8e-17, PFam score of 59.7
MNILAPVRRDRVLAELPQCLRKEAALHGHKDFHPRVTCACQEHRTGTVGFCKDTFDKNYKATIGVDFEMERFEVLGIPFSLQLWDTAGQERFKCIASTYYRGAQAIIIVFNLNDVASLEHTKQWLADALKENDPSSVLLFLVGSKKDLSYALMEKDALQVAQEMKAEYWAVSSLTGINSDDSNLYLTASKKKPTCCP

SEQ ID NO: 49777 - protein, 47 aa, Homo sapiens
  DOMAIN (16)..(22): FISH ACETYLCHOLINESTERASE SIGNATURE domain identified by eMATRIX, accession number PR00879A, p-value=1.450e-09, raw score of 6.28
GRRPLCTGQRLPPRVTCACQEHRTGTVGFKISKVIVVGDLSVGKTCL

SEQ ID NO: 49778 - protein, 113 aa, Homo sapiens
DQRGGNWAYECQWEGPCRLTHPLLSTSHGRQWLADALKENDPSSVLLFLVGSKKDLSVSVPVGGLPSLVRECPPLTLAFPQTPAQYALMEKDALHVAQEMNAENWAVSSLTGE

SEQ ID NO: 49779 - protein, 205 aa, Homo sapiens
  misc_feature (1)...(205): Xaa = X or * as defined in Table 2
RSAGLGSAAPAHTDPVWRGRSAPPGRYVMVGEPKPRDDVWSSRPRDIVGTMRPRGLRGPGPHQTGLPAPNWRPKKSPRPRSHLRDAQGPGDFGLAAAPGDCFISVARGGRNVSEDRGLPVRSPWPRSFCSFGIPLGKERFKCIASTYYRGAQAIIIVFNLNDVASLEHTKQWLADALKENDPSRFPEGSEYPGSVCADGERRPPX

SEQ ID NO: 49780 - protein, 424 aa, Homo sapiens
  DOMAIN (102)..(111): Zinc finger C3HC4 type (RING finger), proteins. domain identified by eMATRIX, accession number BL00518, p-value=5.714e-10, raw score of 12.23
  DOMAIN (87)..(127): Zinc finger, C3HC4 type (RING finger) domain identified by PFam, accession name zf-C3HC4, E-value=2.3e-10, PFam score of 37.9
  misc_feature (1)...(424): Xaa = X or * as defined in Table 2
MGAKDGRLLSESSQGLSSCGASLVPFCVSKSRLLMKTPVRLDKETVSTVDSGAPTDLAQLPTVLKQPCCSVMASGQFVNKLQEEVICPICLDILQKPVTIDCGHNFCLKCITQIGETSCGFFKCPLCKTSVRKNAIRFNSLLRNLVEKIQALQASEVQSKRKEATCPRHQEMFHYFCEDDGKFLCFVCRESKDHKSHNVSLIEEAAQNYQGQIQEQIQVLQQKEKETVQVKAQGVHRVDVFTDQVEHEKQRILTEFELLHQVLEEEKNFLLSRIYWLGHEGTEAGKHYVASTEPTVERSQEAHXFPVCLLASYDEISGQGASSQDTKTFDVALSEELHAALTSAHPDLILSQDEIVTLNLASQGGSQKRGNPRRFYRRGFLEVEPLTGFVELHSSGSQCQALIESGSREDLPVCPNKVGVRVDY

SEQ ID NO: 49781 - protein, 52 aa, Homo sapiens
ALRSCWKLCRSMSSAAGFCASRPGLLFLGLLLLPLVVAFASGKPCIPWRPTP

SEQ ID NO: 49782 - protein, 110 aa, Homo sapiens
  misc_feature (1)...(110): Xaa = X or * as defined in Table 2
DPAGSSAASMSSAAGLCALTPPGLLSLGLLLLPLVVAFASAEAEEDGDLQCLCVKTTLPGSVPGHIHQLGGXFKGRDPHCPTCPTXXATVEGMGRKILLGTWQAPLLQGK

SEQ ID NO: 49783 - protein, 141 aa, Homo sapiens; identical to SEQ ID NO: 49165

SEQ ID NO: 49784 - protein, 165 aa, Homo sapiens
  DOMAIN (125)..(164): TS-N domain identified by PFam, accession name TS-N, E-value= 3.9e-14, PFam score of 60.4
  misc_feature (1)...(165): Xaa = X or * as defined in Table 2
ISQQLLVVLAGINLRSWLPQKLCKYLKQDVLTALDLSVEVPEFCPFVDHLVVALEEEGPALXGHPASDTYIVFGEAKIEDLSQQAQLAAAEKFKVQGEAVSNIQENTQTPTVQEESEEEEVDETGVEVKDIELVMSQANVSRAKAVRALKNNSNDIVNAIMELTM

SEQ ID NO: 49785 - protein, 305 aa, Homo sapiens
  misc_feature (1)...(305): Xaa = X or * as defined in Table 2
GELLALLGHRVPTRPWASGQKGVCGWCPGKSTLQGLRCGPTIRACRDGSSCSVEGGRGVRLVLGTASQDPEKEMPGEATEPVPATEQGVAASPRAETGSGTESDSDESVPELEEQDSHPGQPHNKAQAGRQQSEIDEDPVSKAKQSRNXKEGPGRAMSQTGVFGQVTGVTKEFTIRKSKNILLCHPPKPDVYQGAPASRYFTIVFGGSPRSEDLSPSKHNLASCLRNSKFQGEAVSNIQENTQTPTVQEESEEEEVDETGVEVKDIELVMSQANVSRAKAVPSPEERTSNDIVNAIMVSVQAFVP

SEQ ID NO: 49786 - protein, 87 aa, Homo sapiens
  misc_feature (1)...(87): Xaa = X or * as defined in Table 2
MWGHFHSHPGTGQARAYTDTSGSPIPLIMHVNRGRHSEIPVLERNLLHFRMDASTXNLGMSSLMEAILKNQFRHVSLAVSFAFSGEK

SEQ ID NO: 49787 - protein, 24 aa, Homo sapiens
PEFHRNISHLEAAPGDPVGQPQRG

SEQ ID NO: 49788 - protein, 73 aa, Homo sapiens
  DOMAIN (50)..(71): ANDROGEN RECEPTOR SIGNATURE domain identified by eMATRIX, accession number PR00521E, p-value=8.318e-09, raw score of 8.53
TQPGRQTSQNSTARHCFLVSYTFPSSRSAEPRGHGRRCTGRSSPWQAGTRGGKMGAPLLGPPAGSGPYPHESV

SEQ ID NO: 49789 - protein, 301 aa, Homo sapiens
  DOMAIN (133)..(146): Polyomavirus coat protein domain identified by eMATRIX, accession number PF00761G, p-value=4.185e-09, raw score of 5.65
  misc_feature (1)...(301): Xaa = X or * as defined in Table 2
GESRGWERRKCVRPLSSYATHLSVCDCHIGNVREGADPAGGAGXLXGARQQQTHTHKPAKATQRGEDREEKKRETKREERLGQQENERDERGRREKEPRNRGTKRREAEKGRRRESEGKREEKGEEERQERQQKRAREKRRGRGARRRGREKKKTQRPRTQAQRPPLKKIKDYTHHTTQTPTQQHHTHTTKHKQPHTNNTTVFLFFFLLAKEHRRAARKQHEPERGRGGGSKAGAKIKHTSIAAAADRRHDRPTQRDTRRKEGRRAQSGKHGRTAHKTEAGGGIPVHSTSRVQVILLLQPP

SEQ ID NO: 49790 - protein, 110 aa, Homo sapiens
  DOMAIN (36)..(82): Ribosomal protein L2 proteins domain identified by eMATRIX, accession number BL00467A, p-value=4.600e-32, raw score of 28.90
  DOMAIN (20)..(110): Ribosomal Proteins L2 domain identified by PFam, accession name Ribosomal_L2, E-value=3.9e-45, PFam score of 161.9
EDAGPVAMGRVIRGQRKGAGSVFRAHVKHRKGAARLRAVDFAERHGYIKGIVKDIIHDPGRGAPLAKVVFRDPYRFKKRTELFIAAEGIHTGQFVYCGKKAQLNIGNVLP

SEQ ID NO: 49791 - protein, 27 aa, Homo sapiens
  DOMAIN (1)..(23): Ribosomal Proteins L2 domain identified by PFam, accession name Ribosomal_L2, E-value=2.7e-08, PFam score of 32.7
EGTIVCCLEEKPGDRGKLARASGRWPN

SEQ ID NO: 49792 - protein, 135 aa, Homo sapiens
  DOMAIN (22)..(68): Ribosomal protein L2 proteins domain identified by eMATRIX, accession number BL00467A, p-value=4.000e-26, raw score of 28.90
  DOMAIN (8)..(116): Ribosomal Proteins L2 domain identified by PFam, accession name Ribosomal_L2, E-value=7.5e-41, PFam score of 146.9
  misc_feature (1)...(135): Xaa = X or * as defined in Table 2
NRRKGAGPVFQRATXKHRVXRAGLRAVDFAERHGYIKGIVKDIIHNPRRGAPLAKVVFRDPYRFKKRTELFIAAEGIHTGQFVYCGKKAQLNIGNVLPVGTMPEGTIVCCLEEPRLCRRKRTSAEGLNKVCVYAT

SEQ ID NO: 49793 - protein, 144 aa, Homo sapiens
  DOMAIN (34)..(80): Ribosomal protein L2 proteins domain identified by eMATRIX, accession number BL00467A, p-value=4.600e-32, raw score of 28.90
  DOMAIN (18)..(119): Ribosomal Proteins L2 domain identified by PFam, accession name Ribosomal_L2, E-value=5.9e-53, PFam score of 189.3
TGPVAMGRVIRGQRKGAGSVFRAHVKHRKGAARLRAVDFAERHGYIKGIVKDIIHDPGRGAPLAKVVFRDPYRFKKRTELFIAAEGIHTGQFVYCGKKAQLNIGNVLPVGTMPEGTIVCHRYLQEGYLLSQQSCGWCGGWRWPN

SEQ ID NO: 49794 - protein, 104 aa, Homo sapiens
  DOMAIN (58)..(91): Ribosomal protein L2 proteins domain identified by eMATRIX, accession number BL00467B, p-value=3.634e-23, raw score of 19.54
  DOMAIN (49)..(94): Ribosomal Proteins L2 domain identified by PFam, accession name Ribosomal_L2, E-value=5.9e-20, PFam score of 73.6
GKEELLATSTGCGHESCGASFWRWQPPAHRQALHHPQRCPCWPQSGSHCGKKAQLNIGNVLPVGTMPEGTIVCCLEEKPGDRGKLGPASGNYATRIFHVDAGGN

SEQ ID NO: 49795 - protein, 66 aa, Homo sapiens
ILWSILLEVATTNTSPSPAPSAEMPLLAAKWVSLLPAGLDVSGEPRLCRRKRTSAEGLNKVCVYAT

SEQ ID NO: 49796 - protein, 84 aa, Homo sapiens
  DOMAIN (26)..(59): Ribosomal protein L2 proteins domain identified by eMATRIX, accession number BL00467B, p-value=4.414e-28, raw score of 19.54
  DOMAIN (21)..(84): Ribosomal Proteins L2 domain identified by PFam, accession name Ribosomal_L2, E-value=9.1e-34, PFam score of 122.0
SEGVRIVSYCADGLMLLPLAAQLNIGNVLPVGTMPEGTIVCCLEEKPGDRGKLARASGNYATVISHNPETKKTRVKLPSGSKKV

SEQ ID NO: 49797 - protein, 178 aa, Homo sapiens
AVTLTEKVCSFTPRRSAASLLKPGRPRTHRRERTTPDALPLRTVILTTKVCSFTPSLRAVTLTTKVCSFTPRGSAASFLKSARPRTHQFGPAAAAEDPDSTGCRGSSGGAAERPGSGGWLTRVARAGMRDCGGAARAQPAGESAGNGRWAARAKKMAEGPALRSPWSWPSLGGGSRPG

SEQ ID NO: 49798 - protein, 155 aa, Homo sapiens
  DOMAIN (43)..(89): Ribosomal protein L2 proteins domain identified by eMATRIX, accession number BL00467A, p-value=4.600e-32, raw score of 28.90
  DOMAIN (27)..(149): Ribosomal Proteins L2 domain identified by PFam, accession name Ribosomal_L2, E-value=1.9e-68, PFam score of 240.8
EDAGAGARGEGPVAMGRVIRGQRKGAGSVFRAHVKHRKGAARLRAVDFAERHGYIKGIVKDIIHDPGRGAPLAKVVFRDPYRFKKRTELFIAAEGIHTGQFVYCGKKAQLNIGNVLPVGTMPEGTIVCCLEEKPGDRGKLARASGNYATRYLPQP

SEQ ID NO: 49799 - protein, 212 aa, Homo sapiens
  misc_feature (1)...(212): Xaa = X or * as defined in Table 2
GFGTQGERRRQCRLRVTQPLGASSATQKTPALPETPVKAEQSCTLLPSPRTPGHLQPRLLDPSPWAVLIRGQRKGAGSVVRRATLRHGKGAVRRLLRRWISPERHGYIKGIVKDIIHRPRSRRAPPLRQRWFFRDSYRFXERTELFIAARGAFHTGPSFVYCRQERPSFNIGQWCSPVGHHCLEGYNSCCLPWKEETLETCGKAGPGAFKGN

SEQ ID NO: 49800 - protein, 271 aa, Homo sapiens
MGSVTCEVEMLWTYISWYTVMDECVDDLAYVECQRLSGAAKNQKSIQEFFNKEHNVFSFRLEPPPGKRECRVGQYVVDLTSFEQLALPVLRNASPKCSEHEEDEEYWALRLTGLTVSQEVLFQSQDSLENPMATIQALFSRVTMWNLLLFGEGLQFCCLTSERHSLFTFMTFHTCCPRWADCSSGPGQRVCVIDEIGKMELFSQLFIQAVRQTLSTPGTIILGTIPVPKGKPLALVEEIRNRKDVKVFNVTKENRNHLLPDIVTCVQSSRK

SEQ ID NO: 49801 - protein, 51 aa, Homo sapiens
SLFSHFFPQVTKENRNHLLPDIVTCVQSSRNVNDTVHSLPSREGVPSSRGA

SEQ ID NO: 49802 - protein, 201 aa, Homo sapiens
  DOMAIN (13)..(29): CBXX/CFQX SUPERFAMILY SIGNATURE domain identified by eMATRIX, accession number PR00819B, p-value=7.158e-11, raw score of 10.83
  misc_feature (1)...(201): Xaa = X or * as defined in Table 2
PQPLPPPTSMARHVFLTGPPGVGKTTLIHKASEVLKSSGVPVDGFYTEEVRQGGRRIGFDVVTVVRHPGGLLSRVGLEPPPRENVNAELGSYVVDLTSFWSSWALTRLEGMXADCQQWAQGQRVCVIDEELGKMEALSVKFSFKAVRQTLSYPRDIXSLVHKSQVPKGKPLALVEEIRNRKDVKVFNVTQENRNHLLARYS

SEQ ID NO: 49803 - protein, 107 aa, Homo sapiens
  misc_feature (1)...(107): Xaa = X or * as defined in Table 2
MPRIEGDMIVCARNAHRTAKIWCEGWPDKLCCSILYWPAAGPAEWRRCIRKLMLPYERIQSMKRSPKKEVXKKXWTVPKCPLLRRRIGVAPKERQXSSELRSGLLRA

SEQ ID NO: 49804 - protein, 149 aa, Homo sapiens
  DOMAIN (90)..(111): RIBOSOMAL PROTEIN L5 SIGNATURE domain identified by eMATRIX, accession number PR00058C, p-value=2.286e-27, raw score of 7.38
  DOMAIN (32)..(148): Ribosomal L18p/L5e family domain identified by PFam, accession name Ribosomal_L18p, E-value=1.8e-35, PFam score of 131.2
RSLFRRMGFVKVVKNKAYFKRYQVKFRRRREGKTDYYARKRLVIQDKNKYTTPKYRMIVRVTNRDIICQIAYARIEGDMIVCAAYALELPKYGVKVGLTNYAAAYCTGLLLARRLLNRFGMAKIYKGQVEVSANECNNEIVHGQPRAIS

SEQ ID NO: 49805 - protein, 775 aa, Homo sapiens
MGPKCLQNYMALLYWKKMKMLTKKQFSQYIKNRGTRLEGRVEEIQVSRHLLPGGKCDEASPHTPCFVEEAERSGPGPREPLGCTCPSRGCTLVLEATEGPRALPVPIMDAGPMNPEEADPLCGQWAFFRNVSALPGLCTGAHTCSRGWGCVCLCLLSREQRAGSAKTVLPALNHGEALAVWSRTGERGATDHGLGDLEEETDVTGGHHFVYGWPGKVPHLPAHSRANWGVCMKLAAGNSVFLMADGALGIKPDDPPDTRSCRGSGDTAAELRAQMTPSQPSSAVPVLRAPSPSLRLRVTPGPGFRFSGVISDSAECRCAGRRSAARGPGTVLGESRGGSTSSRDEHRGRTQPSVAMAGAAGVRLWDRPGPHEYWGAQVWGTVSGCGDRWSPRHRFVTQGTDIQPEGQEQGSESAADGGRFKPGHLRERNPQEPGSPNTQRRPALKRGCRLNKQEESQLRNQRIYTGLGVTGGLEMIDSIQEDVPGFQANAALFSTKDVSTCGCPCHRPRSGHLGLLGPTCLGFLFPGPDAPLNLPRTRVLCWGWSGAGEKEPGGRAWQWEASQSSVAPPLERSPPLSCPEMLLQTHVFLPKGPGSPAREPRVSTIHREPFQSSRCAEDGDSGMHQVCSTSSSEGGNQRLLGGGRNENIFMGPQSILDAADALCPVGSRVWLYRCVADMQELLRTEQCALCLQMRERQAGYLPLGVPDSHQPLIWPVSEFWAFEKGVLSTMPRKSQAASPSSPIQQELSDACPSSPIQQELSDACPSPPIQQKFSD

SEQ ID NO: 49806 - protein, 131 aa, Homo sapiens
  DOMAIN (65)..(86): RIBOSOMAL PROTEIN L5 SIGNATURE domain identified by eMATRIX, accession number PR00058C, p-value=2.286e-27, raw score of 7.38
  DOMAIN (27)..(131): Ribosomal L18p/L5e family domain identified by PFam, accession name Ribosomal_L18p, E-value=2.2e-27, PFam score of 104.4
RMGFVKVVKNKAYFKRYQVKFRRRREGKTDYHARKRLVIQDKNKYNTPKYRMVVRVTTAYAHELPKYGVKVGLTNYAAAYCTGLLLARRLLNRFGMDKIYEGQVEVTGDEYNVESIDGQPGAFTCYLDAGL

SEQ ID NO: 49807 - protein, 149 aa, Homo sapiens; identical to SEQ ID NO: 49804
  DOMAIN (90)..(111): RIBOSOMAL PROTEIN L5 SIGNATURE domain identified by eMATRIX, accession number PR00058C, p-value=2.286e-27, raw score of 7.38
  DOMAIN (32)..(148): Ribosomal L18p/L5e family domain identified by PFam, accession name Ribosomal_L18p, E-value=1.8e-35, PFam score of 131.2

SEQ ID NO: 49808 - protein, 377 aa, Homo sapiens
  DOMAIN (78)..(98): RIBOSOMAL PROTEIN L5 SIGNATURE domain identified by eMATRIX, accession number PR00058B, p-value=7.167e-22, raw score of 8.75
  DOMAIN (64)..(231): Ribosomal L18p/L5e family domain identified by PFam, accession name Ribosomal_L18p, E-value=0.015, PFam score of -25.0
  misc_feature (1)...(377): Xaa = X or * as defined in Table 2
GPPLHCTRAAGIRHEAPLGLAGLCRAADAGLCSAGWGFVKVVKNKAYFKRYQVKFXKTPERVKRDYYARKRLVIQDKNKYNTPKYRMIVRVTNRDINLSRLLYAPVXRGDMDSLAQRXLHTELAKILVVEGLALTNLLPAALFVPGPACLAPQAFLQXVLAMDKDLLEGPSWSXLGDEYNVESIDGQPGAFTCYLDADLARTTTGNKVFGAPEGAVDGGLSNPHSSKRFLGYVYPLHSTQTDSPGFMDSEKQRNFNARSTSGKHIMGQNCLQDYIALLXWERKMKDAYKKQFSQYIKNSVTPDMMEEMYKKAHAAIRENPVLWKRRPKERSLKRRGWNRSQNVPLLRKKDRVAQRKASFLQSSRSGLLESLTPAIFP

SEQ ID NO: 49809 - protein, 324 aa, Homo sapiens
  DOMAIN (92)..(295): Ribosomal protein L4/L1 family domain identified by PFam, accession name Ribosomal_L4, E-value=0.022, PFam score of -60.4
  misc_feature (1)...(324): Xaa = X or * as defined in Table 2
LTSRGVGSCAVMLLLVRAGARAWLRPTGSQGLSSLAEEAARATENPEQVASEGLPEPVLRKVELPVPTHRRPVHAWIESLRGFEHERVCLVDLHPDVFANAPRLDILHQDAMLQKNFXRISYAKTKTRAEVRGGGGKPLAAERHWAGPAWQHPLSALARRRCCPWPPGPTSYYYMLPMKVRALGLKVALTVKLAQDDLHIMDSLXLPTGDPQLPXPELAHYRRWGDSVLLVDLTHEEMPQSIREATSRLKTFNLIPAVGLNVHSMLKHQTLVLTLPTVAFLEDKLLWQDSRLQTPLYPFSLPYSDFPRPLPHATQGPAATPYHC

SEQ ID NO: 49810 - protein, 91 aa, Homo sapiens
  DOMAIN (27)..(82): Ribosomal protein S27e proteins domain identified by eMATRIX, accession number BL01168, p-value=1.000e-40, raw score of 15.74
  DOMAIN (35)..(89): Ribosomal protein S27 domain identified by PFam, accession name Ribosomal_S27e, E-value=9e-38, PFam score of 138.9
TTYAHENMPLAKDLLHPSSEEEKRKHKKKRLVQSPNSYFMDVKCPGCYKITTVFSHAQTVVLCVGCSTVLCQPTGGKARLTEGCSFRRKQH

SEQ ID NO: 49811 - protein, 109 aa, Homo sapiens
DGGPAAHTPGAARGELSPVGDSGGYFRPSHLRCWILNLCISVPLSSAKDLLHPSSEEERRNPMKNRLVQSPNSYFMDVKCPGEETVCCIGESTGPQQLENVVVLAVSYP

SEQ ID NO: 49812 - protein, 141 aa, Homo sapiens
  DOMAIN (59)..(114): Ribosomal protein S27e proteins domain identified by eMATRIX, accession number BL01168, p-value=6.324e-32, raw score of 15.74
  DOMAIN (70)..(130): Ribosomal protein S27 domain identified by PFam, accession name Ribosomal_S27e, E-value=8.8e-15, PFam score of 62.5
  misc_feature (1)...(141): Xaa = X or * as defined in Table 2
DINSRDRSGPRATRIDGSGEGDKMAAQLRRHQGRRGASSPRFAKDLLHPSPEEEKRKHKKKRLVQSPNSYFMGVKCPGCFKFTTVFXAMAQTVVLCVGCAAPLFLCQPTGEKARLTEGCSFRRKHALKATLSQDEWETILQ

SEQ ID NO: 49813 - protein, 183 aa, Homo sapiens
  DOMAIN (39)..(91): Histone H3 proteins domain identified by eMATRIX, accession number BL00322A, p-value=1.365e-16, raw score of 9.23
  misc_feature (1)...(183): Xaa = X or * as defined in Table 2
GGRCTMARTKADWPANRTGGKAPKEANWLTKSPLRKSAALYLEGSKKPHRYRPGTVAPPXNLDGYQKSTELLIRKLPFQRRLVREIAQGLLKQDSRFQSAAIGCFAGRQVRAYLVWPFLKDTNLCAIHAKRVTIYAKKTFQLSTPAYRGEPCFKDPLMDGETFHSQKKKKKISLLPVIGSSER

SEQ ID NO: 49814 - protein, 137 aa, Homo sapiens
  misc_feature (1)...(137): Xaa = X or * as defined in Table 2
DGHIAGGPCSXGWPRDPAPKSQPTMSSGSEPEKLPPAPRPQHYCSPAEVSGPRFAVGIKALNQQAFTERRLHTSLCPVPAALTVPSPESLPQPQIFPGLAPATHTLYSKAWAGATVSRPGAILGAGLYWGLVRETAS

SEQ ID NO: 49815 - protein, 616 aa, Homo sapiens
  DOMAIN (88)..(108): Calponin family repeat proteins domain identified by eMATRIX, accession number BL01052D, p-value=3.106e-20, raw score of 10.26
  DOMAIN (129)..(240): Trypsin domain identified by PFam, accession name trypsin, E- value=4.6e-28, PFam score of 91.0
TELQQLGQKTADGSPGLKRALIFALNFHSSPPGKDMAAVQRTLMALGSVAVTKDDGCYRGEPSWFHRKAQQNRRGFSEEQLRQGQNVIGLQMGSNKGASQAGMTGLSDPTPWTAHLGMYVQGNAKFVSPVRRIVVHEYYNSQTFDYDIALLQLSIAWPETLKQLIQPICIPPTGQRVRSGEKCWVTGWGRRHEADNKGSLVLQQAEVELIDQTLCVSTYGIITSRMLCAGIMSGKRDACKKRKLGTERPGTQAAPKRRWSASAGAGKGIAGSALNKSEKQPSALEPTPARPQVLYPAGSREWPPLTVAPPVRSGPLPPPEVRDAPPSGWSVRRGGRSTRRRCGLPRSRSDFPCRHMDLAQPSQPVDELELSVLERQPEENTPLNGADKVFPSLDEEVPPAEDADLLDVESKHFEDLEFQQLEHESRLDEEKENLTQQLLREVAEYQRNIVSRKEKISALKKQANHIVQQAQREQDHFVKEKNNLIMMLQREKENLCNLEKKYSSLSGGKGFPVNPNTLKEANKESPWSSCNKNVVGRCKLWMIITSIFLGVITVIIIGLCLAAAWLRGRSNRMVGGRRMTSVNNWLSLRNLAACLSVLYQLMLTRSHLKEDSAPLH

SEQ ID NO: 49816 - protein, 309 aa, Homo sapiens
  DOMAIN (82)..(114): Calponin family repeat proteins domain identified by eMATRIX, accession number BL01052A, p-value=1.529e-32, raw score of 16.12
  DOMAIN (265)..(292): Calponin family domain identified by PFam, accession name calponin, E-value=3.1e-05, PFam score of 21.9
  misc_feature (1)...(309): Xaa = X or * as defined in Table 2
QGGRNVRHPSPLLAWGSDLIVKPHWLHWLLDLNHARLSALFAAAGARLPSHIPAPSAGSRRLLLLLLGGCRACLLFFPEMANRGPSYGLSREVQEKIEQKYDADLENKLVDWIILQCAEDIEHPPPGRAHFQKWLMDGRVLCKLINRLYPPGTRSPYPRFSESKDGFLGRWEQISQFLKAAETYGVRTTDIFSRRWFLWEGKDMAACAEGPXLALGSVAVTKDDGCYRGEPSWFHRKAQQNRRGFSEEQLRQGQNVIGLQMGSNKGASPGGPXTGYRECPRQIHVRTRHPAPWLERTNVSTPWSFTKKK

SEQ ID NO: 49817 - protein, 837 aa, Homo sapiens
  DOMAIN (717)..(732): WILM'S TUMOUR PROTEIN SIGNATURE domain identified by eMATRIX, accession number PR00049D, p-value=9.622e-11, raw score of 0.00
  DOMAIN (299)..(830): Phosphate transporter family domain identified by PFam, accession name PHO4, E-value=0.045, PFam score of 8.2
  misc_feature (1)...(837): Xaa = X or * as defined in Table 2
AAGEWPQRPRAAVAAAGAAARQRLPGSRQVAAGAPQPAGGGDPSQRPPGAEILIKVQVYVSGELVPLARASVDVFGNRTLLAAGTTDSEGVATLPLSYRLGTWVLVTAARPGFLTNSVPWRVDKLPLYASVSLYLLPERPATLILYEDLVHILLGSPGARSQPLVQFQRRAARLPVSSTYSQLWASLTPASTQQEMRAFPCLPGHXGSSSGNGSWLELMPLTAVSVHLLTGNGTEVPLSGPIHLSLPVPSETRALTVGTSIPAWRFDPKSGLWVRNGTGVIRKEGRQLYWTFVSPQLGYWVAAMASPTAGLVTITSGIQDIGTYHTIFLLTILAALALLVLILLCLLIYYCRRRCLKPRQQHRKLQLSGPSDGNKRDQATSMSQLHLICGGPLEPAPSGDPEAPPPGPLHSAFSSSRDLASSRDDFFRTKPRSASRPAAEPSGARGGESAGLKGARSAEGPGGLEPGLEEHRRGPSGAAAFLHEPPSPPPPFDHYLGHKGAAEGKTPDFLLSQSVDQLARPPSLGQAGQLIFCGSIDHLKDNVYRNVMPTLVIPAHYVRLGGEAGAAGVGDEPAPPEGTAPGPARAFPQPDPQRPQMPGHSGPGGEGGGGGGEGWGAGRAAPVSGSVTIPVLFNESTMAQLNGELQALTEKKLLELGVKPHPRAWFVSLDGRSNSQVRHSYIDLQAGGGARSTDASLDSGVDVHEARPARRRPAREERERAPPAAPPPPPAPPRLALSEDTEPSSSESRTGLCSPEDNSLTPLLDEVAAPEGRAATVPRGRGRSRGDSSRSSASELRRDSLTSPEDELGAEVGDEAGDKKSPWQRREERPLMVFNVK

SEQ ID NO: 49818 - protein, 306 aa, Homo sapiens
  misc_feature (1)...(306): Xaa = X or * as defined in Table 2
LESGSHIYAFSHESLLLHVASASVXTSFSDFATSVCHSPLHCQLHHALIPHGKGECSSVSGIVATGFGATGFLGRCVVNHLGRVGSQIPQAIAQVSKEAEVGKFIHVAHLNVNIKSSSRYLRKKAVGEKAVRDTFPEAIIVKLLDIFGREDRFLNYFANMCWFGAIPLVSLGWKAVKQPVYVVDVSKGIVNAVKDPDANGKTFAFVGPNRYLLFDLVKYIFAVAHSKGWVARDFEISPFESWTTRDKVERIHITDMTLSHLPSLEDLGIQATPLELKAIEVLRLHHTYCWLSAEIEDVKLAKTVNI

SEQ ID NO: 49819 - protein, 119 aa, Homo sapiens
  misc_feature (1)...(119): Xaa = X or * as defined in Table 2
KLSSEFFLTHSINTAIRNGNLFVNRVTEVTRSGGNELGSFCLLAIKFTLLSFLGTGTRRLLPALRPRRLQQRGSHGLAGRLFTLWILHAGCHARGELLEPDTCXLSLCRARKPRLSTLK

SEQ ID NO: 49820 - protein, 168 aa, Homo sapiens; identical to SEQ ID NO: 42518
  DOMAIN (10)..(53): Ribosomal protein L10e proteins domain identified by eMATRIX, accession number BL01257A, p-value=1.000e-40, raw score of 11.15
  DOMAIN (9)..(130): Ribosomal L10 domain identified by PFam, accession name Ribosomal_L10e, E-value=4.3e-71, PFam score of 249.6

SEQ ID NO: 49821 - protein, 296 aa, Homo sapiens
  DOMAIN (185)..(225): Ribosomal protein L10e proteins domain identified by eMATRIX, accession number BL01257D, p-value=8.020e-26, raw score of 18.80
  DOMAIN (40)..(235): Ribosomal L10 domain identified by PFam, accession name Ribosomal_L10e, E-value=4e-48, PFam score of 173.3
  misc_feature (1)...(296): Xaa = X or * as defined in Table 2
AQLSSLAVPLLVLTPFRSVLVFRSDSLFFVAATEDPGVAMGRRPARCYRYCKTKPYPKSRFCRGCPLMPRIRIFDLGRKKGKKWNEFPLLCPHMVSDEYEQLSSESPGRLPRICPNKYMVKSCGKDGFHISRVRLHPFHVIRIHKMLSCAGADKAPKQACRGAFWKSPKGNLLARGSQLAQVIMSIRTKLQNKEHVIXGPAARPSFKFPGRQKIHISKKWGFTKFQCXWNLKDMVAEKRVHPHMACGGQSTSPSRGPLDKWRALPLHEGLPNVAAHPLNTPPIKFLLPWSKKKKKK

SEQ ID NO: 49822 - protein, 41 aa, Homo sapiens
MRFCMLFTLLPLRVFLGTIQAPHFALLWLKGQTFASACPGV

SEQ ID NO: 49823 - protein, 427 aa, Homo sapiens
  DOMAIN (306)..(321): WILM'S TUMOUR PROTEIN SIGNATURE domain identified by eMATRIX, accession number PR00049D, p-value=6.186e-09, raw score of 0.00
  misc_feature (1)...(427): Xaa = X or * as defined in Table 2
EGLHLFCDLLDGLPGVQVAGGFDSFSSILASFTYWHDFPNSTMLLSTFRDINLGMNIIKKSAVCFSRLGSETWEMPANLRPSEGGARTRTELSRPQTPSRAHLAWRGRGGLGAVRPRRLSRRRSLSXKPRSLXAEAPAGAPVRRCRPAAPPPPRPSRCGPSTPPPPPSPGAPRRRRPPCSEHNKLSPPPPSSLCLRPAPSPPRPAPRRSPSRRRRRRRHPRPADRREPLASATRVRPLPPPPPPRXPPSSSCPRRGGRRFLAPWLARPAGAPRRAPCSRAARSRRAGASGARVGDPAGAGRGWRRRAAGRPXAPERRPPPPLPAVCEVSGGPLRASFADSVPGVRRRRPPGLGTPLSSSGVXPRNERGVETTTSWGGGSEGAPGSGEGGNLFPAPQVIVARSGEGTVVPRFPVCQLRDSAVLLCLFD

SEQ ID NO: 49824 - protein, 26 aa, Homo sapiens
IVPVRTECRCFITLNKCIYCPFQKKK

SEQ ID NO: 49825 - protein, 366 aa, Homo sapiens
  misc_feature (1)...(366): Xaa = X or * as defined in Table 2
QGSGRTMMRMLVPASVGLLETGPPGDPSLSHPLSGDVTVLPEDQSTVQKLASDHKDIHSSVSRVGKAIDRNFDSEICGVVSDAVWDAREQQQQILQMAIVEHLYQQGMLSVAEELCQESTLNVDLDFKQPFLELNRILEALHEQDLGPALEWAVSHRQRLLELNSSLEFKLHRLHFIRLLAGGPAKQLEALSYARHFQPFARLHQREIQVMMGSLVYLRLGLEKSPYCHLLDSSHWAEICETFTRDACSLLGLSVESPLSVSFASGCVALPVLMNIKAVIEQRQCTGVWNHKDELPIEIELSXSAWYHSVFACPILRQQTSDSNPPIKLICGHVISRDALNKLINGGKLKCRYCPMEQNPADGKTH

SEQ ID NO: 49826 - protein, 40 aa, Homo sapiens
  misc_feature (1)...(40): Xaa = X or * as defined in Table 2
XLTRKKDCFSPQALHVHLTLFFTWCAWKRRQLQQRSTRER

SEQ ID NO: 49827 - protein, 76 aa, Homo sapiens
RSRVLRCCSCRLFQAHQVKKSVKWTCKACGEKQSFLRAYGEGSGADCRRHVQKLNLLPGQRFRAATQVSRRNCQCQ

SEQ ID NO: 49828 - protein, 212 aa, Homo sapiens
  misc_feature (1)...(212): Xaa = X or * as defined in Table 2
QLPAESVRTRGPAKAQARAGGPPGPWHCSYKWRAWPSSLSGTGWPDMEGETTAAAPASRENSADCSAGELRGPGKELWSPIQQVTATSSXMGRDFVLATXEKVSHVDSXEQPRSLQRDPRPAGPAQAKQGTPRAQASRESLSRPTAAVQLPSGPQHPVTSGSXKGLAGKTSMGRKGLPWARGWAPWSLEAQNPRPTRLCDLFITGEDFDDDV

SEQ ID NO: 49829 - protein, 235 aa, Homo sapiens
  DOMAIN (49)..(97): Ribosomal protein L15e proteins domain identified by eMATRIX, accession number BL01194B, p-value=8.235e-37, raw score of 13.66
  DOMAIN (14)..(235): Ribosomal L15 domain identified by PFam, accession name Ribosomal_L15e, E-value=1.9e-37, PFam score of 137.8
  misc_feature (1)...(235): Xaa = X or * as defined in Table 2
SSSSSAIQRKPRWVLYKYIQELWRKKQSDVMRFLLRVRCWQYRQLSALHRAPRPTRPDKARRLGYKAKQGYVIYRIRVRRGGRKRPSFLKGATYGQSPVHSWVFNQLKSFASEVLSVPFARGRRSLGRHCGGLLEEFLNFFNWVWVERFPHYQIFLKVIPHLIPFPXKLFRRNPDTQLIHQNQVHKHREMRGLTSARPEKSRGLGKGHKFHHTIGGSLRRATWRRRNTLQLHRYR

SEQ ID NO: 49830 - protein, 59 aa, Homo sapiens
QEDYLRELLTTMGDRFTDEEVDELYREAPIDQKGGMFNYIEFTRILKHGAKDKDGLKEL

SEQ ID NO: 49831 - protein, 190 aa, Homo sapiens
  misc_feature (1)...(190): Xaa = X or * as defined in Table 2
KKGLNHHHVEQNNTRPRPRSGPQRATSNVFAMFDQSQIQEFKEAFNMIDPDQDGFHRPGKICNDMLASLGKNPTXWSILDAMMNEAPGPPSNFTPWFPHHGFGEEVXMATRSXKMVIRKCPLTCFEXKKPLGTIGEDYLRELLTTHGGIGFTDEEVDELYREAPIXXKRGISITSEFTRILKHGAKDKDD

SEQ ID NO: 49832 - protein, 142 aa, Homo sapiens
VACLREHKQRCERATRSLLRELLQVRARVQLQGSELRQLQQEARPAAQAPEKEAPEFSGLQNQMQALDKRLVEVREALTRLRRRQVQQEAERRGAEQEDRPQTGQADRLAAAGGAGPGGGLRRPAEEPRGQQPEGGPGGGQN

SEQ ID NO: 49833 - protein, 816 aa, Homo sapiens
  DOMAIN (305)..(325): CHLORIDE CHANNEL SIGNATURE domain identified by eMATRIX, accession number PR00762C, p-value=4.682e-21, raw score of 9.29
  DOMAIN (195)..(611): Voltage gated chloride channels domain identified by PFam, accession name voltage_CLC, E-value=2.2e-185, PFam score of 629.1
RFPAGVAPRRAMANVSKKVSWSGRDRDDEEAAPLLRRTARPGGGTPLLNGAGPGAARQSPRSALFRVGHMSSVKLDDELLEPDMDPPHPFPKEIPHNEKLLSLKYESLDYDNSENQLFLEEERRINHTAFRTVEIKRWVICALIGILTGLVACFIDIVVENLAGLKYRVIKGNIDKFTEKGGLSFSLLLWATLNAAFVLVGSVIVAFIEPVAAGSGIPQIKCFLNGVKIPHVVRLKTLVIKVSGVILSVVGGLAVGKEGPMIHSGSVIAAGISQGRSSSLKRDFKIFEYLRRDTEKRDFVSAGAAAGVSAAFGAPVGGVLFSLEEGASFWNQFLTWRIFFASMISTFTLNFVLSIYHGNMWDLSSPGLINFGRFDSEKMAYTIHEIPVFIAMGVVGGVLGAVFNALNYWLTMFRIRYIHRPCLQVIEAVLVAAVTATVAFVLIYSSRDCQPLQGGSMSYPLQLFCADGEYNSMAAAFFNTPEKSVVSLFHDPPGSYNPLTLGLFTLVYFFLACWTYGLTVSAGVFIPSLLIGAAWGRLFGISLSYLTGAAIWADPGKYALMGAAAQLGGIVRMTLSLTVIMMEATSNVTYGFPIMLVLMTAKIVGDVFIEGLYDMHIQLQSVPFLHWEAPVTSHSLTAREVMSTPVTCLRRREKVGVIVDVLSDTASNHNGFPVVEHADDTQPARLQGLILRSQLIVLLKHKVFVERSNLGLVQRRLRLKDFRDAYPRFPPIQSIHVSQDERECTMDLSEFMNPSPYTVPQEASLPRVFKLFRALGLRHLVVVDNRNQVVGLVTRKDLARYRLGKRGLEELSLAQT

SEQ ID NO: 49834 - protein, 1229 aa, Homo sapiens
  DOMAIN (594)..(615): CHLORIDE CHANNEL SIGNATURE domain identified by eMATRIX, accession number PR00762D, p-value=4.103e-19, raw score of 11.29
  DOMAIN (183)..(747): Voltage gated chloride channels domain identified by PFam, accession name voltage_CLC, E-value=8.3e-122, PFam score of 414.3
MSSVELDDEPLPQSLPRPAPCSDAVLYSQQRLFRGCPSDTFVLPLEPQGLRKICFVAVGAFGTAFLDFKVLPQDMDPPHPFPKEIPHNEKLLSPPCQPTPGPLCPHPERGFGAECCPCCPGLQSLDYDNSENQLFLEEERRSALQAFRTVEIKRWVICALIGILTGLVACFIDIVVENLAGLKYRPVAAGSGIPQIKCFLNGVKIPHVAVFQTLVIKVSGVILSVVGGLAVGKVTKCTWPLQLEPEAAGPARALVSRKGRVTRVSEHRSFWSPGRADDPLRFSDCRRDLSGKVNVTETWSAARCSSGIRAADSVVLKAPSPAQPLSWQLLSLSESRALKEPALLQIFEYFRRDTEKRDFVSAGAAAGVSAAFGAPVGEEGRTGSNAFCLPGGVLFSLEEGASFWNQFLTLPQFFASMISTFTLNFVLSIYHGNMWDLSSPGLINFGRFSAQKMAYTIHEIPVFIAILFAGGVLGAVFNALNYWLTMLGSRYIHRPCLQVIEAVLVAAVTATVAFVLIYSSRDCQPLQGGSMSSTPQLFCADGEYNSMAAAFFNTPEKSVVSLFHSLLGSYNPLTLGLFTLVYFFLACWTYGLTVSAGVFIPSLLIGAAWGRLFGISLSYLRALQLSQVLRHRGPEQKSQGRTKVSHLTWFTGRGRCPRVVHGPWALSCCGGSVYCGSAAHVWSLDLPQIWADPGKYALMGAAAPAGGIVRMTLSLTVIMMEATSNVTYGFPIMLVLMTAKIVGDARPQGLYDMHIQLQSVPFLHWEAPVTSHSSSGREVMSTPVTCLRRREKVGVIVDVLSDTASNHNGFPVVEHAAVLQPARLQGLILRSQLIVLRRPQVFVERSNLGLVQRRLRLKDFRDAYPRFPPIQSIHVSQDERECTMDLSEFMNPSLLQEASLPRVFKLFRALGLRHLVVVDIVLQVVGLVTRKDLARYRLGKRGLEELSGNLRGPKAQATAEGRVAGAAQPPSQLRAVTLEDLGLLLAGGLASPEPLSLEELSERYESSHPTSTASVPEQDTAKHWNQAPARVVELQAEVACLREHKQRCERATRSLLRELLQVRARVQLQGSELRQLQQEARPAAQAPEKASSQFSGLQNQMQALCPRLVEVREALTRLRRRQVQQEAERRGAEQEPPASWAGVTTADFSRLAKLTDLLQQEEQGREVACGALQKNQEDSSRRVDLEVARMQVPPGPGFRGAAQRAEEETLTLSACAIRYSGRSPCICVH

SEQ ID NO: 49835 - protein, 107 aa, Homo sapiens
  DOMAIN (45)..(78): PROLINE-RICH PROTEIN 3 domain identified by eMATRIX, accession number DM00215, p-value=4.966e-09, raw score of 19.43
  misc_feature (1)...(107): Xaa = X or * as defined in Table 2
EVTACWQSSQPSLTLSASSAWASTLAALEEPFSPPLHSESPFLGWPRPELGPSAAPCAPVPPEPPQRVPPPAPXRPVPSTTQGLRSVGAWCRTGRQLHLHPGVGSTG

SEQ ID NO: 49836 - protein, 96 aa, Homo sapiens
  DOMAIN (32)..(65): PROLINE-RICH PROTEIN 3 domain identified by eMATRIX, accession number DM00215, p-value=6.186e-09, raw score of 19.43
HPGQWLRRVCWVSSGAGPLALCSISCPALAAFPRVGLGTCSPPCLSLPPTPWAPVRPEPPRRAPPPAPRRPVPSTTQGLRSTSAWRGTGRQLHLQP

SEQ ID NO: 49837 - protein, 507 aa, Homo sapiens; identical to SEQ ID NO: 41815

SEQ ID NO: 49838 - protein, 102 aa, Homo sapiens
  misc_feature (1)...(102): Xaa = X or * as defined in Table 2
RFSKSPPDSGAQLAAPSGSRTGAAGGAACQSRAVRPHSSALGWSMGLGAMEQGAVLVGEAWATQQPTVGGRLRHGGLQVPSPAPRGGSXGPAKSHSSCWPRC

SEQ ID NO: 49839 - protein, 98 aa, Homo sapiens
QPAAALWEPLSGLAEVGAGSLCLQEDVEGEAWETITGQREFQVGVAPHSEWPASATGPMQVKTSVPSCLQIWYHDLSLNPSIPMQDDWFRLEKIKFCS

SEQ ID NO: 49840 - protein, 135 aa, Homo sapiens
  misc_feature (1)...(135): Xaa = X or * as defined in Table 2
MPEPPPRLRGLLCSPEPPRHAAPCSTAPSPIDHPRAKECRRRARDWQAAPPAAPVRDPLGKARWAPESASLLSQRDHESARLGQTEETLNTSERQKEETPNTSEHQKEQTLDTPPLRTVTLTARVRGFILEVETX

SEQ ID NO: 49841 - protein, 189 aa, Homo sapiens
  misc_feature (1)...(189): Xaa = X or * as defined in Table 2
MLPDRLRSPVAHHRCRASGNYHSGRHSPAPAWRVTLTGWLDQRSSRIHRSLAFKDSYSKGKEERTHIKGMCSELLPSGEARGLAGFRSEAADLRGECYSSXRQCGPKELRSPAGFTQWIPHWGYRWSCLSVPRPAPALLSPWVVDGTGRCGAGGGAHRGGSGRSGAHGGGGRLRHGGLQVPSPAPREGS

SEQ ID NO: 49842 - protein, 399 aa, Homo sapiens
  DOMAIN (241)..(387): Deoxyribose-phosphate aldolase domain identified by PFam, accession name DeoC, E-value=0.096, PFam score of -86.1
MKPWALKVSVTALKVARLEFVPPDVRMCSEFLPCGVKLQTFAVSVTALKAARLELFVSPGGLVVSLASGVKLQTFPVSVTAHKSSVDPRSEQQQDLLQRAKEQTFHTVEGDRSGSPPDSGAQLASPSGSRTRAAGGAACQSRALRPHSSALGWSMGLGAVEQGAVLIREARAAHEPMERVGGSGMAGCRSRALPREKAAKARRETEGSAAVSGWLSGIAQWPKIDHEGFRAVKMPQAAWLLKAVTFIDLTTLSGDDTSSNIQRLCYKAKYPIREDLLKALNMHDKVAAGFPAGQTHLKTRLEEIRLAVEDGATEIDVVINRSLVLTGQWEGHTPQLFIQHYHATYDTADCSFLLVMLCCCGFGAYIPEVFLSVSDYPCVSFASSFTSSVIPEVSMFLRI

SEQ ID NO: 49843 - protein, 112 aa, Homo sapiens
  misc_feature (1)...(112): Xaa = X or * as defined in Table 2
ARHRVLIGVFTIPELDIKVLHVPTRLRSPASFTQWIPHWGCRWSCLPVPRRVPALLSPWVVDGTGGCGAGGGAHRGGWGCTGAHGGGGRLRHGGLQVASPAPREGSXGPARN

SEQ ID NO: 49844 - protein, 158 aa, Homo sapiens
  misc_feature (1)...(158): Xaa = X or * as defined in Table 2
QQPLREKPASGDHPAKNANRRWPSPTRYPYVESXNWMPSLHLIQKSIQDGLKTXTLDLKPXKLXKKTXALPFRTXAXARTSCLKHQKQWQQKTKLTNGIXLNXRASAPAKETKISSEQATYKMGENFHNLLFXQRANIQNLQXTQRDLQEKNKQPHQK

SEQ ID NO: 49845 - protein, 1998 aa, Homo sapiens
  DOMAIN (246)..(256): Sushi domain proteins (SCR repeat proteins domain identified by eMATRIX, accession number PF00084C, p-value=8.412e-09, raw score of 11.25
  DOMAIN (596)..(1727): Zinc finger, C2H2 type domain identified by PFam, accession name zf-C2H2, E-value=1.4e-18, PFam score of 75.1
  misc_feature (1)...(1998): Xaa = X or * as defined in Table 2
MSVRKDVEKLEPSDIVCGNVQCYSCMETNLTVSQKVKHEVTVGPREGATKPNRMKGKEGRSGSLLGEGDFFKDESVMSSQGSSKDGEKRRGKAQRWKWPMQGICRQLGVAKSMEGYQSRRDQGGRGVSDKWPQVCAKKPEFYPTAQVWANFSVTSCQSVTITQLCHGLRRLEISPARSNAMHLNPDPPGQKQNLSPKVNDIITDIESSSGSGAGKFQVISKSDISEVLLQQMDAGHSSKDDPNEYGGWKSPRPRCQQIQCLVRACFLVHRCSFLLCPHVVEGGVLTIRVVLKREWEGIPGIPGIPEPGGIHKGKGRAQDLQPAMPEPPCPSVGSCAARASPRSAAPCSTAPSPIDHPRAEECGRTARDWQAAPPAAPVRDPLGEASWAPESGSAPAILKVRIKTIKMSSGEIKRTVTRVLPEVDLDSGKKSSEQTASVMASVTFLLSSPASAAILSSLLRAPLQSTVMTNAVSPAELTPKQSASSAIIKAANAIQQQTVVVPAPSRANAKLVPKTVHLANINLLPQAQQQIKQAIINAAASQPPKKVSRVQVVSSLQSSVVEAFNKVLSSVNPVPVYIPNLSPPTNAGITLPTRGYKCLECGDSFAVEKSLTQHYDRQSMRIEAADTRGQKTCTICQMLLPNQCSYASHQRIHQHKSLYTCPECGAICRSVHFQTHVTKNCLHYMRRVGFRCVHCNVVYSDVAALQSHIQGSHCEVFYKCPICPMASNQNKEDTKSMNGKEKLEKKSPSPREKISGNQESGQSWVDVLGVXPPVHSERCVHIPREEGAREANEETSLPPPVPAQPDQAQRHQESVCLLALPRLQTYLYQTIDAREARPAVHSLKDPDLKEMTDATNEEETEIKEDTKFRQSQAPLHCTQVKGTSASVQAKWSWGRXPSDIVCGNVQCYSCMETNLTVSQKVKHEVTVGPREGATKPNRMKGKEGRSGSLLGEGDFFKDESVMSSQGSSKDGEKRRGKAQRWKWPMQGICRQLGVAKSMEGYQSRRDQGGRGVSDKWPQVCAKKPEFYPTAQVWANFSVTSCQSVTITQLCHGLRRLEISPARSNAMHLNPDPPGQKQNLSPKVNDIITDIESSSGSGAGKFQVISKSDISEVLLQQMDAGHSSKDDPNEYGGWKSPRPRCQQIQCLVRACFLVHRCSFLLCPHVVEGGVLTIRVVLKREWEGIPGIPGIPEPGGIHKGKGRAQDLQPAMPEPPCPSVGSCAARASPRSAAPCSTAPSPIDHPRAEECGRTARDWQAAPPAAPVRDPLGEASWAPESGSAPAILKVRIKTIKMSSGEIKRTVTRVLPEVDLDSGKKSSEQTASVMASVTFLLSSPASAAILSSLLRAPLQSTVMTNAVSPAELTPKQSASSAIIKAANAIQQQTVVVPAPSRANAKLVPKTVHLANINLLPQAQQQIKQAIINAAASQPPKKVSRVQVVSSLQSSVVEAFNKVLSSVNPVPVYIPNLSPPTNAGITLPTRGYKCLECGDSFAVEKSLTQHYDRQSMRIEAADTRGQKTCTICQMLLPNQCSYASHQRIHQHKSLYTCPECGAICRSVHFQTHVTKNCLHYMRRVGFRCVHCNVVYSDVAALQSHIQGSHCEVFYKCPICPMASNQNKEDTKSMNGKEKLEKKSPSPVKKSVETKKVASPGWTCWECDRLFIQRDVYISHVRKEQGKQMKKHPCRHLCQHNRIKHKGIRKVYACSHCPDSRRTFTKRLMLEKHVQLMHSLKDPDLKEMTDATNEEETEIKEDTKFPSPKHLFIVHKLKEPQPVSKQNGAGEDNQQENKPSHEDESPNGTVSDRKCKVDTDEAAFEPDYNESDSGSYVSVKDEETSGNTSKVLKDKIMEKAGESKRKPGHSWPGDQHPTRAFVQPSSSPSCQPTTLIPPVDFGVLSNQSKHGNILRACPGDTSGNMHSSQRGAECLFDKHNVTKPRMGKGMKQERRPSSFSGKPGLAGSGAASPTADTIVYVPLSCVQGRVQSGAAGMTDFRGKQIRHKNC

SEQ ID NO: 49846 - protein, 211 aa, Homo sapiens
  misc_feature (1)...(211): Xaa = X or * as defined in Table 2
MNNLRMGQHPESQQIHRDSSTTTWWKKIYRQKKGNDLQKPEVTHRTAGLIAGKDMDNNDLAVGKIQGNKNESSPATRKHQELSKWNGGLPYLGWSKRNDNSAVINTISIQIVVFKSYCVQNWWVLGLTDFKNEAADARGVKLQTFEVTVTALKTARLELFAPPGGLMVSLASGMKLQTFVVSVTACKSSVDPKNSGAQLASPSGSRTRAAX

SEQ ID NO: 49847 - protein, 45 aa, Homo sapiens
  misc_feature (1)...(45): Xaa = X or * as defined in Table 2
PCPKHCSKFPMCPELVGSWSHXLQEXSHGPSRFRLCXKQPQDLQH

SEQ ID NO: 49848 - protein, 172 aa, Homo sapiens
  misc_feature (1)...(172): Xaa = X or * as defined in Table 2
AWAQLPSALGSTRVSPPPSARSQPPWRRRHKVCWRLNRCKELDEDAVASADFSSMLSEEEKEELKAELVQLEDEITTLRQVLSAERKASELRXNKNSAXTXCNELKPELQQKLAXHADXHCLQEDTXYAESRRAKGNCSFQQRWNGHQQEVRRHELLHSPFHKYACYETKVG

SEQ ID NO: 49849 - protein, 406 aa, Homo sapiens
  misc_feature (1)...(406): Xaa = X or * as defined in Table 2
MRADGTAGKDPFATDKQLPELLIQHCWDGLLAVCGGSTVGVRLPFILHGSWVRPVAASFPPLPDNLHDSAEPAIILLEPTQMRRNQKTNAGTMTKQISSTLPKNHHTSSPAMDPNKEEIHDLLEKEFSRLVIELIREGPEKGKAQCEEIQKKDTKVKGEIFKEVDSLKKKQLNIQENLETLLEVLNALESLSNRIEQVEERNSEREDKVFELTQSNKDKAQRIRKYEPSLQEVWDYVKLPKLRIISFPNEEENSKSLENIFRGRIKEHFHSIARDLDIQIQEEQTTPGKLIVKRSLPRHIVIMRAPTPMDHPRAEECGRRARDWQAAPPAAPVRDPLGEASWAPDSEGRKWNTSKHQRNKLRTRHLXELXHSSRGSVASFLKSVRPRTHQFQTQSGYPKLRWRKES

SEQ ID NO: 49850 - protein, 72 aa, Homo sapiens
LPSRGAGLGTCSLPCLSLPPTPWAPVRPEPPRRAPPPAPRRPVPSTTQGLRNASARRRTGRQLHLQPQCGIH

SEQ ID NO: 49851 - protein, 635 aa, Homo sapiens
  DOMAIN (91)..(138): kw TRANSCRIPTASE REVERSE II ORF2 domain identified by eMATRIX, accession number DM01354V, p-value=1.000e-40, raw score of 12.97
MVLEVLARAIRQEKEIKGIQLGKEEVKLSLFADDMIVYLENPIVSAQNLLTLISNFSKVSGYKISVQKSQAFLYTNNRQTESQVMSELPFTIASKGIKYLGIQLTRDVKDLFKENYKPLLKEIKEDTNKWKNIPCSWVGRINIVKMAILPKVIYRFNAIPIKLPMTFFTELEKTTLKFIWNQKRARIAKSILSQKNKAGGITLPDFKLYYKATVTKTAWYWYQNRDIDQWNRTEPSEITQHMYNYLIFDKPEKNKQWGKDSLFNKWCWENWLAICRKLKLDPFLTPYTKINSRWTKDLNVRPKTIKTLEENLGIAIQDIGMGKDFMSKTPKAMATKDKIDKWDLIKLKSFCTAKELLHSKRNYHQSEQATYKMGEILNLLNLSGNSEISFSTATIAEDLGFLPWCTRRIGSHLGLENECQVLLSGSSSQQMKEPEGRWSGKVSPGVGPLSSWTLLQLPWPNSALFCRWMACLSAGSSGFYTHRIGVWWARGVLENATFGHKGKSACPHLSPWAYARGTQYPFFKPVLWKTSSHYSCMVTPIPGNTRVNGQCHKAMSGQFNCSLMLYQTSRTLTINQVLQLITSGNEGLSTRASGCSGRCTRSPSSASPPALRSISRRGLSRLPVGQGSGPAARRA

SEQ ID NO: 49852 - protein, 32 aa, Homo sapiens
SEVTCQLSPAGPPRNWPPPQLATLSPDWPEDE

SEQ ID NO: 49853 - protein, 66 aa, Homo sapiens
NYSFLLFSLPEFSPPPPRLNPSCCRRQRIPGETRTFSPPSLPFFTVFRINYLGFVSGGKRAEKALT

SEQ ID NO: 49854 - protein, 136 aa, Homo sapiens
  misc_feature (1)...(136): Xaa = X or * as defined in Table 2
PRRSANVNLPPPQLATLSPGWPEERKSVGSPTSPPPPRPLRRLSAAPGSGGAWPEPGAWSLDXTASPAGAPVQRPAGNGPSALDASHARALYLQRIPRVTWTPASQPPAPLGPFLPLIPPAASHRQPSSSFFRRHR

SEQ ID NO: 49855 - protein, 511 aa, Homo sapiens
  DOMAIN (97)..(136): PROTEIN ZINC FINGER ZINC-FINGER METAL-BINDING NU domain identified by eMATRIX, accession number PD01066, p-value=9.182e-25, raw score of 19.43
  DOMAIN (95)..(156): KRAB box domain identified by PFam, accession name KRAB, E- value=2.2e-10, PFam score of 47.9
  misc_feature (1)...(511): Xaa = X or * as defined in Table 2
MEEKTNVQLPPGQTEQHVEIHIMNFCSKNHHRITPEKPKELTDPFKEAACCCKLYEIDKKLYRMAEWIKIHKPSICCLQETHLTHKDSHKLKVSITFKDLAVRFSEEEWRLLEEGQREFYRDVMRENYETLVSVEPGRAVGGGSHADEGQEPAGCGVSPGPGAAGEGDPRVLVWRSQGRYGQPRERGRGASLDGERASPEAADGKRALPSPRPAQLPSRRPYQPAPPGPTPTDSSCSSGPTGDGVQGSPLPIRISPGNSPLPRPHQLSEGNPCAWAPAPRDIPKLLATSPXPGHVQANQSRPGAWEPALGRSDQRACSASGSAELCERWPQQAPAPPEEPPPASPHPAAPTGPGFWESCGEPGAAPGKGSAPKPSPLHCLESALRGILPEGPCASPAWEAPAPAPAPAPARASAAAEGEDPRPEPELWKPLPQERDRLPSCKPPVPLSPCPGGTPAGSSGGSPGEAPGEQSPGTAAASVQVSPAHWPCFSSPVRYSSGSLPGFSAGEKAQG

SEQ ID NO: 49856 - protein, 48 aa, Homo sapiens
MAALRGDSMLASLARSLSAPPLPGRPLWRHLRSASACRCTVGAPSWAG

SEQ ID NO: 49857 - protein, 100 aa, Homo sapiens
  misc_feature (1)...(100): Xaa = X or * as defined in Table 2
RTRDWSLFLLMFGCVRSFFLLVGLWSCWLRSEAADLRGECYSSXGGASGVVRSSWWVRGLTSFRSETGFTQWIPHWGCRWSCLPVPRCAPALLSPWVVNG

SEQ ID NO: 49858 - protein, 93 aa, Homo sapiens
  misc_feature (1)...(93): Xaa = X or * as defined in Table 2
LVHFTECXLVRLQTLARHSTDWCIYKSLARQKSSPSPHSTQEVQLASPLTGRQEDCSEPRSAPLHSSLGPTERDSICVAASSVRWTRPGARFS

SEQ ID NO: 49859 - protein, 133 aa, Homo sapiens
SKLQKLKRSLSFKTKSLRSKSADNFFQRTNSEDMKLQAHMVAEISPSSSPLPAPGSLTSTPARLVCIQVARLMPFRNTSSRSPLFCRCLQPHDSGFLFLRPARPRAHREERNNSRRVALRAVTLTTERLQLHS

SEQ ID NO: 49860 - protein, 421 aa, Homo sapiens
  misc_feature (1)...(421): Xaa = X or * as defined in Table 2
MPLSYAYKNAETLAGRHTSSWMSRGAYQRRNTRAAGRPEECTDRNWHAGRTRRIWLGQLEERCSDVFGVSFFWWVRGLAGSGAKLQTFTVSVTAHRGSKDQKSEQKQDLLQKAKEQTIHNVKGDPSELPLLAPAACFYSLICPRPPPHILLIGPFYRELIGPFYRELIGRQLRPGEKSSTAAVWPRCXAARLPGAGWTAPSAGPAEPTPTWNSRWPASATRRPGSRRRLSLHTSPQAEGAGSGLSQPRKGLPQCSGRLKRSSSAARVGARQRRRRERASEGWPACCHLSVLPCGFGFLEAHSSSPEQTDHEQNCPADIKVMRLAGQPTNARGAANRAQPLHSTSVSHLKAVIFKIQTRQQKNSHFPPLFLEMTTSLATGRLRPSWVDYARPALSVVSVSRFSLLTSLLELLVETLGECGLL

SEQ ID NO: 49861 - protein, 73 aa, Homo sapiens
MVRRIQDGVKPSVSIAEREMKSRKSAASLLSQRDHEPTRRKKLRTHPNIRRNKLQTRHLKSCNTHREGLQLHS

SEQ ID NO: 49862 - protein, 308 aa, Homo sapiens
  DOMAIN (136)..(153): GTPase-activator protein for Rho-like GTPases domain identified by eMATRIX, accession number PF00620B, p-value=2.667e- 12, raw score of 14.20
  DOMAIN (57)..(235): RhoGAP domain identified by PFam, accession name RhoGAP, E- value=0.026, PFam score of -24.7
VQEELEGPLRGAPHQLHQGPVEHLEAPHQHKFGKKVIYFNYLSELHEHLKYDQLVIPPEVLRTMRSSRACTRAGRRLPPRHHRRGPRCPHSSLASVCNSACAPRACSGDPPACRPSARSRGSTTKGKPVNFDDYGDIHIPAVILKTFLRELPQPLLTFQAYEQILGITCGEQPACHWLPPDLTEPPRAQLRRPPLPHGLPACGSRESIFNKMNSSNLACVFGLNLIWPSQGVSSLSALVPLNMFTELLIEYYEKIFSTPEAPGEHGLAPWEQGSRAAPLQEAVPRTQATGLTKPTLPPSPLMAARRRL

SEQ ID NO: 49863 - protein, 229 aa, Homo sapiens
  DOMAIN (158)..(175): GTPase-activator protein for Rho-like GTPases domain identified by eMATRIX, accession number PF00620B, p-value=2.667e- 12, raw score of 14.20
  misc_feature (1)...(229): Xaa = X or * as defined in Table 2
EVQEELEGPVRGAPHQLHQGPVEHLEAPHQHKFGKKVIYFNYLSELHEHLKYDQLVIPPEVLRTMRSSRACTRAGRRLPPRHHRRGPRCPHSSLASVCNTSKTKIKANSSPLCXGSQXRTXERKACAPRACSGDPPACRPSARSRGSTTKGKPVNFDDYGDIHIPAVILKTFLRELPQPLLTFQAYEQILGITCGGEQPACHSLPPDLTEPPRAQLRRPPLPHGLPACG

SEQ ID NO: 49864 - protein, 218 aa, Homo sapiens
  misc_feature (1)...(218): Xaa = X or * as defined in Table 2
APSCLVSEHSAPGPQRELPQPLLTFQAYEQILGITCGSCPAQGWGAWSSDAVPQLLARRPPLPHGLPACGEWGRGELGVKPSGLPSHAGPAWGHQVRTVCATAHPQDCISPEGAVEEEIVGGXGCTEGQSQRVLQIWPSQGVSSLSALVPLNMFTELLIEYYEKIFSTPEAPGEHGLAPWEQGSRAAPLQEAVPRTQATGLTKPTLPPSPLMAARRRL

SEQ ID NO: 49865 - protein, 798 aa, Homo sapiens
  misc_feature (1)...(798): Xaa = X or * as defined in Table 2
EHRRPMRAQASHEGHRHPMRAQMSHEGYRRPMRVQASHENTGVPXGVQASHEGTGIPXEHRCPMRTQVSHEGTGVPXECRRPMRTQGPMRGTGVPXEHRCPMRGTGVPXEAQASHEGHRRPMRGTGIPXGAQASHEGHRCPMRGTGVPXGHRRPDENTGVPXGHRRPMRAQASHREHRCPDEGHRRSPXGHRRPMRAQASHENTGVPXGAQASHENTGVPXGHRRPMRGTGVPXEQGVPXGHRRPMRAQVSHEGHRRPMRTQASHEGHRRPMRTQASHEGTGVPXEHRRPMRGTGVPXEFRRPMRGTGIPXGHRRPMRAQASHENTGVPXGNRPYHEGTGVPXECRRPMRTQASHEGTGVPXEHRCPMRAQASHEGHRHPMSTQASHEGHRRPMRTQASHEGHRHPMRTQASHEGTASHEGHRRPMRTQVSHEGTGVPXEFRRPMPGHGHPMRTQASHEGHRRPMRVQASHENTGVPXGHRHPMRGTGIPXGHRCPMRGTGVPXGYRHPMRTQASHEGYRPSHEGTGIPXEHRCPMRTQVSHEGTGVPXECRRPMRTQVSHEGTGVPXGHRRPMRTQVSHERHRRPMRTQASHEGTGVPXEHRCPMMGHRRPMRTQASHEGTGVPXEHRRPMRGTGVPXEHRRPMRAQESHENTGVPXGAQASHENTGVPXGHRRPMRAQASHEGHRRPMRTQASHEGTGVPXGHRRPMRGTGVPXEHRRHHEGTGIPXGHRHPMRDRRPMRTQASHEGTGVPXEHRRPMRAQASHEGHRHPMRAQMSHEGYRRPMRVQASHENTGVP

SEQ ID NO: 49866 - protein, 184 aa, Homo sapiens
  misc_feature (1)...(184): Xaa = X or * as defined in Table 2
VPQDSLGQALAGQATPEIPLGLQLHTVLVQEIQELIEAQTRAPGPCAEVRALPAPAAEPEPAWEEAPPERALELEGAPAKDQTNEELPEITAPYCEPLALTLELKAWLEREVGGRGDQHSPSQQLPCCPXSWARWQTCRQRAGHLAWPPVPRCREASLIHXNHSPAAAGPFILLILVYLCAGGA

SEQ ID NO: 49867 - protein, 183 aa, Homo sapiens
  misc_feature (1)...(183): Xaa = X or * as defined in Table 2
VDSRPMLNTRLMRTSGRRWTPRPQVDTRPXVNNKTQXAIRPQCGYSPQVPQDSLGQALAGQATPEIPLGLQLHTVLVQEIQERHXGTDTCSWSMCRSKSTASTSRWSQRPAWEEAPPERGTGAGGSSSQGPDQRGAAXNHGGAGEHXKKAGRKSSERYACSQRQPPPPGMDAGPQLGIQAVCP

SEQ ID NO: 49868 - protein, 145 aa, Homo sapiens; identical to SEQ ID NO: 48948
  DOMAIN (85)..(119): IMMUNOGLOBULIN V REGION domain identified by eMATRIX, accession number DM00031B, p-value=2.937e-09, raw score of 15.41

SEQ ID NO: 49869 - protein, 157 aa, Homo sapiens
  DOMAIN (87)..(121): IMMUNOGLOBULIN V REGION domain identified by eMATRIX, accession number DM00031B, p-value=7.038e-09, raw score of 15.41
  DOMAIN (46)..(120): Immunoglobulin domain identified by PFam, accession name ig, E-value=1.9e-12, PFam score of 45.1
  misc_feature (1)...(157): Xaa = X or * as defined in Table 2
PRVRSGHSMDMRVPAQLLGLLLLWLRGANCDIQVTQSPDSLSASVGDKVTITCRASQGISNGLSWYQQKPGQAPTLLIYAASSLQSGVPSRFSGSGSGTDFTLTISSLQPEDVATYYCLQDYTTPFTVLQAITKTPQRRDVXVCTVLATPPGVINWL

SEQ ID NO: 49870 - protein, 222 aa, Homo sapiens
  DOMAIN (48)..(220): Ribosomal protein L32 domain identified by PFam, accession name Ribosomal_L32e, E-value=9.1e-06, PFam score of 16.9
  misc_feature (1)...(222): Xaa = X or * as defined in Table 2
LPLSSSALPTESGSHLPFSGIMARPSDPLVKPQRSSKREPKKVHPGTQSDRYVKIKRNWAENPRGIDNRVRRRFKGQDLDAPTLGYGSNKKTKAHACPSGFREVPGVHNVQGSWEVACLMLQQNLYCCRGSVHNVFLPRNRQSPSWGKELAQLGLSGVHPTPLARAAQLKENXVRQLMCNKSYCAEIAHNVSSKNRKAIVERAAQLAIRVTNPNARRSEENE

SEQ ID NO: 49871 - protein, 173 aa, Homo sapiens
  misc_feature (1)...(173): Xaa = X or * as defined in Table 2
VWAANMPSRLRKTRKLTGHGAATGHGPHRPSTRKAPPGGPRXMPGGPAIHPPGSNFRQNTHPQAYFGKVGXXKHYPTXKRNQSFLPPTVNLDKLWTLVQXNRHRVKCLPKNKTGAAPHHLMLVRSGYLQSSGERGKLPKASLFFVEGPKFFSRRSLREEGLRGVWGGPVSLVA

SEQ ID NO: 49872 - protein, 62 aa, Homo sapiens
  DOMAIN (2)..(21): SIROHAEM FE-BINDING SITE SIGNATURE domain identified by eMATRIX, accession number PR00397B, p-value=3.045e-09, raw score of 13.99
PTGCQRGCGRVSVAWVGQHRPWCVRVPRRAPPSGWRLYRRGRPGWRVSRRLWGRRRCCCWMT

SEQ ID NO: 49873 - protein, 20 aa, Homo sapiens
MSALITDQDEDMLSYMVSLE

SEQ ID NO: 49874 - protein, 80 aa, Homo sapiens
VSSAFLVERCSRGSVSDRWAARRRCDSLGNKGELPRTNVAVERRRRRGLFDLNQIANHPQMSALITDEDEDMLSYMVSLE

SEQ ID NO: 49875 - protein, 86 aa, Homo sapiens
RQWGNRLVTAWSFFSWLSDCEGPGYGTIAEVGQLWGIMAKDLLRHSLASEELALNQNLTCHDQFAQSTRSSARACGSIFCSTTQGS

SEQ ID NO: 49876 - protein, 84 aa, Homo sapiens
RNREARFYMTTPNFTETKRWFHERVCALEREREREVTKISRLERDNHRLVGDISQLKKELDQYLQAISDLEDCNGKRLLQILEA

SEQ ID NO: 49877 - protein, 670 aa, Homo sapiens
  DOMAIN (190)..(233): kw TRANSCRIPTASE REVERSE II ORF2 domain identified by eMATRIX, accession number DM01354T, p-value=1.000e-40, raw score of 9.48
  DOMAIN (91)..(314): Reverse transcriptase domain identified by PFam, accession name rvt, E-value=7.6e-19, PFam score of 76.0
  misc_feature (1)...(670): Xaa = X or * as defined in Table 2
QWQQKPKLTNDNLKFIWNQKRDRIAKTILSQKNKAGGITLPDFKLYYKATVTKTAWYWYQNRHIDQWNRTEPSETIPHIYNHLNFDKPDKNKKWGKDSLFNKWCWENWLAICRKLKLDPFLTPYTKINSRWIKHLNVRPKTIKILEENLGNTIQDIGMGKDFMTKTPKAIATKPNXQMGSNILNGQKLEAFPLKTGTRQGCPLSPLLFNIVLEVLARAIRQEKEIKGIQLGKEEVKLSLFADDMIVYLENPIVSAQNLLKLISNFSKVSGYKINVQKSQAFLYTNNRQTESQIMSELPFTIASKRIKYLGIQLTRDVKDLFKENYKPLLKEIKEDTNKWKNMPCSWVGRINIVKMAILPKVIYRFNAIPIKLPMAFFTELEKTTLKFIWNQKRARIAKSILSQKNKAGGITLPNFELYYKATVTKTAWYWYQNRYIDQWNRTEPSEITPHIYNYLIFDKPGKNKQWGKDSLFNKWCWENWLAICRKLQLDPFLTPYTKINSRWIKDLNVRPKTIKTLEEDLGITIQDIGMGKDFMSKTPKAMATKDKIDKWDLIKLKSFCTAKETTIRVNRQPTKWEKIFATYSFDKGLISRIYNELQQIYKKKTNNPIKKWAKDMNRHFSKEDIYAAKKHMKKYSSSLAIREMQIKTTMRYHLTPVRMATIKNSGNNRQ

SEQ ID NO: 49878 - protein, 450 aa, Homo sapiens
  misc_feature (1)...(450): Xaa = X or * as defined in Table 2
GSSEKRKFKTGNQKLSMEVEKNQQMRSLSLYQQRVEGSKCAVRRKGGSPKPKAFLAAAEKFLNVPVMRSASHEQLVLTGDPNKTLPGSKSRLSGTDSPRACSTFPIWATKIVTEMQVQLFAACRVQLIKHPRPSAARTAMEVLESGEQGVLQWDRKLSELSEPGDGEALMYHTACQGHEEQVWEEEALQLGLRSGILLNHWKRQLVGGAGILRSAQLHSPYHHWQMISLVSPSPAVMAVMENDDICMVLCVKVMDEPNHILDAISEHQIPSLEDQWFSECALWTSKAYENLVERHILGPHCRPTELETLGISEDDIDHNPYLDFPGVAGLGSRRNVKERGWLSEMKKEGDIFMKIQGXAICPTSGPAEGLPPPTPVPHVPDRPCGTXGPPPSPGSDSSPACGPTAARPAPRSPAPPWRCGPRWAEDVLLTGLCKQQIAEPAFRLQFWWPI

SEQ ID NO: 49879 - protein, 823 aa, Homo sapiens
  DOMAIN (124)..(521): F-box domain identified by PFam, accession name F-box, E- value=3.1e-08, PFam score of 40.8
  misc_feature (1)...(823): Xaa = X or * as defined in Table 2
MNGTAEGQHPWVHSTFNGEPQSLSSSVRVKNQGPRDQAELGFQGNGSTVPAAQARTIARARGSGSGGGDALQGGGAGAGPGATKRTARLLARGLRRAALRPDGRGVLGAGAGSSQRRGGGRRKMETHISCLFPELLAMIFGYLDVRDKGRAAQVCTAWRDAAYHKSVWRGVEAKLHLRRANPSLFPSLQARGIRRVQILSLRRSLSYVIQGMANIESLNLSGCYNLTDNGLGHAFVQEIGSLRALNLSLCKQITDSSLGRIAQYLKGLEVLELGGCSNITNTGLLLIAWGLQRLKSLNLRSCRHLSDVGIGHLAGMTRSAAEGLPGPGAAHATGLPEAHRSFSKAHLPRADGPEAPQPQLLWGNLGRWPPAPVAHGQPAHAQPCAPCDNISDTGIMHLAMGSLRLSGLDVSFCDKVGDQSLAYIAQGLDGLKSLSLCSRRGLRRAALRPDGRGVLGAGAGSSQRRGGGRRKMETHISCLFPELLAMIFGYLDVRDKGRAAQVCTAWRDAAYHKSVWRGVEAKLHLRRANPSLFPSLQARGIRRVQILSLRRSLSYVIQGMANIESLNLSGCYNLTDNGLGHAFRAGDRLPARSQPEPLQADHXQQPGPHSPVPQGPARCWSWEVAATSPTLAFCSSPGVCSASRALTSAAAATFRMWDRAPGRHDAQRGGGLPGPGAAHATGLPEAHRSFSKAHLPRADGPEAPQPQLLWGNLGRWPPAPVAHGRLRTLNLRSCDNISRHGHHASGHGQPAPLGAGCFVLXQGGRPESGLHSPGAGWPQVSLPLLLPHQXXWHQPHGAADARAAHAQHWTVCAHHGQGPGADR

SEQ ID NO: 49880 - protein, 408 aa, Homo sapiens
  DOMAIN (291)..(329): Domain of unknown function DUF81 domain identified by PFam, accession name DUF81, E-value=0.099, PFam score of 10.2
TTMDGSHSAALKLQQLPPTSSSSAVSEASFSYKENLIGALLAIFGHLVVSIALNLQKYCHIRLAGSKDPRAYFKTKTWWLGLFLMLLGELGVFASYAFAPLSLIVPLSAVSVIASAIIGIIFIKEKWKPKDFLRRYVLSFVGCGLAVRGTYLLVTFAPNSHEKMTGENVTRHLVSWPFLLYMLVEIILFCLLLYFYKEKNANNIVVILLLVALLGSMTVVTVKAVAGMLVLSIQGNLQLDYPIFYVMFVCMVATAVYQAAFLSQASQMYDSSLIASVGYILSTTIAITAGAIFYLDFIGEDVLHICMFALGCLIAFLGVFLITRNRKKPIPFEPYISMDAMPGMQNMHDKGMTVQPELKASFSYGALENNDNISEIYAPATLPVMQEEHGSRSASGVPYRVLEHTKKE

SEQ ID NO: 49881 - protein, 427 aa, Homo sapiens
  misc_feature (1)...(427): Xaa = X or * as defined in Table 2
VSSSPTSLGCMRQKEYRIPKKLTNMPFLGSQPSLLALRSCHPTGRTCSASQVALFCLAAHRVSQIGALLAIFGHLVVSIALNLQVSFHIRLAGSKDPRAYFKTKTWWLGLFLMLLGELGVFASYAFAPLSLIVPLSAVSVIGKTIIGIIFIKEKWKPKDFLSKFVLSFVGCGLAVVGTYLLVTFAPNSHEKMTGENVTRHLVSWIILFCLLLYFYKEKNANNIVVILLLVALLGKLTVVTVKAVAGMLVLSIQGNLQLDYPIFYVMFVCMVATAVYQAAXVSQASQMYDSSLIASVGYILSTTIAITAGKGFYLDFIGEDVLHICMFALGXVLAFLGVFLITRNRKKPIPFEPYISMDAMPGKVNMHDKGMTVQPELKASFSYGALENNDNISEIYAPATLPVMQEEHGSRSASGVPYRVLEHTKKE

SEQ ID NO: 49882 - protein, 300 aa, Homo sapiens
  misc_feature (1)...(300): Xaa = X or * as defined in Table 2
QSARPSLKRARSQRGRPLPSRALVFLFLFFFFFFNFLPIHTQPSAHKDMTTNAGPLHPYWPQHLRLDNFVPNDRPTWAYTGLGLFSVTGGLRSWTTWAVVQGRAPGLPIGDFGRATVPCCWVLQWCGFIHLVIEGLVPFSNYERPCFGDQSLLYSQLWKEYGQGETARYILGVTNFTVCMETITSFAWGEPFSLWVVIVFLLQHPLRFILQLVVSVGQIYGDVLYFLXRATPTDFQHGKPGPTPLLLPGFSFVFHEMPLWLVPAPGSPLCLDAVXKHPQLMPQSNAWNAKGPQKPKSKKN

SEQ ID NO: 49883 - protein, 48 aa, Homo sapiens; identical to SEQ ID NO: 49031

SEQ ID NO: 49884 - protein, 62 aa, Homo sapiens; identical to SEQ ID NO: 49032
  misc_feature (1)...(62): Xaa = X or * as defined in Table 2

SEQ ID NO: 49885 - protein, 143 aa, Homo sapiens; identical to SEQ ID NO: 49033
  DOMAIN (75)..(115): Calponin family repeat proteins domain identified by eMATRIX, accession number BL01052C, p-value=8.200e-38, raw score of 18.51
  DOMAIN (21)..(121): Calponin homology (CH) domain identified by PFam, accession name CH, E-value=5.9e-14, PFam score of 59.8

SEQ ID NO: 49886 - protein, 26 aa, Homo sapiens
MWPGKMEQYKLVGPRREEGWGLLKTY

SEQ ID NO: 49887 - protein, 1471 aa, Homo sapiens
  DOMAIN (321)..(361): Calponin family repeat proteins domain identified by eMATRIX, accession number BL01052C, p-value=8.200e-38, raw score of 18.51
  DOMAIN (1160)..(1341): ABC transporter domain identified by PFam, accession name ABC_tran, E-value=2.4e-39, PFam score of 144.2
  misc_feature (1)...(1471): Xaa = X or * as defined in Table 2
MARPLALPLTGMSAPGSSLTTIPHTPSHPRSPSTPDTVSHPRSPSTPDTVSHPRSRYTPDTVPPTLPVYTRHRVPPTLPVYTRHRPTHAPGIHQTMCPTHAPGLHQTPCPTHAAGLHQTPSHPRSPSTPDTVSHPRSRSTPDTVPPTLPVYTRHRVPPTLTVYTRHRVPPTLPVYTRHCPTHAPGLHQTMCPTPRSRSLPDTVPPTLPVYTRHRVPPTLPVYTRDRVPPTLPVYTRHRPTHAPRLHQTPSHPRSRSTPDTVSHPRSRSTPDTVPPTLPVYTTVPPTLPRFLFPPPHVVPSRLMNKLQPGSVPKINRSMQNWHQLENLSNFIKAMVSYGMNPVDLFEANDLFESGNMTQVQVSLLALAGKVTNASSPGRLGWGVSRGSLKHPFVHDRHSSAAGPGTALGARGTAGGGAATRAGAGAALHGCPXRQLPPHSSESXTRGWRSXGSLATGSPTPASRRSILKVVEECAADTDMEDGSCGQHLCTGIAGLDVTLRLKMPPQETALENGEPAGSAPETDQGSGPDAVGRVQGWALTRQQLQALLLKRFLLARRSRRGLFAQIVLPALFVGLALVFSLIVPPFGHYPALRLSPTMYGAQVSFFSEDAPGDPGRARLLEALLQEAGLEEPPVQHSSHSALECAQPIVCRFSAPEVPAEVAKVLASGNWTPESPSPACQCSRPGARRLLPDCPAAAGGPPPPQAVTGSGEVVQNLTGRNLSDFLVKTYPRLVRQGLKTKKWVNEVRYGGFSLGGRDPGLPSGQELGRSVEELWALLSPLPGGALDRVLKNLTAWAHSLDAQDSLKIWFNNKGWHSMVAFVNRASNAILRAHLPPGPARHAHSITTLNHPLNLTKEQLSEGALMASSVDVLVSICVVFAMSFVPASFTLVLIEERVTRAKHLQLMGGLSPTLYWLGNFLWDMCNYLVPACIVVLIFLAFQQRAYVAPANLPALLLLLLLYGWSITPLMYPASFFFSVPSTAYVVLTCINLFIGINGSMATFVLELFSDQKLQEVSRILKQVFLIFPHFCLGRGLIDMVRNQAMADAFERLGENFLSGDRQFQSPLRWEVVGKNLLAMVIQGPLFLLFTLLLQHRSQLLPQPRVRSLPLLGEEDEDVARERERVVQGATQGDVLVLRNLTKVYRGQRMPAVDRLCLGIPPGECFGLLGVNGAGKTSTFRMVTGDTLASRGEAVLAGHSVAREPSAAHLSMGYCPQSDAIFELLTGREHLELLARLRGVPEAQVAQTAGSGLARLGLSWYADRPAGTYSGGNKRKLATALALVGDPAVVFLDEPTTGMDPSARRFLWNSLLAVVREGRSVMLTSHSMEECEALCSRLAIMVNGRFRCLGSPQHLKGRSQPAAAFVAAEFPGAELREAHGGRLRFQLPPGGRCALARVFGELAVHGAEHGVEDFSVSQTMLEEVFLYFSKDQGKDEDTEEQKEAGVGVDPAPGLQHPKRVSQFLDDPSTAETVL

SEQ ID NO: 49888 - protein, 148 aa, Homo sapiens
  DOMAIN (76)..(92): CALPONIN SIGNATURE domain identified by eMATRIX, accession number PR00889C, p-value=5.190e-18, raw score of 7.51
MAWLMPVIPALLEAEGGGGGRWISRLMNKLQPGSVPKINRSMQNWHQLENLSNFIKAMVRYGMNLVDLLEANDLFESGNMTQVQVSLLALAGKWRLGFTMLARLVSGVDRERGLMNKLQPGSVPKINRSMQNWHQREKVTIFIKAMVS

SEQ ID NO: 49889 - protein, 329 aa, Homo sapiens; identical to SEQ ID NO: 49035
  DOMAIN (97)..(137): Calponin family repeat proteins domain identified by eMATRIX, accession number BL01052C, p-value=8.200e-38, raw score of 18.51
  DOMAIN (197)..(267): Calponin family domain identified by PFam, accession name calponin, E-value=8.1e-17, PFam score of 59.2
  misc_feature (1)...(329): Xaa = X or * as defined in Table 2

SEQ ID NO: 49890 - protein, 159 aa, Homo sapiens
  misc_feature (1)...(159): Xaa = X or * as defined in Table 2
MQGLRVSHSTFYTLIPEVTENPHRLDFHWFLSAQLERVASGTILKKKESPPRPKVLGSARWDLPVPPGWCNSTALQXSPRSDQVXSERGMEAFFLPMPSESVASVCCRFSPWTSQKPQLSTSRDRKLQGKRXWFSTGVWASXDHSXERRCSQCPKTTCW

SEQ ID NO: 49891 - protein, 166 aa, Homo sapiens
  misc_feature (1)...(166): Xaa = X or * as defined in Table 2
FVPEERSSETALQRCSLPPGRRAAPDPGLQGLRGSLGGSGSELESRKAKLRAAEGLRRKTTEINQRDTADRCTRGHHXSPGESPPKPSAFSLXLSVPRSGKLRFLRSPRREPAANXSHRLRRHREKKCFHPPFTLNLIASGTSLEGGGVAPTWSTGRSQRALPSTL

SEQ ID NO: 49892 - protein, 374 aa, Homo sapiens
  DOMAIN (201)..(233): REV protein (anti-repression transactivator protein) domain identified by eMATRIX, accession number PF00424A, p-value=9.576e- 11, raw score of 14.34
  misc_feature (1)...(374): Xaa = X or * as defined in Table 2
RFLILINHAVFEYQDIFVASFPSIFFNIHCRGEGEREKGFAGKDRTPPPSTLLCGSGHLPPLASRRPPRPRCACCLPGGPLSSSALEAGXYWRFPKLSGXKRSHTPWVPQPQQPLPNPSPGKWVWASSEALQGTRAXRGIAELTHLLRLPARRGTQRPAPGHRAGASPQFRREASSRGPGLRPRPGRTRELGFPKRRVWATAASWPRGTEPCAAAXRRRRRRRRARGRELSPRSTWSSDTESTFALSCDPSXPRHQSVPKGRVGSCKGKLANKGFFCPTWQRPIRVASVDMELLHFVPKRALPGFTIAISFLSSAPPLCPWYSGSNPWLRNPLKPRLAALFQRSAAPRLHFSGAASLQVGERRQIRDFRVSAGA

SEQ ID NO: 49893 - protein, 201 aa, Homo sapiens
  DOMAIN (133)..(177): Synapsins proteins domain identified by eMATRIX, accession number BL00415N, p-value=4.504e-10, raw score of 4.29
  misc_feature (1)...(201): Xaa = X or * as defined in Table 2
GNENVKSGRKTSLSPFVLSDFTASSALLASDSSRWMSLQSASECPGRAAGSGPGYGXPVSEVTGGPLSAHTHSSLXTSQRGCPPGPEHHGAGPFPXGPGLKDVSGRGGNGCWGRRKPAHMGGGLGPATPLQFPPRPSPPPPPLGPPQPPPPPSPPLGPASSPPCLPHRPPPPPPPPPSRCVTAPCVTAPGPAPTGAAARRH

SEQ ID NO: 49894 - protein, 27 aa, Homo sapiens
MNLAISKYNMKVLYLSAFTSKDEGTYT

SEQ ID NO: 49895 - protein, 51 aa, Homo sapiens
MNLAISIALLLTVDQSLRLDCRHENTSSSPIQYEFSLTRETKKHVLFGTVG

SEQ ID NO: 49896 - protein, 83 aa, Homo sapiens
DPRTMNLAISIALLLTVLQVSRGQKVTSLTACLEDQKPGRDLDEEWLGCAWAIARTWSVLTALLGRHGWLPEDPQDVRAPPRI

SEQ ID NO: 49897 - protein, 171 aa, Homo sapiens
  misc_feature (1)...(171): Xaa = X or * as defined in Table 2
DPRTMNLAISIALLLTVLQVSRGQKVTSLTACLVDQSLRLDCRHENTSSSPSKYEFSLTRETKKHVLFGTVGVPEHTYRSRTNFTSKYNMEGPLTYSAFHXARTRGTLQVLQFHQFGALSPPIFLSRNVTVVQRTNWVKCEGISLLAQNTSWLLRLLLSLSLLQATDFMSL

SEQ ID NO: 49898 - protein, 316 aa, Homo sapiens
  DOMAIN (175)..(187): AT-HOOK-LIKE DOMAIN SIGNATURE domain identified by eMATRIX, accession number PR00929B, p-value=8.200e-10, raw score of 4.38
MAERRLRASHWSGCCMVFSKRTLGPPACDCQQVGTYTVKFYDGVVQTVKHIHVKAFSKDQNIVGNARPKETDHKSLSSSPDKREKFKEQRKATVNVKKDKEDKPLKTEKRPKQPDKEGKLICSEKGKVSEKSLPKNEKEDKENISENDREYSGDAQVDKKPENDIVKSPQENLREPKRKRGRPPSIAPTAQEKSKNYSENTDKDLSRRRSSRLSTNGTHEILDPDLVVSDLVDTDPLQDTLSSTKESEEGQLKSALEAGQVSSALTCHSFGDGSGAAGLELNCPSMGENTMKTEPTSPLVELQEISTVEGSYLELN

SEQ ID NO: 49899 - protein, 68 aa, Homo sapiens
MTKHPPNRRGISFEVGAQLEARDRLKNWYPAHIEDIDYEEGKVLIHFKALGTIVMMSGSAGTVLIYAL

SEQ ID NO: 49900 - protein, 55 aa, Homo sapiens
MYPYPKPLAPQGDEQKSRRMAAWHDRREGASECREGAIVVHRYSRDDSGLVFGML

SEQ ID NO: 49901 - protein, 172 aa, Homo sapiens
  misc_feature (1)...(172): Xaa = X or * as defined in Table 2
PNGNQPPRETPQRISRGIQRLGTAVASSGGSRSLPRSASAEPAQGAAARRAAPGPAGRCRAARGAGAGSARRLPXAPAHPAPPEQGRRSRTARSRAAPQPPPPSQPQSPQLGPRPSQGAPQRRGPSSPGPRAGCRAQXEALTPRLWRSSRTPSSRGLGPHVRGGIFSPKIPT

SEQ ID NO: 49902 - protein, 65 aa, Homo sapiens
MLKFKAFCLDYWQFLCLQPLHGAYKSVEGEAPSSETGTSLDSPSAYPQGPLVPGSSLSPDHYEHT

SEQ ID NO: 49903 - protein, 270 aa, Homo sapiens
  misc_feature (1)...(270): Xaa = X or * as defined in Table 2
GVSPCWPGWSRTPDFGSNPKCPPIRASPGAELQALSSTVTTPYWGILVTAVFPHXGLRPRQCRQDHPAGRQGPGPGEVPEILGQSGCTDRTWSKAGGRTQAPGPRSRAGRRVSGQEIRAPGPLGCRHGGVGAPWTPEAASPLTATEPSCPHLQAPCGYMPLSVSPRRRYRGPAGDQKVKMLKFKAFCLDYWQFLCLQPLHGAYKRDSDLMTWIWGLLPEVTGAAGTTSPNVHTSGRFFRACVFCPVHTLVKKEPHPGQQEIIMEPSPWSP

SEQ ID NO: 49904 - protein, 373 aa, Homo sapiens
  DOMAIN (192)..(213): XERODERMA PIGMENTOSUM GROUP G/YEAST RAD SUPERFAMILY SIGNATURE domain identified by eMATRIX, accession number PR00853D, p-value= 3.531e-16, raw score of 17.86
  DOMAIN (36)..(135): XPG N-terminal domain identified by PFam, accession name XPG_N, E-value=4e-36, PFam score of 133.5
  misc_feature (1)...(373): Xaa = X or * as defined in Table 2
REILSLDRLPGATPNQALSAEAACPKGQTSLLCGAMGIQGLAKLIADVAPSAIRENDIKSYFGRKVAIDASMSIYHFLIAVRQGGDVLQNEEGETTSHLMGMFYRTIRMKENGIKPIYKSGELAKCSELRAEAEKQLQQAQAAGAEQVVEKFTKWLVKVTKQHNDKCKHLLSLMGIPYLDAPIEAEASCAALVKAGKVYPVATEDMDCFTFGSPVLMQHLTASSDYCKSIWSIGPKRAVDLIQKHKSIEEIVQRLDPNKYPLPENRLHKEAYQLFLEPEVLGPESVELKWSEPNEEELVKFVCGEKQFSEERIHSGVKRLRTEKGGGEPRGPDWTQPGRASPTKRPDHQEDQHTRSRSSEGSHXGWLEGRHRP

SEQ ID NO: 49905 - protein, 429 aa, Homo sapiens
  DOMAIN (183)..(231): Intermediate filaments proteins domain identified by eMATRIX, accession number BL00226B, p-value=2.714e-23, raw score of 23.86
  DOMAIN (107)..(348): Intermediate filament proteins domain identified by PFam, accession name filament, E-value=4.2e-90, PFam score of 312.7
  misc_feature (1)...(429): Xaa = X or * as defined in Table 2
LPACPPASTPASTMSIMVTQKSYKVSTSRWSSGPQAFGNCSYARGPGACISSLSFSRVGSSIFRGVLGGSYGGASGMGSITAVTVNQSLLSPLNLEVEPNIQAVCTQEKTLNNKFASSIDKVQFLEQQNKMLETESYINSLKQQLETLGLERLKLEAELGNMPGLVEDFKNKYEDEINKRTEMENEFVLIRQYVDEAYMNKVELESCLEGLTEEINLLGQLYEEEIQKLQSQILDTSVVLCMNNSHSLDMDSIIAEVKAQYEEMANHSQAEAESMYQIKYEELQTLAGKHGDDLRHAKTEISEMNQNGAKQDMAXQLHEYQELTNIRLALDIKITIYRKLLEGEESQLESGMQNMNIHMKTTSGYAGGLSSAYEGLTSPSLSYGLGSSFGSGMGSISFSHTSFTRAIVVKKIEIHDGKLVSESSDVLPK

SEQ ID NO: 49906 - protein, 429 aa, Homo sapiens; identical to SEQ ID NO: 49905
  DOMAIN (183)..(231): Intermediate filaments proteins domain identified by eMATRIX, accession number BL00226B, p-value=2.714e-23, raw score of 23.86
  DOMAIN (107)..(348): Intermediate filament proteins domain identified by PFam, accession name filament, E-value=4.2e-90, PFam score of 312.7
  misc_feature (1)...(429): Xaa = X or * as defined in Table 2

SEQ ID NO: 49907 - protein, 18 aa, Homo sapiens
CLNQGCGPPGLTPNSVLL

SEQ ID NO: 49908 - protein, 53 aa, Homo sapiens; identical to SEQ ID NO: 37556
  misc_feature (1)...(53): Xaa = X or * as defined in Table 2

SEQ ID NO: 49909 - protein, 772 aa, Homo sapiens
  DOMAIN (111)..(160): kw TRANSCRIPTASE REVERSE II ORF2 domain identified by eMATRIX, accession number DM01354Z, p-value=1.000e-10, raw score of 9.06
MAGGSWEQYPWGVSTFCDICSHITPYAFEYYEGPSHTGVYTSCDIGSNINLSASEYEEENHRGYGVCSVGLERLAYVFGAYSLGPQPPHSWACWACGCHAQCPSWLQQGYSVSASRNENTALFKIAKTWNQPKCPSMIGLEKEYVVHIRHGMLCSHQKEQENILCRDMDEAESHYPQQTNAETENQTPHVLTYKWKPNNENTRTQRGEQHTLGPTGGQRFGVIHSVFTNLLLWANGVLNESKHQLNEHKERLITLGFGNITTVLDDHTPQCNCTPPTLCTAISHGIYYLYPFNIEYQILASTMLYVLWKNIGRKVDSHQHQKMQFKSDGVMTKSESALIMFYLYAITLLMLMGAAGLAGIRIYRIDEKSLDESKNPARKLDSDLLVGTASGSWLISWGSILAILCAEGHPRYTWYNLPYSILAIVEKYIQNLFIFESIHREPEKLSEDIQTLRVVTVCNGNTMPLASSCPKSGGVARDVAPQGKDMPPAANGNVCMRESHDKEEEKQEESSWGGSPSPVRLPRFLQGNAKRKVLRNIAAFLFLCNISLWIPPAFGCRPEYDNGLEEIVFGFEPWIIVVNLAMPFSIFYRMHAAASLFEPQKVQARSWLLAASAPVSSEAFGWGDDYKNHVKCISEDQKYGGKGYEGKTHKGDIKQQAWIQKISELIKRPNVSPKVRELLEQISAFDNVPRKKAKFQNWMKNSLKVHNESILDQVWNIFSEASNSVNDERTVMHAQHGILLTNKMNIGQFSNLGESPEKNAERRVSLKRLHTV

SEQ ID NO: 49910 - protein, 446 aa, Homo sapiens
  DOMAIN (144)..(169): MYELIN P0 PROTEIN SIGNATURE domain identified by eMATRIX, accession number PR00213E, p-value=4.563e-09, raw score of 5.51
MAARAKGTGFPSFSFTASPPIPAKHQRREIVEIKTQDKEVEEKTAGPEGHYHLDVETSSGPECLAAQLFIGYKTRGQVLDDHTPQCNCTPPTLCTAISHGIYYLYPFNIEYQILASTMLYVLWKNIGRKVDSHQHQKMQFKSDGVMVGAVLGLTVLAATIAVVVVYLIHIGRSKTKSESALIMFYLYAITLLMLMGAAGLAGIRIYRIDEKSLDESKNPARKLDSDLLVGTASGSWLISWGSILAILCAEGHPRYTWYNLPYSILAIVEKYIQNLFIFESIHREPEKLSEDIQTLRVVTVCNGNTMPLASSCPKSGGVARDVAPQGKDMPPAANGNVCMRESHDKEEEKQEESSWGGSPSPVRLPRFLQGNAKRKVLRNIAAFLFLCNISLWIPPAFGCRPEYDNGLEEIVFGFEPWIIVVNLAMPFSIFYRMHAAASLFEVYCKI

SEQ ID NO: 49911 - protein, 306 aa, Homo sapiens
  DOMAIN (129)..(178): Eukaryotic RNA polymerase II heptapeptide repeat proteins domain identified by eMATRIX, accession number BL00115Z, p-value= 7.419e-10, raw score of 3.12
  misc_feature (1)...(306): Xaa = X or * as defined in Table 2
LHAPNSLHHHLPRDLLXLLPLPLQHRVSDPGLHSALRPMEEHRAQSXQPSAPEDAVQAXWGHGGHSPGPDRAGCHHCRGDQERVSTHHVLPVCHHPDDAYGGCGAGWNPDLPGQMRSHWMSPKIRPANWTRTSWWALPQAPGLSPGAQSWPSFVPRTTPTTPGTTCPTPSWXSWRSTSRTSSSLNPFTESLKNSLRTSKPFGWSQSAMATPCPLLPPASRVELWPETWPLGQGHATSSQWKCVPERKLXQGGEAGGEQLGREPKPSPPSSFLTGQRQEKSPEEYCSLLVPLQYFGSRGTHADLLHG

SEQ ID NO: 49912 - protein, 901 aa, Homo sapiens
  DOMAIN (593)..(642): Eukaryotic RNA polymerase II heptapeptide repeat proteins domain identified by eMATRIX, accession number BL00115Z, p-value= 9.338e-09, raw score of 3.12
  misc_feature (1)...(901): Xaa = X or * as defined in Table 2
MPGPHPASASCPPRLFTPRRRAFCPLRICAPLAAAAFCPPRFLPHTRRRAFLLLCRRGFLPPPCLGGGLAAAFFPHPPLPFLRPHRRGFLPHRRRGFLLPPRLGFLPAAAFYPPPPRVFARRGFVPPSPPRLFARRAFCHTPPAAAFSPSAAAAFCPTADTAFCTLAALAFCRRGFLPPRCRGFLPLRHRRSFLPHRRRGFLPTAAFCHRGFLLATAFYPPRLFAPRCHGFLPPCRSDFFAAAAFCPRRRGFLPLSPPLFAPAAVAFCPRHRGFLLPRLFAPVTAAFCHRDFLPPPPRIFVPAATALRAGAADSAASSTGVLARAALRGPCGLHRVALPVEAMGEKKEGGGGGDAAATEGGTGAAASRALQQCGQLQKLIVIFIGSLCGLCTKCAVSNDLTQQEIQTPEPAKPAKPASQTRQPSQPSHPASQASQTSQPAKQPASQASQPAKPAKPPSQPSQPSHRASQASQATQPERPASQPASEPSQPSLPASQASQDRQPAKPAKPDSHPRQPSQPYQPSQPASQASQASQPAKPSRQPSQPRQPSQLASQASQSTQPLKPAKSPVQQSQPSQPASPDSQASQASQATQPAKPAKPPSQAAQPAKPAKPPSQPACQPPSQRAKPAKPARQPSQPSQSSPPASQPSQACQPSQPGSQASQASQAAKPGMPAKPARQPSQPSQPASQARHASQAIQPAKPAGXPSQTSHPAIQASQPSQPSQPTSQPRPALRGATARVAEATSAQSRQPRRRAEPYSAAESHSGCECAATCTRGEPVRLLWRGEAQAQLHSPAVKGVIFSILFGNSPNKCDLVLDDHTPQCNCTPPTLCTTISHGIYYIYYLYPFNIEYQILASTVLYVLWKNIGRKVDSHQHQKMQFKPDGVTVGTVLGLTALPPPLPW

SEQ ID NO: 49913 - protein, 869 aa, Homo sapiens
  DOMAIN (798)..(812): Phage integrase family domain identified by eMATRIX, accession number PF00589B, p-value=1.621e-11, raw score of 16.17
  DOMAIN (670)..(849): "Phage" integrase family domain identified by PFam, accession name Phage_integrase, E-value=7.5e-08, PFam score of 39.5
  misc_feature (1)...(869): Xaa = X or * as defined in Table 2
RQCFKATEQPPAIHHPSSQPSRQPSSQPPIYPSPICGRKSGIQPKFQLNGXMVNGXMDESRERHEWPCNYQVRPKAGEKQPGAEANRETRPEGGTPRGERGRQGPATRRQKSTPEAGPSDLEKQIARQEAPAGTDEIERQQARPHXAPXKIPVEWVNGEWLNGRMPGDPHEWQCNYQPAIQPAIQPANQLSIHNLWTQFRHSTKIPVEWVNGEWLNGRMPGKHHEWQCNYQPAIQPAIQPANQLSIHNLWTQFRHSTKIPVEWVNGEWLNGRMPEDHHEWQCNYQPAIQPAIQPASQLSIHNMWTQFRHSGQIPVEWVNGSRLHGRQQGIFMHGNATSSHSPSIQPAIQPAIQPANQLSIHNLWTQFRHSTKIPVEWVNGEWLNGRMQRNIMNGNATISHSPSIQPAIQPAIQPVNHLSIHNLWTQFRHSTKIPVEWVNGEWLNGRMPGKNHEWQCNYQPAIQPAIQPANQLSIHNLWTQFRHSTKIPVEWVNGEWLNGRMPGDHHEWQCNYQIAPMLQSNRTAASHSPSIQPAIQAAIQSATHLSIPNLWTQVRHSTKIPVEWVNGEWLNGRMPGRDMNGHATIRYGPKPEKNNRAPRQTEKQGQKGAHQRREGKARAGNEETEKYSRSRAIRPRKTDSASRSSRGHRRNRKAASAATLGPIEDTNQNKLHVRDTGLEVKAISIQGPGTLMEEVGMWDLILFHYGESWNLLRADQRLIFAKSWPRASRYQQGHQDLFILRSDLPSQVFIRDKLMERRNRRTGRTEKARIWEVTDRTVRTWIGEAVAAAAADGVTFSVPVTPHTFRHSYAMHMLYAGIPLKVLQSLMGHKSISSTEVYTKVFALDVAARHRVQFAMPESDAVAMLKQLS

SEQ ID NO: 49914 - protein, 187 aa, Homo sapiens
  DOMAIN (88)..(126): Synapsins proteins domain identified by eMATRIX, accession number BL00415O, p-value=3.607e-10, raw score of 3.44
  misc_feature (1)...(187): Xaa = X or * as defined in Table 2
GASPNQGQNRPHARQRAPPQGPPGEPERRAPLPSGHGEPCRHRPPPFPQPPAGTQKPLLQGPGGGXPAENAPTAALGSPAPPRGCQAAPPPRSGAGRPDLPTLAGPRPAPAPPPSAAPPPPPSGAPSRPAAGRQRLSGVSSGPSLGWWXVGRGRGLPAFAQIAGHQVGPRRRRTPAGRKPRSPAGPR

SEQ ID NO: 49915 - protein, 187 aa, Homo sapiens; identical to SEQ ID NO: 49914
  DOMAIN (88)..(126): Synapsins proteins domain identified by eMATRIX, accession number BL00415O, p-value=3.607e-10, raw score of 3.44
  misc_feature (1)...(187): Xaa = X or * as defined in Table 2

SEQ ID NO: 49916 - protein, 126 aa, Homo sapiens
  DOMAIN (1)..(88): CTF/NF-I family domain identified by PFam, accession name CTF_NFI, E-value=1.1e-57, PFam score of 199.2
YFPHTAIRYPPHLNRQDPLKDLVSLACDPASQQPGPLNGSGQLKMPSHCLSAQMLAPPPPGLPRLALPPATKAATTSEGGATSPTSPSPGIWDSKGLLPSPLLHRPRNPRGQHSRPPAHVFGGKLE

SEQ ID NO: 49917 - protein, 94 aa, Homo sapiens
  DOMAIN (1)..(32): CTF/NF-I family domain identified by PFam, accession name CTF_NFI, E-value=1.4e-15, PFam score of 55.2
YSPPDTSPANRSFVGLGPRDPAGIYQAQESQGAAQPAPGPRFRWKIRVNKNTPADSQPGQKDKTHRRTHSGGKEKTKAEEEEEEIKTHPSKKTK

SEQ ID NO: 49918 - protein, 518 aa, Homo sapiens
  DOMAIN (34)..(80): CTF/NF-I proteins domain identified by eMATRIX, accession number BL00349A, p-value=1.000e-40, raw score of 10.07
  DOMAIN (35)..(448): CTF/NF-I family domain identified by PFam, accession name CTF_NFI, E-value=0, PFam score of 1287.2
  misc_feature (1)...(518): Xaa = X or * as defined in Table 2
RLEFPGRRFRSAPAPAGPAPPAAPGMYSSPLCLTQDEFHPFIEALLPHVRAFAYTWFNLQARKRKYFKKHEKRMSKDEERAVKDELLGEKPEVKQKWASRLLAKLRKDIRPECREDFVLSITGKKAPGCVLSNPDQKGKMRRIDCLRQADKVWRLDLVMVILFKGIPLESTDGERLVKAAQCGHPVLCVQPHHIGVAVKELDLYLAYFVRERDAEQSGSPRTGMGSDQEDSKPITLVTTDFQESFVTSGVFSVTELIQVSRTPVVTGTGPNFSLGELQGHLAYDLNPASTGLRRTLPSTSSSGSKRHKSGSMEEDVDTSPGGDYYTSPSSPTSSSRNWTEDMEGGISSPVKKTEMDKSPFNSPSPQDSPRLSSFTQHHRPVIAVHSGIARSPHPSSALHFPTTSILPQTASTYFPHTAIRYPPHLNPQDPLKDLVSLACDPASQQPGPSWYLGXQRSSSLAPSPSSQESQGAAQPAPGPRFRWKIRVNKNTPADSQPGQKDKTHRRTHSGGKEKTKAE

SEQ ID NO: 49919 - protein, 159 aa, Homo sapiens
  DOMAIN (18)..(64): CTF/NF-I proteins domain identified by eMATRIX, accession number BL00349A, p-value=1.000e-40, raw score of 10.07
  DOMAIN (19)..(159): CTF/NF-I family domain identified by PFam, accession name CTF_NFI, E-value=9.4e-138, PFam score of 471.0
LSPESQNRALGFAGCFRSMDEFHPFIEALLPHVRAFSYTWFNLQARKRKYFKKHEKRMSKDEERAVKDELLGEKPEIKQKWASRLLAKLRKDIRPEFREDFVLTITGKKPPCCVLSNPDQKGKIRRIDCLRQADKVWRLDLVMVILFKGIPLESTDGER

SEQ ID NO: 49920 - protein, 145 aa, Homo sapiens
  DOMAIN (55)..(93): CTF/NF-I proteins domain identified by eMATRIX, accession number BL00349H, p-value=5.680e-39, raw score of 15.70
  DOMAIN (1)..(145): CTF/NF-I family domain identified by PFam, accession name CTF_NFI, E-value=2.6e-90, PFam score of 310.8
WTQDMEGGISSPVKKTEMAKSPFNSPSPQDSPRLSSFTQHHRPVIAVHSGIARSPHPSSALHFPTTSILPQTASTYFPHTAIRYPPHLNPQDPLKDLVSLACDPSSQQPGPSYSPPDTSPANRSFVGLGPRDPAGIYQAQSWYLG

SEQ ID NO: 49921 - protein, 652 aa, Homo sapiens
  DOMAIN (150)..(196): CTF/NF-I proteins domain identified by eMATRIX, accession number BL00349A, p-value=1.000e-40, raw score of 10.07
  DOMAIN (151)..(652): CTF/NF-I family domain identified by PFam, accession name CTF_NFI, E-value=0, PFam score of 1339.6
  misc_feature (1)...(652): Xaa = X or * as defined in Table 2
CPTGFEHGSPCARRTPTGRVSVTRCRRRAWGSLRVSVCGPRAQLQAELVQEEQGGGVLCVIVMPLTPGRTPRLPRGRALCNGRGGVWGGGGSPRGLLPAQAPGDPEVCKFRFLDRCFPPYAGPSDLSLRGRAVGPPSASLALLTSRLSGLQDEFHPFIEALLPHVRAFAYTWFNLQARKRKYFKKHEKRMSKDEERAVKDELLGEKPEVKQKWASRLLAKLRKDIRPECREDFVLSITGKKAPGCVLSNPDQKGKMRRIDCFRQADKVWRLDLVMVILFKGIPLESTDGERLVKAAQCGHPVLCALKPQHIGVAVKENLDLYLAYFVRERDAXQSGSPRTGMGSDQEDSKPITLDTTDFQESFVTSGVFSVTELIQVSRTPVVTGTGPNFSLGELHAHLAYDLKPASAGLTRTLSSTFSSGNKRYKAGSMEEYVDSTPWGDDXTXPSSPTSSSRNWTEDMEGGISSPVKKTEMDKSPFNSPSPQDSPRLSSFTQHHRPVIAVHSGIARSPHPSSALHFPTTSILTPDGPSPTFPHTAIRYPPHLNPQDPLKDLVSLACDPASQQPGPLNGSGQLKMPSHCLSAQMLAPPPPGLPRLALPPATKPATTSEGGATSPTSPSYSPPDTSPANRSFVGLGPRDPAGIYQAQSWYLG

SEQ ID NO: 49922 - protein, 72 aa, Homo sapiens
  misc_feature (1)...(72): Xaa = X or * as defined in Table 2
ESWLGRGHQPPPPGLFHSPKPSSGTAVLPAWRPPSPGPGAGDDASPSPSXAGPGAGANPGAXQRSASGEKGS

SEQ ID NO: 49923 - protein, 19 aa, Homo sapiens
WCWWVWKLIDSHWKSHYQQ

SEQ ID NO: 49924 - protein, 51 aa, Homo sapiens
  misc_feature (1)...(51): Xaa = X or * as defined in Table 2
EEFPMGHTAXWSCEKRATILQIQEWXIQQQLAPCAWQSHRHSTRAHESSHG

SEQ ID NO: 49925 - protein, 201 aa, Homo sapiens
MGSGPRVRPSAVLASGLNQSSPSGGSHRVLISPFPPSSRQFSTERLYLGENKGRQQESLPVDPENSSGSYTRPSRGYLYESAKATVLLALGFLVSLTSRMKPRTLTVSVTALKDGVSGVCSFRCSDVSRVSSFRWVCGLADFRSEAADLSQKGQVNRNTCPGLIPKQEFQRTKIEMVDGERRISSVIFPVSEEQVYTMTRF

SEQ ID NO: 49926 - protein, 78 aa, Homo sapiens
  DOMAIN (6)..(55): kw TRANSCRIPTASE REVERSE II ORF2 domain identified by eMATRIX, accession number DM01354Z, p-value=9.730e-11, raw score of 9.06
  misc_feature (1)...(78): Xaa = X or * as defined in Table 2
VYPQTNWKQNTGTRVFIAALFTMAKGENKXPSMGEWIKQMWSIHTMERHAAIKRIEAQVYATMXMKLKSMLLLERNQT

SEQ ID NO: 49927 - protein, 511 aa, Homo sapiens
  DOMAIN (73)..(511): Adenosine-deaminase (editase) domain identified by PFam, accession name A_deamin, E-value=1.1e-27, PFam score of 98.5
  misc_feature (1)...(511): Xaa = X or * as defined in Table 2
EVSIPAQTMWTADEIAQLCYEHYGIRLPKKGKPEPSHEWTLLAAVVKIQSPADKACDTPDKPVQVTKEVVSMGTGTKCIGQSKMXRKNGDILNDSHAEVIARRSFQRYLLHQLQLAATLKEDSIFVPGTQKGVWKLRRDLINVFFSSHTPCGDASIIPMLEFEDQPCCPVFRNWANNSSVEASSNLEAPGNERKCEDPDSPVTKKMRLEPGTAAREVTNGAAHHQSFGKQKSGPISPGIHSCDLTVEGLATVTRIAPGSAKVTDVYRTGAKCVPGEAGDSGKPGAAFHQVGLLRVKPGRGDRTRSMSCSDKMARWTVLGCQGALLMHLLEEPIYLSAVVIGKCPYSQEAMQRALIGRCQKVSALPKGFGVQELKILQSDLLFEQSRSAVQAKRADSPGRLVPCGAAISWSAVPEQPLDVTANGFPQGTTKKTIGSLQARSQISKVELFRSFQKLLSRIARDKWPHSLRVQKLDTYQEYKEAASSYQEAWSTLRKQVFGSWIRNPPDYHQFK

SEQ ID NO: 49928 - protein, 31 aa, Homo sapiens
MEYRQYTRHRDYCGRSACTWTEADLRFILLT

SEQ ID NO: 49929 - protein, 117 aa, Homo sapiens
  DOMAIN (36)..(48): EUKARYOTIC PORIN SIGNATURE domain identified by eMATRIX, accession number PR00185C, p-value=7.333e-15, raw score of 13.61
AKIKTGYKREHINLGCDMDFDIVGPSIRGALVLGYEGWLAGYQMNFETAKSRVTQSNFAVGYKTDEFQLHTNVLLLNLERTCFLTGPTPTPPPLSWLPGTTFSLTWAMTGRYTINSQ

SEQ ID NO: 49930 - protein, 321 aa, Homo sapiens
  DOMAIN (102)..(118): EUKARYOTIC PORIN SIGNATURE domain identified by eMATRIX, accession number PR00185B, p-value=8.875e-21, raw score of 8.65
  DOMAIN (36)..(321): Eukaryotic porin domain identified by PFam, accession name Euk_porin, E-value=1.4e-98, PFam score of 340.9
  misc_feature (1)...(321): Xaa = X or * as defined in Table 2
AARSAPLPGSAPCLRVAAPAVAASEPAATSSEQKMAVPPTYADLGKSARDVFTKGYGFGLIKLDLKTKSENGLEFTSSGSANTETTKVTGSLETKYRWTEYGLTFTEKWNTDNTLGTEITVEDQLARGTXSLTFDSSFSPNTGKKNAKIKTGYKREHINLGCDMDFDIAGPSIRGALVLGYEGWLAGYQMNFXDCKIPEXPQSNFWQLANKTDEFQASRXMXNDGTEFGGSIYQKVNKKLETAVNLPWTAGNSNTRFEIAAKYQVDPDACFSGKVNNSSLIGLGYTQTLKPGIKLTLSALLDGKNVNAGGHKLGLGLEFQA

SEQ ID NO: 49931 - protein, 93 aa, Homo sapiens
  misc_feature (1)...(93): Xaa = X or * as defined in Table 2
CHPSSHVLCAPASLSDHQWPPPALCPSSRPQPCALPWSGTLSSRPQPCPTHPSGIEAXLCLPLVTQLGXLPLPAPQHLVPPCPSTCPTMLKLF

SEQ ID NO: 49932 - protein, 308 aa, Homo sapiens
VCQYCTARMADFGISAGQFVAVVWDKSSPVEALKGLVDKLQALTGNEGRVSVENIKQLLQCLVPGSTTLHSAEILAEIARILRPGGCLFLKEPVETAVDNNSKVKTASKLCSALTLSGLVEEKELQREPLTPEEVQSVREHLGHESDNLLFVQITGKKPNFEVGSSMQLKLSITKKSSPSVKPAVDPAAAKLWTLSANDMEDDSMDLIDSDELLDPEDLKKPDPASLRAASCGEGKKRKACKNCTCGLAEELEKEKSREQMSSQPKSACGNCYRGAMPSGCASCPYLGMPAFKPGEKVLLSDSNLHDA

SEQ ID NO: 49933 - protein, 412 aa, Homo sapiens
  misc_feature (1)...(412): Xaa = X or * as defined in Table 2
FPFWPAVFQVCQYCTARMADFGISAGQFVAVVWDKSSPVEALKGLVDKLQAFTPGNEGRVSVENIKAAVAILPTKNPSFGHYFVQCLVPGKAPLWHSAXDFWAGNPPGFLRPGWMFFFLKEPVETAVRXQXAKWKTASKLCSALTLSGLVEKLKELQREPLTPEEVQSVREHLGHESDNLLFVQITGKKPNFEVGSSRQLKLSITKKSSPSVKPAVDPAAAKLWTLSANDMEDDSMCIFCGCSLTHRWPLEHVVQVEIMMDQPKRRTRVDTFFTPRTPKFPSRSPASHFSFSIKQKTTRPVSLIALNTLQDLIDSDELLDPEDLKKPDPSLLRAASCGEGKKRKACKNCTCGLAEELEKEKSREQMSSQPKSACGNCYLGDAFRCASCPYLGMPAFKPGEKVLLSDSNLHDA

SEQ ID NO: 49934 - protein, 132 aa, Homo sapiens
  DOMAIN (44)..(126): Cytochrome c oxidase subunit VIa domain identified by PFam, accession name COX6A, E-value=0.0049, PFam score of -10.7
  misc_feature (1)...(132): Xaa = X or * as defined in Table 2
QDFGTRALAAVQIKNGGSWWCPPVSLAAGVGPRPQLGRPYVRVAPHGQVGLSFAMWKTLTFFRGASPGVGSQAMLKCVAXSPHHWRARRDPEFIAYPHLRIRTKPFPWGDGNHTQQYITPHVNPLSNLATED

SEQ ID NO: 49935 - protein, 149 aa, Homo sapiens; identical to SEQ ID NO: 35931

SEQ ID NO: 49936 - protein, 678 aa, Homo sapiens; identical to SEQ ID NO: 35933

SEQ ID NO: 49937 - protein, 84 aa, Homo sapiens
  misc_feature (1)...(84): Xaa = X or * as defined in Table 2
RRLWRGSCPRCGGKARDGMGVRGRYSEGRERVXFGGPPRGSTWPLCGRWRRPARPSAPLRWSAMCPNTSDAAGACAAAVRCGNT

SEQ ID NO: 49938 - protein, 19 aa, Homo sapiens
SRHFGRPRRADHEVPHLPG

SEQ ID NO: 49939 - protein, 156 aa, Homo sapiens
  misc_feature (1)...(156): Xaa = X or * as defined in Table 2
XLLLWSRARLQPQAPAAAEGGFGEAPAPGAEVEAARKAIRAAQVERYVPEHERCCWCLCCGCEVREHLSHGNLTVLYGGLLEHLASPEHKKATNKFWWENKAEVQMKEKFLVTPQDYARFKKSMVKGLDSYEEKEDKVIKEMAAQIREVEQSRQGX

SEQ ID NO: 49940 - protein, 741 aa, Homo sapiens
  DOMAIN (632)..(650): BURKITT'S LYMPHOMA RECEPTOR SIGNATURE domain identified by eMATRIX, accession number PR00564E, p-value=1.918e-23, raw score of 12.64
  DOMAIN (502)..(736): 7 transmembrane receptor domain identified by PFam, accession name 7tm_1, E-value=5.2e-81, PFam score of 259.5
MKKTEDNNALVFTVNVKANKHQKKLYDTDVAKVNTLIRPDGEKEHVRLAPDYNALDVANKIGIISTESMGHAVLAINGMDVNGRYTADGKEVLEYLGNPANYPVSIRFGRPRLTSNEKLMLASMFHSLFAIGSQLSPEQGSSGIEMLETDTFKLHCYQTLTGMHLHGGQRSVMEKVERYVPEHERCCWCLCCGCEVREHLSHGNLTVLYGGLLEHLARTASLVAAPNWKQFRCLSTGKWINNGIVFQDEDRIIDTYDTDESQKSRPGRRGATPPWMIQDEEYIAGNQEIGPSYEEFLKEKEKQKLKKLPPDRVGANFDHSSRTSAGWLPSFGRVWNNGRRWQSRAPEGEREVPWSEEQTPDPHTSRSLRIPAEVAPRSKRRCVLERKQPYSGDEWCSGPDSEEDDKPIGATHSKLLQRAVYTNSSASTPSYLCTLTGSFCLLTLPGKLRVLFWELDRLDNYNDTSLVENHLCPATEGPLMASFKAVFVPVAYSLIFLLGVIGNVLVLVILERHRQTRSSTETFLFHLAVADLLLVFILPFAVAEGSVGWVLGTFLCKTVIALHKVNFYCSSLLLACIAVDRYLAIVHAVHAYRHRRLLSIHITCGTIWLVGFLLALPEILFAKVSQGHHNNSLPRCTFSQENQAETHAWFTSRFLYHVAGFLLPMLVMGWCYVGVVHRLRQAQRRPQRQKAVRVAILVTSIFFLCWSPYHIVIFLDTLARLKAVDNTCKLKCLSPRGHHHV

SEQ ID NO: 49941 - protein, 238 aa, Homo sapiens; identical to SEQ ID NO: 35934
  misc_feature (1)...(238): Xaa = X or * as defined in Table 2

SEQ ID NO: 49942 - protein, 57 aa, Homo sapiens
  misc_feature (1)...(57): Xaa = X or * as defined in Table 2
ALHLNSSDVHQKLLPVQSLKKSXGRHRNNTCNQRVHASSTSREFFTKLNKDNDILKP

SEQ ID NO: 49943 - protein, 75 aa, Homo sapiens
  misc_feature (1)...(75): Xaa = X or * as defined in Table 2
KSVGPVNFPLPSGNMNEDNXMHXHPFSSVTQAFRLRVLQSIIQRPLXTFNPGSSSLFSSISGQSNFPLGVAVLRP

SEQ ID NO: 49944 - protein, 121 aa, Homo sapiens
  misc_feature (1)...(121): Xaa = X or * as defined in Table 2
NFKTLKNNXIYKXMCSQEIKILSXKLIRFWYEIHAFFPWAHGVVFCVAQEFCLPTVVLLPVPRLLIMKDMVRRLQELRHTEQVQRAYALNCGEGATVSYEIQIRVLREFGLADAAAELLQN

SEQ ID NO: 49945 - protein, 648 aa, Homo sapiens
  DOMAIN (195)..(210): RIBOSOMAL PROTEIN P2 SIGNATURE domain identified by eMATRIX, accession number PR00456E, p-value=7.674e-11, raw score of 3.06
  misc_feature (1)...(648): Xaa = X or * as defined in Table 2
KTPQVQQPFPRQTGAAGAGAPSGRSGERAAGRAGPSGGSGGGQDSAHAGEAYRVRGILLRKTFQCLKDYFLTYYTSSKVVPVKVPCRQVLTIDKCSLPRSSHRNARTVSNDFPRKSCSRERCTHCMRPPEGRRPPNGNMNSWKWPSGDESKWRRGEPGAVPEPEPLTGEERAAAAAVGGGWPGVLAPVRTAVLVAAAAEATAAVPAAAAAAGGASGHCNHPVMQGRNLSHRFLLPLHHSPYQFGTSSYSQQGYGCESKLYSLDHGHEKPQDKKKRTSGLATLKKKFIKRRKSNRSADHAKQMRELLSGWDVRDVNALVEEYEGTSALKELSLQASLARPEARTLQKDMADLYEYKYCTDVDLIFQETCFPVHRAILAARCPFFKITAFFLTRVWGRDNNGHQYSWYXYAHVFCFVTLPLYRRVWEWEDSRFQNVDILVQLSEGIWEHQIPLMXDMRGTLLIDMCYYDVVLSFSSDSELVEAFGGNQNCLDEELKAHKAVISARSPFFRNLLQRRIRTGEEITDRTLRTPTRIILDESIIPKKYATVILHCMYTDVVDLSVLHCSPSVGSLSEVQALVAGKPNMTRAEEAMELYHIALFLEFNMLAQGSCWECIPPNDEANQEQRSEGSRKWAPTREGSKGRSHASATQ

SEQ ID NO: 49946 - protein, 1280 aa, Homo sapiens
  DOMAIN (192)..(207): RIBOSOMAL PROTEIN P2 SIGNATURE domain identified by eMATRIX, accession number PR00456E, p-value=7.674e-11, raw score of 3.06
  DOMAIN (339)..(610): BTB/POZ domain identified by PFam, accession name BTB, E- value=1.2e-08, PFam score of 42.2
  misc_feature (1)...(1280): Xaa = X or * as defined in Table 2
MAGPQLTAADRGLGAGAPSGRSGERAAGRAGPSGGSGGGQDSAHAGEAYRVRGILLRKTFQCLKDYFLTYYTSSKVVPVKVPCRQVLTIDKCSLPRSSHRNARTVSNDFPRKSCSRERCTHCMRPPEGRRPPNGNMNSWKWPSGDESKWRRGEPGAVPEPEPLTGEERAAAAAVGGGWPGVLAPVRTAVLVAAAAEATAAVPAAAAAAGGASGHCNHPVMQGRNLSHRFLLPLHHSPYQFGTSSYSQQGYGCESKLYSLDHGHEKPQDKKKRTSGLATLKKKFIKRRKSNRSADHAKQMRELLSGWDVRDVNALVEEYEGTSALKELSLQASLARPEARTLQKDMADLYEYKYCTDVDLIFQETCFPVHRAILAARCPFFKTLLSSSPEYGAEIIMDINTAGIDMPMFSALLHYLYTGEFGMEDSRFQNVDILVQLSEEFGTPNSLDVDMRGLFDYMCYYDVVLSFSSDSELVEAFGGNQNCLDEELKAHKAVISARSPFFRNLLQRRIRTGEEITDRTLRTPTRIILDESIIPKKYATVILHCMYTDVVDLSVLHCSPSVGSLSEVQALVAGKPNMTRAEEAMELYHIALFLEFNMLAQGCEDIIAESISLDTLIAILKWSSHPYGSKWVHRQALHFLCEEFSQVMTSDVFYELSKDHLLTAIQSDYLQASEQDILKYLIKWGEHQLMKRIADREPNLLSGTAHSVNKRGVKRRDLDMEELREILSSLLPFVRIEHILPINSEVLSDAMKRGLISTPPSDMLPTTEEAKSVLDEMMVEQTVLVRLRMVRMSNVPDTLYMVNNAVPQCCHMISHQQISSNQSSPPSVVANEIPVPRLLIMKDMVRRLQELRHTEQVQRAYALNCGEGATVSYEIQIRVLREFGLADAAAELLQNPHKFFPDERFGDESPLLTMRQPGRCRVNSTPPAETMFTDLDSFVAFHPPLPPPPPPYHPPATPIHNQLKAGWKQRPPSQHPSRSFSYPCNHSLFHSRTAPKAGPPPVYLPSVKAAPPDCTSTAGLGRQTVAAAAATTTSTATAAAAAASEKQVRTQPVLNDLMPDIAVGVSTLSLKDRRLPELAVDTELSQSVSEAGPGPPQHLSCIPQRHTHTSRKKHTLEQKTDTRENPQEYPDFYDFSNAACRPSTPALSRRTPSPSQGGYFGPDLYSHNKASPSGLKSAYLPGQTSPKKQEEARREYPLSPDGHLHRQKNEPIHLDVVEQPPQRSDFPLAAPENASTGPAHVRGRTAVETDLTFGLTPNRPSLSACSSEAPEERSGRRLADX

SEQ ID NO: 49947 - protein, 718 aa, Homo sapiens
  DOMAIN (268)..(283): RIBOSOMAL PROTEIN P2 SIGNATURE domain identified by eMATRIX, accession number PR00456E, p-value=7.674e-11, raw score of 3.06
  misc_feature (1)...(718): Xaa = X or * as defined in Table 2
MEYYAAMKTKEIMSFALTWIELEAIVLCELTHVLSELMQKQKTKYHMLSLGSPVPTFALWNFDVAQDFHHFIENARSSQCRGRPRMTGAGAGAPSGRSGERAAGRAGPSGGSGGGQDSAHAGEAYRVRGILLRKTFQCLKDYFLTYYTSSKVVPVKVPCRQVLTIDKCSLPRSSHRNARTVSNDFPRKSCSRERCTHCMRPPEGRRPPNGNMNSWKWPSGDESKWRRGEPGAVPEPEPLTGEERAAAAAVGGGWPGVLAPVRTAVLVAAAAEATAAVPAAAAAAGGASGHCNHPVMQGRNLSHRFLLPLHHSPYQFGTSSYSQQGYGCESKLYSLDHGHEKPQDKKKRTSGLATLKKKFIKRRKSNRSADHAKQMRELLSGWDVRDVNALVEEYEGTSALKELSLQASLARPEARTLQKDMADLYEYKYCTDVDLIFQETCFPVHRAILAARCPFFKITAFFLTRVWGRDNNGHQYSWYXYAHVFCFVTLPLYRRVWKEDSRFQNVDILVQLSEEFGTPNSLDVDMRGLFDYMCYYDVVLSFSSDSELVEAFGGNQNCLDEELKAHKAVISARSPFFRNLLQRRIRTGEEITDRTLRTPTRIILDESIIPKKYATVILHCMYTDVVDLSVLHCSPSVGSLSEVQALVAGKPNMTRAEEAMELYHIALFLEFNMLAQGSCWECIPPNDEANQEQRSEGSRKWAPTREGSKGRSHASATQ

SEQ ID NO: 49948 - protein, 54 aa, Homo sapiens
SRKIQGLLKSCGKPVEELLAKLQGLHRQPGLRQPSPSHDGSLSPLQDRARTAHP

SEQ ID NO: 49949 - protein, 69 aa, Homo sapiens
EADMPDEINIDELLELESEEERSRKIQDFIQELLAKLQGLHRQPGLRQPSPSHDGSLSPLQDRARTAHP

SEQ ID NO: 49950 - protein, 190 aa, Homo sapiens
  misc_feature (1)...(190): Xaa = X or * as defined in Table 2
PTRPGQAGSSSAMAAQRLAKRVLSKLQSPSRARGPCAGSPGGLQKRGHARVTVKYDRPGSLQRRLDVEKWIDGPLEGLYRRQEADMPMRSNIDELLELESEEERSRKIQGVLRDSXKSCGKPVEDFIQELLAKLQGLHRQPGLRQPSPSHDGSLSPLQDRARTASPLTLLALFPGPPERRPALLCVLSCI

SEQ ID NO: 49951 - protein, 50 aa, Homo sapiens
  misc_feature (1)...(50): Xaa = X or * as defined in Table 2
PPSPPPLPPPPLPPAPSLPLSLPSFDLPQPPVLDTLGVLFXLCRKKISVS

SEQ ID NO: 49952 - protein, 102 aa, Homo sapiens
  DOMAIN (37)..(50): bZIP transcription factors basic domain proteins domain identified by eMATRIX, accession number BL00036, p-value=9.069e-09, raw score of 9.02
  DOMAIN (26)..(90): bZIP transcription factor domain identified by PFam, accession name bZIP, E-value=2.1e-12, PFam score of 49.2
FVPQQPPPPSPPQPSRLAPYPHPATTRGDRKQKKRDQNKSAALRYRQRKRAEGEALEGECQGLEARNRELKERAESVEREIQYVKDLLIEVYKARSQRTRSC

SEQ ID NO: 49953 - protein, 227 aa, Homo sapiens
  DOMAIN (60)..(75): WILM'S TUMOUR PROTEIN SIGNATURE domain identified by eMATRIX, accession number PR00049D, p-value=9.773e-11, raw score of 0.00
  misc_feature (1)...(227): Xaa = X or * as defined in Table 2
LTWMTERVDFTALLPLEPPLPPGTLPQPSPTPPDLEAMASLLKKELEQMEDFFLDAPLLPPPSPPPLPPPPLPPAPSLPLSLPSFDLPQPPVLDTLDLLAIYCRNEAGQEEVGMPPLPPPQQAPSFLLPPQPSRWGPLTHIPGQPTRGGPAKQKEERPRNKSAALKVTPSGKRARGXSPWRAKSQGLEGTEFASLKERAESVEREIQYVKDLLIEVYKARSQRTRSC

SEQ ID NO: 49954 - protein, 300 aa, Homo sapiens
  DOMAIN (221)..(231): C2HC-TYPE ZINC-FINGER SIGNATURE domain identified by eMATRIX, accession number PR00939A, p-value=8.364e-09, raw score of 8.95
  DOMAIN (206)..(260): Zinc finger, CCHC class domain identified by PFam, accession name zf-CCHC, E-value=5.9e-08, PFam score of 39.9
  misc_feature (1)...(300): Xaa = X or * as defined in Table 2
AAMATPARPGEAEDAAERPLQDEPAAAAAGPGKGRFLVRICFQGDEGACPTRDFVVGALILRSIGMDPSDIYAVIQIPGSREFDVSFRSAEKLALFLRVYEEKREQEDCWETFGGAGGEASPAXRRSSSSSGTRRWTWRTLXLGSSATATCWPCGESDRQVLDLDLGSTNARSSCARGRAGSGTCQGPSSWGPRGCYSWYKGQPKTCFKCGSRTHMSGSCTQDRCFRCGEEGHLSPYCRKGIVCNLCGKRGHAFAQCPKAVHNSVAAQLTGVAGHLNTRLPARVNTQASLSLLKCPKLFF

SEQ ID NO: 49955 - protein, 205 aa, Homo sapiens
  DOMAIN (119)..(154): Matrix protein (MA) p15. domain identified by eMATRIX, accession number PF01140D, p-value=3.400e-11, raw score of 15.54
  misc_feature (1)...(205): Xaa = X or * as defined in Table 2
QSPFNDTLPGVPVSAXLHSLPPEHHPSKGXGVAKSPPVYPAGILLVCNNCAAYRKLLEAQTPSVRKWALRRQNEPLEVRLQRLERERTAKKSRRDNETPEEREETDEQRARRLQRDREAMRLKRANETPEKRQARLIREREAKRLKRRLEKMDMMLRAQFGQDPSAMAALAAEMNFFQLPVNGVELDSQLLGKMAFEEQNSSSLH

SEQ ID NO: 49956 - protein, 625 aa, Homo sapiens
  DOMAIN (512)..(620): Occludin/ELL family domain identified by PFam, accession name Occludin, E-value=3.8e-15, PFam score of 59.2
DGRKMAALKEDRSYGLSCGRVSDGSKVSVFHVKLTDSALRAFESYRARQDSVSLRPSIRFQGSQGHISIPQPDCPAEARTFSFYLSNIGRDNPQGSFDCIQQYVSSHGEVHLDCLGSIQDKITVCATDDSYQKARQSMAQAEEETRSRSAIVIKAGGRYLGKKVQFRKPAPGATDAVPSRKRATPINLASAIRKSGASAVSGGSGVSQRPFRDRVLHLLALRPYRKAELLLRLQKDGLTQADKDALDGLLQQVANMSAKDGTCTLQDCMYKDVQKDWPGYSEGDQQLLKRVLVRKLCQPQSTGSLLGDPAASSPPGERGRSASPPQKRLQPPDFIDPLANKKPRISHFTQRAQPAVNGKLGVPNGREALLPTPGPPASTDTLSSSTHLPPRLEPPRAHDPLADVSNDLGHSGRDCEHGEAAAPAPTVRLGLPLLTDCAQPSRPHGSPSRSKPKKKSKKHKDKERAAEDKPRAQLPDCAPATHATPGAPADTPGLNGTCSVSSVPTSTSETPDYLLKYAAISSSEQRQSYKNDFNAEYSEYRDLHARIERITRRFTQLDAQLRQLSQGSEEYETTRGQILQEYRKIKKTNTNYSQEKHRCEYLHSKLAHIKRLIAEYDQRQLQAWP

SEQ ID NO: 49957 - protein, 447 aa, Homo sapiens
  misc_feature (1)...(447): Xaa = X or * as defined in Table 2
MSAKDGTCTLQDCMYKDVQKDWPGYSEGDQQLLKRVLVRAHNTQRQRQNERSDTRPCQRAAPRRFSHGTRRGTLPLASPDRARAPRTGHCRTQRRLDRTGGGFPPLTGAWAMLADWIHEGTPSRGRSDNDEPSAGSVGGLRQHGPGPRAPKLTTTKVKALASPVLGQKIAALCLGLTAQGLNIMDNPGSLAIHVHPDSVLTRKTNPCTHIWGFTQREPPLVANMSAKDGTCTLQDCMYKDVQKDWPGYSEGDQQLLKRVLVRAHNTQRQRQNERSDTRPCQRAAPRRFSHGTRRGTLPLASPDRARAPRTGHCRTQRRLDRTGGGFPPLTGAWAMLADWIHEGTPSRGRSDNDEPSAGSVGGLRHAWPRTKSPKANNHXSESTGQPGAGPKNCSPVLGAYSPGPQHHGQPGLPGHTCPSRTQCXPGRPTPAPTSGVSLRGNPLWWPT

SEQ ID NO: 49958 - protein, 346 aa, Homo sapiens
  DOMAIN (297)..(337): kw TRANSCRIPTASE REVERSE II ORF2 domain identified by eMATRIX, accession number DM01354H, p-value=4.375e-32, raw score of 18.00
  DOMAIN (108)..(324): AP endonuclease family 1 domain identified by PFam, accession name AP_endonucleas1, E-value=1.9e-05, PFam score of -33.9
  misc_feature (1)...(346): Xaa = X or * as defined in Table 2
SPCLLTGGHLPADTSYRRAPAGIWQVPLWDEASQRKEXYQHQQKKMSTQKPHPKDHNSSPAREQSSMENKFHELTEVGFRKITSLEKNINDLMELKNTARELREAYTSIKSRIDQAKESISEIEDQLNEIKCEDKVREKRMKSNKQNFQEIWDYVKRPNLRLTGVPESDRENGTKLENTLQEIIQENFPNLARQANIQIQEIQRTAQRQSSSRATPIHIIVRFAKFEIKEKMLRAAREKDISMRQKINKDIQDFNTVLDQVDLIHVYRTVHPKSSEYTFFSAPHHTYCKTGHIIGSKTLLSKCKRMEIITNTLSDYSAIKLELRIKKLTQNHTTTWKVNTLLVNEY

SEQ ID NO: 49959 - protein, 456 aa, Homo sapiens
  misc_feature (1)...(456): Xaa = X or * as defined in Table 2
AYELTPEPSPLPVFPVSADGSTTHPLADKRKASPVPEQHEEHLPARPVTQRCLTYPFPNITTASEFGPATGFRARRSGRGSTVCCNPGCYPRARPEPEPRGTPPSVSAPRAAQEAPARQRAGPVLADTVPSPAPRGKRDISPLFGNAHSASPKPSLDLWAPPPXAAGRRGPQQAXDVTEDTQQQQWSAMAVGGTAKWMAALGRFLVTYVEVEGVKLQTFTVTTLTQSFKYSLSKYLQQQPLLSSRTIYPTFYYLSLLRNLRAFKLNAAEAKPMSSPQNLVLFLCFLSLQMAAPPIRLQTKGKQAQCQSSTKSTFQRGRSLRGVSPTLSPTSQQPRNLDQQLASEQGEVGEAPLCAVIQGVIPVLGRSRSREEHPPVSALPGLHRKRQRDKEAGPVLADTVPFRPHAGKGTFLRCLETLTRRAPNPRWTFGLPLRKLQGAVAHSRPEIRTHSVPNRT

SEQ ID NO: 49960 - protein, 230 aa, Homo sapiens
  DOMAIN (19)..(43): PROTEIN NUCLEAR RIBONUCLEOPROTEIN SMALL MRNA RNA domain identified by eMATRIX, accession number PD01861A, p-value=7.158e- 18, raw score of 14.06
  DOMAIN (1)..(78): Sm protein domain identified by PFam, accession name Sm, E- value=0.043, PFam score of 8.3
  misc_feature (1)...(230): Xaa = X or * as defined in Table 2
DQDMTSSDIPVRLEGSLWLPXIFIGTFKAFDKHMNLILCDCDEFRKIKXGVDCGGRRLEDGNGLSGWAKQXSLVSMTVEGPPPKDVSQSRKPCWRRGGPTVSQALCXILYPSWGSHAPGSCRTCWASPWGWRAIPTGEELGKGYHLLVAKIKDKGEGPXFSNPVPTWPWGSSPTYGPRSTPSRXGAHKETSANXXKMPSWINDEIXPPMGMPPPGMRPPPPGMRGKCLQW

SEQ ID NO: 49961 - protein, 448 aa, Homo sapiens
  misc_feature (1)...(448): Xaa = X or * as defined in Table 2
MVFWARPRTLLLCAALGLGALYTATPAPTVAKRGQGTAQALSSEGASPKPWWLRHGIEPCKQSYWEVRTEQSPGVSERKAAAPVRGLEIKLPSPWDKAPEGGGGCGHSFSRLKCSFMPVLKRAVDLPAQRSSPANGQTACSSGSLAPVLPDWEIPPSKGRQTPYATGELRLASDGCPSGTKLPEEGTDSNLCCSASSAESNNININININKKDAHGKTPSKGPQHQRSKLDKSMKTRKNHHKNAENSKNLNASSPPKDHNSSTAKEQNWTENEFDELTEVGFRRRVIANSSKLKEHVLTQCKEAENFEKILEELLTRITSLEKNINDLMELKNTAQEHREAYTSINSQIDQAEERISEIEDKLNEIKREDKIRGKRIKRNKKSLQEIWDYVKRANLXLIAVVPLNKITSPRTSETLSTSTNMSRSTLSCLLSSFSCPASCTATSAALF

SEQ ID NO: 49962 - protein, 141 aa, Homo sapiens
  misc_feature (1)...(141): Xaa = X or * as defined in Table 2
GGRAAEGSQPPVAEPRCSRGARALPLPDTSWRQPSAPQAAPXDVELPASPSAPFAVLLSKPRLSQNKPKSPFSVASPXHGDKRPQPSRHLIXIPHLSSRAPVHSPLGWPSNRKHKHLRPDTAHAPAEGPPLNYVRKQQKQS

SEQ ID NO: 49963 - protein, 251 aa, Homo sapiens
  misc_feature (1)...(251): Xaa = X or * as defined in Table 2
RAAACGGAAPGRKRCAPGRKRCGPRRKRSLGPPTLGQRPRQPSQQLRKPRRRRGSPGSLPKSSPLPSSTGKTGWSTRGRSVRPPVTTSRCCPPGHPCSRRAPSCTARAPLPPTXPPTTAPCRASPPAPRPPRRPRPPPGTRSPTSRGRCRWTRSGAGTSRCSWRAGPGTAPAAAGARSRPGAPGVSAAVPCAAACSWMTSAPEVRAASSPGTPSRGSGGRSHPPCSRGLPTTGPATTAPEAPGCWSCRRRS

SEQ ID NO: 49964 - protein, 41 aa, Homo sapiens
  misc_feature (1)...(41): Xaa = X or * as defined in Table 2
XVFTEGPSAAELRNGCVDRASRHVEALLVFEQETCCEQESR

SEQ ID NO: 49965 - protein, 150 aa, Homo sapiens
  DOMAIN (56)..(64): MOLLUSC METALLOTHIONEIN SIGNATURE domain identified by eMATRIX, accession number PR00875B, p-value=5.622e-09, raw score of 5.24
  misc_feature (1)...(150): Xaa = X or * as defined in Table 2
RQDPVSGGQSCPASCPSLWAAARVWLGQPAPRARXCPVCSSCPGPGAPEDTPEAGGCGCSGCRCCLRTQEPPAPLQPPHPPMAQTPREEVGRRGWTPGCPGTDPCLWGLRLLCPLWDPHRSGTRPWAQVQRDTTETKAQRGLVRCQRGCG

SEQ ID NO: 49966 - protein, 70 aa, Homo sapiens
MSSSVLLKTRLPAMISWWQRWGSQVWTSPGRLGGQRGRKLEIVSLLGTGIPSIFPFEPLSRSVSKQVHGL

SEQ ID NO: 49967 - protein, 248 aa, Homo sapiens
VRPPSHVTADSGRSPLSLTYLPLQEPGDMAAAVPRAAFLSPLLPLLLGFLLLSAPHGGSGLHTKGALPLDTVTFYKDYGDKLNMELSEKYKLDKESYPVFYLFRDGDFENPVPYTGAVKVGAIQRWLKGQGVYLGMPGCLPVYDALAGEFIRASGVEARQALLKQGQDNLSSVKETQKKWAEQYLKIMGKILDQGEDFPASEMTRIARLIEKNKRSCKKAVCDFPGFGGGREGRVNLLAVSPLWNIRG

SEQ ID NO: 49968 - protein, 83 aa, Homo sapiens
IPGSTISWQGGGCGKIKGKVLAPCRSASPTLASRPAGDLPVCGHEREQRGRELRGLGANSRWHNGAGGADSRHPYLRHLQAAV

SEQ ID NO: 49969 - protein, 311 aa, Homo sapiens
  misc_feature (1)...(311): Xaa = X or * as defined in Table 2
LAVPRPAYGPRSPGSLLRIPVPGLHLLNLNVWSRGSAAALHTKGALPLDTVTFYKVIPKSKFVLVKFDTQYPYGEKQDEFKRFAENSASSDDLLVAEVGISDYGDKLNMELSEKYKLDKESYPVFYLFRDGDFEEPSSHYTGGSXRLGAIQRWLKGGKGVYLGDGLELVCTVXLTPLAGEFIRASGVEARQAPLEAGAQDNLSKCERRLRKKWAEQYLKIMGKILDQGEDFPASEMTTESLGLIEKNKMSDGKKEELQKSLNILTALPRRKGAEKRGAVNKAVCDFPRVWWEYGRGELTLLAVSPLWNIRG

SEQ ID NO: 49970 - protein, 215 aa, Homo sapiens
  DOMAIN (4)..(28): HMW KININOGEN SIGNATURE domain identified by eMATRIX, accession number PR00334B, p-value=4.330e-10, raw score of 8.69
  misc_feature (1)...(215): Xaa = X or * as defined in Table 2
HHHHHPHYHHHHHPHYHHHHHPQYHHHHPHYDHHRHRQGDHHGQLQYDDDHQPQCHQHDHLRCEHQHYIQXWLINNLRASRYKPLLNIMLVFAAEMIVLVALGLMVVVVLELTVVVALTMTVVVIVRMMGGDIGDDGGGGSGDDGGGGSGDDGGGVMWQFFDSMSKNDSIIPTTTTTIIPTTTTTITIRAEQFTILTWKPVVSSQKNTSSFRGLT

SEQ ID NO: 49971 - protein, 181 aa, Homo sapiens
MNLRDIRPAGEGEESSVGAFKSVHRLVNTYHTAGPGLIKTNVYGQLIVQQKLTSSSNQPDGVDATVPRILQTKVNHQTEKPFGFCQNEQTRGIATSGDPTSRRFSLCPPGFASVVLPAQNGFTCHQVRPSAFPPVTSLPSSAALSVPSADSPRFPQPAGCTLRLGPQAPCHLDVACWLACF

SEQ ID NO: 49972 - protein, 30 aa, Homo sapiens
  DOMAIN (3)..(30): INHIBITOR CALPAIN CALPASTATIN REPEAT THIOL PROT domain identified by eMATRIX, accession number PD01443O, p-value=4.600e- 33, raw score of 6.25
AASSSKAPKNGGKAKDSAKTTEETSKPKDD

SEQ ID NO: 49973 - protein, 245 aa, Homo sapiens
  DOMAIN (39)..(90): INHIBITOR CALPAIN CALPASTATIN REPEAT THIOL PROT domain identified by eMATRIX, accession number PD01443B, p-value=1.000e- 40, raw score of 15.02
  DOMAIN (72)..(198): Calpain inhibitor repeat domain identified by PFam, accession name Calpain_inhib, E-value=5e-44, PFam score of 159.7
MNPTETKAVKTEPEKKSQSTKLSVVHEKKSQEGKPKEHTEPKSLPKQASDTGSNDAHNKKAVSRSAEQQPSEKSTEPKTKPQDMISAGGESVAGITAISGKPGDKKKEKKSLTPAVPVESKPDKPSGKSGMDAALDDLIDTLGGPEETEEENTTYTGPEVSDPMSSTYIEELGKREVTIPPKYRELLAKPIGPDDAIDALSSDFTCGSPTAAGKKTEKEESTEVLKAQSAGTVRSAAPPQEKKRK

SEQ ID NO: 49974 - protein, 430 aa, Homo sapiens
  DOMAIN (63)..(100): INHIBITOR CALPAIN CALPASTATIN REPEAT THIOL PROT domain identified by eMATRIX, accession number PD01443I, p-value=1.000e- 40, raw score of 10.25
  DOMAIN (4)..(360): Calpain inhibitor repeat domain identified by PFam, accession name Calpain_inhib, E-value=8e-129, PFam score of 441.4
MGQFLSSTFLEGSPATVWHDKLCDGERRGAREAVRIFQDQAKAKEEKLEKCGEDDETIPSEYRLKPATDKDGKPLLPEPEEKPKPRSESELIDELSEDFDRSECKEKPSKPTEKTEESKAAAPAPVSEAVSRTSMCSIQSAPPEPATLKGTVPDDAVEALADSLGKKEADPEDGKPVMDKVKEKAKEEDREKLGEKEETIPPDYRLEEVKDNDGKPLLPKESKEQLPPMSEDFLLDALSEDFSGPQNASSLKFEDAKLAAAISEVVSQTPASTTQAGAPPRDTSSDKDLDDALDKLSDSLEQRQPDPDENKPMEDKVKEKAKAEHRDKLGERDDTIPPEYRHLLDDNGQDKPVKPPTKKSEDSKKPADDQDPIDALSGDLDSCPSTTETSQNTAKDKCKKAASSSKAPKNGGKAKDSAKTTEETSKPKDD

SEQ ID NO: 49975 - protein, 349 aa, Homo sapiens
  DOMAIN (26)..(64): INHIBITOR CALPAIN CALPASTATIN REPEAT THIOL PROT domain identified by eMATRIX, accession number PD01443A, p-value=1.000e- 40, raw score of 6.93
  DOMAIN (51)..(329): Calpain inhibitor repeat domain identified by PFam, accession name Calpain_inhib, E-value=1.1e-56, PFam score of 201.7
  misc_feature (1)...(349): Xaa = X or * as defined in Table 2
XTYAGGTASVTKVSAFSGATSKSYSMNPTETKAIPVSQQMEGPHLPNKKKHKKQAVKTEPEKKSQSTKLSVGSMISAGGESVAGITAISGKPGDKKKEKKSLTPAVPVESKPDKPSGKVRHGCWFGIDLIDTLGGPEETEEENTTYTGPEVSDPMSSTYIEELGKREVTIPPKYRELLAKKEGITGPPADSSKPIGPDDAIDALSSDFTCGSPTAAGKKTEKEESTEVLKAQSSRDKKKRKVEKDTMSDQALEALSASLGTRQAEPELDLRSIKEVDEAKAKEEKLEKCEPEEKRQSLGVNQNSIDELSEDFDRSECKEKPSKPTEKTEESKAAAPGSCVGGCVSDLHV

SEQ ID NO: 49976 - protein, 211 aa, Homo sapiens
  misc_feature (1)...(211): Xaa = X or * as defined in Table 2
LGRLSFPRPEQPDPGHRAHPSSPPRPRRPHARGRRGPRRHHYHDTGANRAPEVRPPCPESSPVGVAAFEPNGLRGQQPSPRSPGAPKGLXPTPPSASSSPKPREPSALGRPCCRCEESRFLEHRNSNPRVKDSRQARGRHAEFHGRTGVFERRRSRDHLPTHFPASVRWEKLSWCARKNGLSGLRLCHGSQHFSGYSNRKVGTESLNQVWE

SEQ ID NO: 49977 - protein, 362 aa, Homo sapiens
  DOMAIN (28)..(46): C-type lectin domain proteins domain identified by eMATRIX, accession number BL00615A, p-value=8.714e-12, raw score of 16.68
  DOMAIN (43)..(109): Lectin C-type domain identified by PFam, accession name lectin_c, E-value=0.016, PFam score of 1.2
IRANCHQEPSVCLQAACPESWIGFQRKCFYFSDDTKNWTSSQRFCDSQDADLAQVESFQELNFLLRYKGPSDHWIGLSREQGQPWKWINGTEWTRQLVMKEDGANLYVAKVSQVPRMNPRPVMVRTVSSGAGAKDELHIVEAEAMNDEGSPIKVTLATLKMSVQPTVSLGGFEITPPVDLRLKCGSGPVHISGQHLVAVKEGAESEDEEEEDVKLLSISGKQSAPGGGQKKVKLAAAADDDDDEDDDDDDDEEAEEKAPVKKSIRDTPAKNAQKSNQNGKDSKPSSTPRSKGQESFKKQEKSPKTPKGSSSVEDIKAKMQASIEKRGSLPKVETKFINYVKNFFWMTDQEAIQDLWQWRKSL

SEQ ID NO: 49978 - protein, 203 aa, Homo sapiens; identical to SEQ ID NO: 37969
  DOMAIN (33)..(76): p53 tumor antigen proteins domain identified by eMATRIX, accession number BL00348F, p-value=8.780e-10, raw score of 23.19

SEQ ID NO: 49979 - protein, 205 aa, Homo sapiens
FSYLPPGPSHGTWGLWELQFKMRFGVCRHLMEDSMDMDVSPLRPQNYLFSCELKADKDDHFKVDNDENEHQLSLRTPTVSLGVFEITPPVLLWLKCGSGPVHISGQHLVAVEEDAESEDEEEEDVKLLRISGKTKTFMATNGKEYKHYKISSEKSLDNKYKTRTPGFQAFGFEDLHPWPLGSQAFYLSLRVTPPVFLVLRLLDFD

SEQ ID NO: 49980 - protein, 276 aa, Homo sapiens
  misc_feature (1)...(276): Xaa = X or * as defined in Table 2
MEDSMDMDMSPLRPQNYLFGCELKADKDYHFKVDNDENEHQLSLRTVSLGAGAKDELHIVEAEAMNYEGSPIKVTLATLKMSVQPTVSLGGFEITPPVVLRLKCGSGPVHISGQHLVAVEEDAESEDEEEEDVNRVLFMKPKRQGPQAYVRGFGVQLEIGSHXDPEQQFXRDSAQPSLATPSTPHLQALLCLSGQVLRLPLWGQRLXGLQGLLPPQHPEEHGVHVSPGQELHHQQGDPEPLPVLPTAEVLXSGHVQGVCEKRPKQEEEGGAQARVL

SEQ ID NO: 49981 - protein, 228 aa, Homo sapiens
  DOMAIN (127)..(168): RHO protein GDP dissociation inhibitor domain identified by PFam, accession name Rho_GDI, E-value=0.055, PFam score of 11.0
MDMSPLRPQNNLFRCELKADNHFQVDNDENEHQLSSRTVSSGAGAKDELHIVEAEAMNYEGSPIKVTLATLKMSVQPTVSLGGFEITPPVVLRLKCGSGPVHISGQHLVTVEEDSEAEDEEQEDVKLLSGSKVPQKKVKLAADEEDDDDDFDDEETEEKAPVKKSIQDTRAKNAQKSNQNGKDSKPSTPRSKGQESFKKQEKIPKTPKGPSSVEDIKAKMQASIQKAY

SEQ ID NO: 49982 - protein, 177 aa, Homo sapiens
  misc_feature (1)...(177): Xaa = X or * as defined in Table 2
DSVLRGCSLEQRSFISVRLLSYLSACRHPMEDSMDMDMSPLRPQNYLFGCELKADKDYHFKVDNDENEHQLSLRTVSLGAGAKDELHIVEAEAMNYEGSPIKVTLATLKMSVQPTVSLGGFEITPPVVLRLKCGSGPVHISGQHLVVYRRKHQELQAMQMDCRALSTSXASSAPRPS

SEQ ID NO: 49983 - protein, 413 aa, Homo sapiens
  DOMAIN (111)..(236): RNase H domain identified by PFam, accession name rnaseH, E- value=0.00071, PFam score of -7.3
MRPRTLVFLQSSEPYHFGALAGNSFNGLGMVFLQNPCKHFKINPGLLAITSGRPRENSSPKLEKQLPGEPSEDPPYFGPLQVPFSLQDLKQIKRNLGRFSNDTDRNQEEAQKKERKLKRRTEALAAALQVCKIQDPQGTSAELAELIALTRALKLSKGKVAAIYTNSKYAFLTLHTHAAIQKERHFLTTNESPIKYCQEIGRLLSSVFLPQKIAVMRYRGHQKETDKKGYTRQQFCQESTLNKGDRVIYNLTRPPYCCVQFPIAGMGSNILYLTRLASNLELFKRGKGRGKQRKEEVTCGMLRKIFKNVPWCDSVLRGCSLEQRSFISVRLLSYLSACRHPMEDSMDMDMSPLRPQNYLFGCELKADKDYHFKVDNDENEHQLSLRTVSLGAGAKDELHIVEAEAMNYEGKSN

SEQ ID NO: 49984 - protein, 91 aa, Homo sapiens
  misc_feature (1)...(91): Xaa = X or * as defined in Table 2
AHDIGCPEVSPLVLEVARDEGPAHRPRFSHXSSHCSHWGTSQRAAPPPCHPCIQTTWPGAVTGLGGXPKTRSGPGKDRSSGAASSFPGGRV

SEQ ID NO: 49985 - protein, 654 aa, Homo sapiens
  DOMAIN (604)..(646): Kringle domain proteins domain identified by eMATRIX, accession number BL00021D, p-value=3.250e-32, raw score of 24.56
  DOMAIN (96)..(418): Kringle domain identified by PFam, accession name kringle, E- value=2.7e-150, PFam score of 512.7
  misc_feature (1)...(654): Xaa = X or * as defined in Table 2
LTALPPAVSPGGHSSSSSSRTISGITXELQRLLQAVVPGPWQEDVADAEECAGRCGPLMDCRAFHYNVSSHGCQLLPWTQHSPHTRLRHSGRCDLFQEKGEWGYMPTLRNGLEENFCRNPDGDPGGPWCHTTDPAVRFQSCGIKSCRVAACVWCNGEEYRGAVDRTESGRECQRWDLQHPHQHPFEPGKFLDQGLDDNYCRNPDGSERPWCYTTDPQIEREFCDLPRCGSEAQPRQEATSVSCFRGKGEGYRGTANTTTAGVPCQRWDAQIPHQHRFTPEKYACKDLRENFCRNPDGSEAPWCFTLRPGMRVGFCYQIRRCTDDVRPQDCYHGAGEQYRGTVSKTRKGVQCQRWSLETGXDYPATTSLPLPPRFTFTSEPHAQLEENFCRDPDGDSHGPWCYTMDPRTPFDYCALRRCDQVQFEKCGKRVDRLDQRCSKLRVAGGHPGNSPWTVSLRNWQGQHFCGGSLVKEQWILTARQCFSSCHMPLTGYEVWLGTLFQNPQHGEPGLQRVPVAKMLCGPSGSQLVLLKLERYVDNLGGWTKCEIAGRGETKGTGNDTVLNVALLNVISNQECNIKHRGHVRESEMCTEGLLAPVGACEGDYGGPLACFTHNCWVLKGIRIPNRVCARSRWPAVFTRVSVFVDWIHKVMRLG

SEQ ID NO: 49986 - protein, 764 aa, Homo sapiens
  DOMAIN (591)..(609): Kringle domain proteins domain identified by eMATRIX, accession number BL00021B, p-value=9.769e-19, raw score of 13.33
  DOMAIN (87)..(484): Kringle domain identified by PFam, accession name kringle, E- value=7.1e-115, PFam score of 395.0
  misc_feature (1)...(764): Xaa = X or * as defined in Table 2
HSAGQRSPSNDFQVLRGTELQHLLHAVVPGPWQEDVADAEECAGRCGPLLLSRAFHYNVSSHGCQLLPWTQHSPHSRLWHSGRCDLFQEKGEWGYMPTLRNGLEENFCRNPDGDPGGPWCHTTDPAVRFQSCGIKSCRVAACVWCNGEEYRGAVDRTESGRECQRWDLQHPHQHPFEPGKFLDQGLDDNYCRNPDGSERPWCYTTDPQIEREFCDLPRCGSEAQPRQEATSVSCFRGKGEGYRGTANTTTAGVPCQRWDAQIPHQHRFTPEKYACKVRWAGGRALGRAAAGETGGGXSRAXGWRLAGXGXVERLLRDLRENFCWNLDGSEAPWCFTLRPGTRVGFCYQIRRCTDDVRPQDCYHGAGEQYRGTVSKTRKGVQCQRWSAETPHKLQXVPGAPGPARALTLGRHALMSGTRAWKWLRLSLPRFRSRSRLGSRLTSEPHAQLEENFCRDPDGDSHGPWCYTMDPRTPFDYCALRRCADDQPPSILDPPPDQVQFEKCGKRVDRLDQRRSKLRVAGGHPGNSPWTVSLRNRXGTTACLPQRGAEVVSSVVMPLGAGNLSLPPEVLARRWQVXHLSQESVPCPNSPLLXQGQHFCGGSLVKEQWILTARQCFSSCEPPLCLGTQSHPTFPFPQASXQVSLGATDXESQMTXQSFSPSHMPLTGYEVWLGTLFQNPQHGEPGLQRVPVAKMLCGPSGSQLVLLKLERSVTLNQRVALICLPPEXYVVPPGTKCEIAGRGETKGTGNDTVLNVALLNVISNQ

SEQ ID NO: 49987 - protein, 706 aa, Homo sapiens
  DOMAIN (655)..(697): Kringle domain proteins domain identified by eMATRIX, accession number BL00021D, p-value=1.938e-24, raw score of 24.56
  DOMAIN (102)..(440): Kringle domain identified by PFam, accession name kringle, E- value=5.7e-198, PFam score of 671.1
  misc_feature (1)...(706): Xaa = X or * as defined in Table 2
PAPTHAHSAGQRSPLNDFQVLRGTELQHLLHAVVPGPWQEDVADAEECAGRCGPLMDCRAFHYNVSSHGCQLLPWTQHSPHTRLRRSGRCDLFQKKDYVRTCIMNNGVGYRGTMATTVGGLPCQAWSHKFPNDHKYTPTLRNGLEENFCRNPDGDPGGPWCYTTDPAVRFQSCGIKSCREAACVWCNGEEYRGAVDRTESGRECQRWDLQHPHQHPFEPGKFLDQGLDDNYCRNPDGSERPWCYTTDPQIEREFCDLPRCGSEAQPRQEATTVSCFRGKGEGYRGTANTTTAGVPCQRWDAQIPHQHRFTPEKYACKDLRENFCRNPDGSEAPWCFTLRPGMRAAFCYQIRRCTDDVRPQDCYHGAGEQYRGTVSKTRKGVQCQRWSAETPHKPQFTFTSEPHAQLEENFCRNPDGDSHGPWCYTMDPRTPFDYCALRRCADDQPPSILDPPDQVQFEKCGKRVDRLDQRCSKLRVAGGHPGNSPWTVSLRNWQGQHFCGGSLVKEQWILTARQCFSSCHMPLTGYXGMVGATFFQNPQHGEPSLQRVQXAKMLCGPSGSQLVLLKLERSVTLNHRVWALIILPPEWYVVPPGTKCEIAGWGETKGTGNDTVLNVALLNVISNQECNIKHRGRVRESEMCTEGLLAPVGACESDYGGPLACFTHNCWVLEGIIIPNRVCARSRWPAVFTRVSVCFVDWIHKVMRLG

SEQ ID NO: 49988 - protein, 55 aa, Homo sapiens
  misc_feature (1)...(55): Xaa = X or * as defined in Table 2
WCSAWHSWLPHSPSGPAASYPPAACRSAPQWPDPXRXCPRTHRRRSPWRAPWHCP

SEQ ID NO: 49989 - protein, 165 aa, Homo sapiens
  DOMAIN (72)..(89): Zinc finger C2H2 type, domain proteins. domain identified by eMATRIX, accession number BL00028, p-value=9.550e-13, raw score of 16.07
  DOMAIN (43)..(121): Zinc finger, C2H2 type domain identified by PFam, accession name zf-C2H2, E-value=6e-18, PFam score of 73.1
GRGGGGVRRCARPAPGRPPAAARRRGDQRGGRLGRHVPGKTFCCGICGRGFGRRETLKRHERIHTGEKPHQCPVCGKRFRESFHLSKHHVVHTRERPYKCELCGKVFGYPQSLTRHRQVHRLQLPCALAGAAGLPSTQGTPGACGPGASGTSAGPTDGLSYACSD

SEQ ID NO: 49990 - protein, 485 aa, Homo sapiens
  DOMAIN (431)..(448): Zinc finger C2H2 type, domain proteins. domain identified by eMATRIX, accession number BL00028, p-value=4.600e-13, raw score of 16.07
  DOMAIN (21)..(481): Zinc finger, C2H2 type domain identified by PFam, accession name zf-C2H2, E-value=1.8e-31, PFam score of 118.0
  misc_feature (1)...(485): Xaa = X or * as defined in Table 2
GRRRGGGGRCWRGCQSGPERFSCATCGQSFKHSWDLVTHKYVHLMLLLPPSCEAVAPRGWRRSCSCPECCRVCELSSAARSATARCFRRRSPSHAQPAPGPQVPQDWRSPRARIRLPVGPVGMPAFPTSASGKAWPSLRSVSPHAFWKYHTSPPAMQPSGPLWASVPACAPXKNIPSPTIWQRLAFSGLGLPICWVENHGPATSSQWLVSGPRSPHLLSRAEHPFSRPLPRWVATAERQRRPSGKRTNPFPASPAPPPGAGPEVSVPPAGALPGEALGPARDLWPCSSWTXAGLPALGDTGGGEAPAPAAAAEPSEDTLYQCDCGTFFASAAALASHLEAHSGPATYGCGHCGALYAALAALEEHRRVSHGEGGGEEAATAAREREPASGEPPSGSGRGKKIFGCSECEKLFRSPRDLERHVLVHTGEKPFPCLECGKFFRHECYLKRHRLLHGTERPFPCHICGKGFITLSNLSRHLKLHRGMD

SEQ ID NO: 49991 - protein, 118 aa, Homo sapiens
  DOMAIN (1)..(57): Eukaryotic protein kinase domain identified by PFam, accession name pkinase, E-value=1.3e-13, PFam score of 53.0
DDTPEEILARIGSVKYALSGGNWDSISDAAKDVVSKMLHVDPHQRLTAMQVLKHPWVVNREYLSPNQLSRQDVHLVKGAMAATYFALNRTPHAPRLEPVLSSNLAQRRGMKRLTSTRL

SEQ ID NO: 49992 - protein, 601 aa, Homo sapiens
  DOMAIN (451)..(467): Protein kinases ATP-binding region proteins domain identified by eMATRIX, accession number BL00107B, p-value=6.786e-11, raw score of 13.31
  DOMAIN (107)..(535): Eukaryotic protein kinase domain identified by PFam, accession name pkinase, E-value=4.8e-48, PFam score of 173.0
  misc_feature (1)...(601): Xaa = X or * as defined in Table 2
LKAIKRHPFFVTIDWNVSCMPQSPPPFKPAVGRPEDTFHFDPEFTARTPTGVCHSGSLYNAHHLFRGFSFVASSLIQEPSQQDLHKVPVHPIVQVTVFACSGFTDGYEIKEDIGVGSYSVCKRCVHKATDTEYAVKVRQACXVSSLVFPAGTGAPGIGEYGSGKLVSILCAQDSPHNLLPQRKVEKPSLSILVGESRSHVDKGQEVDILEMGMEFFFFIEFLVSPLATGXCFPMARSPCMGCSLSVCTALXGQPLQGNTPTFKYQQVTWPQAKPPTPTAVLSPETANVTSPQEQTRCLLKDRWLYPVVRNSSTRGPSEEIEILLRYGQHPNIITLKDVSGPRATASLVMELMRGGELLDRILRQRYFSEREASDVLCTITKTMDYLHSQGVGAMPGAAFNILYRDESGSPESIRVCDFGFAKQLRAGNGLLMTPCYTANFVAPEVSIPRLQTQACDIWSLGILLYTMLAGXAVTSNRCHDTPEEILARIGSGKYALSGGNWDSISDAAKVSTCPSVALDPHQRLTAMQVLKHPWVVNREYLSPNQLSRQDVHLVKVPAGAVRTEWWEWDLNRTPQAPRLEPVLSSNLAQRRGMKRLTSTRL

SEQ ID NO: 49993 - protein, 328 aa, Homo sapiens
  DOMAIN (112)..(189): TFIIE beta subunit core domain identified by PFam, accession name TFIIE_beta, E-value=7.6e-32, PFam score of 119.2
  misc_feature (1)...(328): Xaa = X or * as defined in Table 2
REAGRGCSAGVGGRPRRRRRKGAASRARLPFSLSIMDPSLLRERELFKKRALSTPVVEKRSASSESSSSSSKKKKTKVEHGGSSGSKQNSDHSNGSFNLKALSGSSGYKFGVLAKIVNYMKDTGIQRGDTHPLTLDEILDETQHLDIGLQQKQWLMTEALVNNPKIEVIDGKYAFKPKYNVRDKKALLMLLDQHDQRGLGGILLEDIEEALPNSQKAVKALGDQIPICXSGPVRRKILFFNDKSCQFSVGXRIFRKLWEECQLVDSHGTEEKIEEYLEADRVFSSHARESGPKKVGPYSRRKGKSPAFTRKKPTFLRTSLTNHLAWNC

SEQ ID NO: 49994 - protein, 303 aa, Homo sapiens
  misc_feature (1)...(303): Xaa = X or * as defined in Table 2
AHPHSPRRTLERQARISGAGRRSSPNAANRGSAPPSRRLASFCTAGSAGRPAXSSPCSGPWTAVSAPRSPGPRGGGRPPSPGRRRPCCSVFSGGASPSSARVSSPSGSCSASPPAAPAAWSLRGCGCWPGVWEVHVNTGGDSVAAPAAWGSRAACGPNLGCGSHPRAGRRAGHRCGHPWSPRPAPRPSCCGRSPRPGPPGASGCPRPAPRPPTPASRSGRPCSWRRARAAGWPRGWWGSSAGGCRRGSGRREWCPCGTARGSPAAGVSRWTAPRCRHRRSDASASGTPARFPGAGRKGRTLWQ

SEQ ID NO: 49995 - protein, 474 aa, Homo sapiens
  DOMAIN (372)..(413): Chaperonins TCP-1 proteins domain identified by eMATRIX, accession number BL00750F, p-value=8.054e-09, raw score of 18.40
  misc_feature (1)...(474): Xaa = X or * as defined in Table 2
SKMSRLEAKKPSLCKSEPLTTERVRTTLSVLKRIVTSCYGPSGRLKQLHNGFGGYVCTTSQSSALLSHLLVTHPILKILTASIQNHVSSFSDCGLFTAILCCNLIENVQRLGLTPTTVIRLNKHLLSLCISYLKSETCGCRIPVDFSSTQILLCLVRSILTSKPACMLTRKETEHVSALILRAFLLTIPENAEGHIILGKSLIVPLKGQRVIDSTVLPGILIEMSEVQLMRLLPIKKSTALKVALFCTTLSGDTSXPGEGTVVVSYGVSLENAVLDQLLNLGRQLISDHVDLVLCQKVIHPSLKQFLNMHPIIAIDRIGSDSDVEPLDLKWTGTQPIGSLGSICPNSYGSVKDVCTAKFGSKHFFHLIPNEATICSLLLCNRNDTAWDELKLTCQTALHVLQLTLKEPWALLGGGCTETHLAAYIRHKTHNDPESILKDDECTQTELQLIAEAFCSALESVVGSLEHDGGEILN

SEQ ID NO: 49996 - protein, 218 aa, Homo sapiens
  DOMAIN (12)..(37): 7 kw REVERSE TRANSCRIPTASE RNA POLYMERASE domain identified by eMATRIX, accession number DM00895E, p-value=7.724e-10, raw score of 15.72
  DOMAIN (1)..(218): Reverse transcriptase domain identified by PFam, accession name rvt, E-value=8e-29, PFam score of 109.2
LMPKPGRDTTKKENFRPISLMNINAKILNKILANQIQQHIKKLINHDQVGFIPGMQGWFNIHKSINVIHHIKRTNDKNHMIISIDAGKAFNKIQQCFMLKTLNKLNIHGVYLKIIRAIYDKPPANIILNGEKLEAFPLKTGIRQGCPLLRNIVLEVLARAIRQEKEIKGIQSGNEEVKLSLFADDMIVYLENPIVSAQNLLKLISNFSKVSGYKISVQ

SEQ ID NO: 49997 - protein, 278 aa, Homo sapiens
  DOMAIN (126)..(171): kw TRANSCRIPTASE REVERSE II ORF2 domain identified by eMATRIX, accession number DM01354N, p-value=2.620e-40, raw score of 13.17
  DOMAIN (79)..(278): Reverse transcriptase domain identified by PFam, accession name rvt, E-value=0.0079, PFam score of -29.4
MGDFNTPLSTLDRSTRQKVNKDIQELNSALYQVDLIDIYRTLHPKSTEYTFFSAPHHTYSKIDHIVGSKALLSKCKRTEIITNCLSDHSAIKLELTIKKLTQNRSTTWKLNNLLLNDYWKYKQPSENKHLYANKLENLEEMDKFLDTYTLPRLNQEEVESLNRPITRSEIEAITNSLPTKKSPGPDGFTAEFYQMLEVLARAIRQEKEIKGIQLVKEEVKLSLFADDMIVYLENPIVSAQNLLKLIGNFSKVSGYKINVQKSQAFLYTNNRQTESQIM

SEQ ID NO: 49998 - protein, 506 aa, Homo sapiens; identical to SEQ ID NO: 37436
  DOMAIN (211)..(258): kw TRANSCRIPTASE REVERSE II ORF2 domain identified by eMATRIX, accession number DM01354V, p-value=1.000e-40, raw score of 12.97
  DOMAIN (2)..(224): Reverse transcriptase domain identified by PFam, accession name rvt, E-value=1.7e-05, PFam score of 8.3

SEQ ID NO: 49999 - protein, 486 aa, Homo sapiens; identical to SEQ ID NO: 38995
  DOMAIN (234)..(281): kw TRANSCRIPTASE REVERSE II ORF2 domain identified by eMATRIX, accession number DM01354V, p-value=1.000e-40, raw score of 12.97
  DOMAIN (1)..(247): Reverse transcriptase domain identified by PFam, accession name rvt, E-value=1.8e-06, PFam score of 22.1

SEQ ID NO: 50000 - protein, 782 aa, Homo sapiens; identical to SEQ ID NO: 34341
  DOMAIN (40)..(86): kw TRANSCRIPTASE REVERSE II ORF2 domain identified by eMATRIX, accession number DM01354O, p-value=1.000e-40, raw score of 8.73
  DOMAIN (73)..(298): Reverse transcriptase domain identified by PFam, accession name rvt, E-value=2.9e-46, PFam score of 167.1
  misc_feature (1)...(782): Xaa = X or * as defined in Table 2

SEQ ID NO: 50001 - protein, 606 aa, Homo sapiens
  DOMAIN (56)..(103): kw TRANSCRIPTASE REVERSE II ORF2 domain identified by eMATRIX, accession number DM01354V, p-value=1.000e-40, raw score of 12.97
  DOMAIN (382)..(581): Reverse transcriptase domain identified by PFam, accession name rvt, E-value=4.1e-05, PFam score of 2.9
MDKFLNTNTLPRLNQEEVDSLNRPITGSEIVAIVNSLPTKKSPGPDGFTAEFYQRYKEELRIKYLGIQLTKDVKDLFKENYKPLLKEIKEDKNKWKNIPCSWVGRINIMKMAILPKVIYRFNAIPIKLPMTFFIELEKTTLKFIWNQKRALIAKSILSQMNRAGGIMLPDFKLYYMATVTKTAWYWYQNRDIDQWNRTEPSEITPHIYNYLIFDKPEKNKKWGKDSLFNKWCWENWLAICRKLKLDPFLTPYTKINSRWIKDLNVRPKTIKTLEENLGITIQDTGMGKDFMSKTPKAMATKAKIDKWDLIKLKSFCTAKETTIRVNRQPTKWEKIFATYSSDKGLISRIYNELKQIYKKKTNNPIKKWAKDMNRHFSKEDIYAAKKHMKKCSPSLAIREMQIKTTMRYHLTPVRMAIIKKSGNNRAGRCQEQSGAQPPTELMGWEPRAPKCSCSRLALAHDPSIPALSDFGTDKEGDQVLEVLARAIRQEKEIKGIQLGKEEVKLALFADDMIVYLENPIISAQKLLKLIDNFSKVSGYKINVQKSQAFLYTNNRQTESQIMSELPFIIASKRIKYLGIHLTRDVKDLFKKNYKPLLNEIKVDTNK

SEQ ID NO: 50002 - protein, 574 aa, Homo sapiens
  DOMAIN (410)..(457): kw TRANSCRIPTASE REVERSE II ORF2 domain identified by eMATRIX, accession number DM01354V, p-value=1.000e-40, raw score of 12.97
  DOMAIN (185)..(424): Reverse transcriptase domain identified by PFam, accession name rvt, E-value=4.6e-07, PFam score of 30.6
MELKTKARELREECRSLRSRCDQLEERPNLRLIGVPESDGENGTKLENTLQDIIQENFPNLAKQVNVQIQEIQRTPQRYSLRRATPRHIIVRFTKVEMKEKMLRAAREKGRVTLKGKPIRLTADLSAETLQARREWGPIFNILKEKNFQPRISYPAKLSFISEGEIKSFTDKQMLRDFVTTRPALQELLKEALNMERNNRSWFFEKINKIDRPLARVIKKKREKNQIDAIKNDKEDITTNPTEIQTIIREYYKHLYPNKLENLEEMDTFLDTYTFPRLNQEEVESLNTSITGSEIVAIISNSIPTKKSPGPDGSTAEFYQMLEVLARAIRQEKEIKGIQLGKEEVKLSLFADDMIVYLENPIVSAQNLLKLISNFSKVSGYKINVQKSQAFLYTNNRQTESQIMSELPFTIASKRIKCLGIQLTRDVKDLFKENYKPLLKEIKEDTNKWKNIPCSWVGRINIVKMAILPKVIYRFNAIPIKLPMTFFTDLEKTTLNFIWNQKRARITKSILSQKNKAGGITLPDFKLYYTATVTKTAWYWYQNRWYWYQNRDIDQWNRTEPSEITPHVYNYLIF

SEQ ID NO: 50003 - protein, 572 aa, Homo sapiens
  DOMAIN (259)..(304): kw TRANSCRIPTASE REVERSE II ORF2 domain identified by eMATRIX, accession number DM01354N, p-value=1.000e-40, raw score of 13.17
  DOMAIN (266)..(472): Reverse transcriptase domain identified by PFam, accession name rvt, E-value=9.2e-10, PFam score of 45.9
MHNTDGNRFLSHWGYRQALSISKPASASLHPSSKTKPLGTQSKTVVAKRNREHGKKERSSSPAMEQSWMENDFDELREEGFRRSNYSELREDIQTKGKEVENFEKNLEECITRITNTEKCLKELMELKTKARELREECRSLRSRCDQLEERRKQERSKIDTLTSQLKELEKQEQTHSKAGRRQEITKIRAELKEIETQKTLQKINESRSWFFERINKIDRPLARLIKKKREKNQIDTIKNDKGDITTDPTEIQTTIREYYKHLYANKLENLEEMDTFLDTYTLPRLNQEEVESLNRPITGSEIVAIINSLPTKKSPGPDGFTAEFYQRYKEELHINRAKDKNHMIISIDAEKAFDKIQQPFMLKTLNKLVLEVLARAIRQEKEIKGIQLGKEEVKLSLFADDMIVYLENPIVSAQNLLKLLSNFSKVSGYKINVQKSQAFLYTNNRQTESQIMSELPFTIASKRIKYLGIQLTRDVKHLFKENYKPLLKEIKEDTNKWKNIPCSWVGRINIVKMAILPKVIYRFNAVPIKLPMTFFTELEKTTLKFIWNQKRACIAKSILSQKNKAGGITLP

SEQ ID NO: 50004 - protein, 711 aa, Homo sapiens; identical to SEQ ID NO: 33856
  DOMAIN (197)..(238): kw TRANSCRIPTASE REVERSE II ORF2 domain identified by eMATRIX, accession number DM01354I, p-value=7.511e-34, raw score of 15.55
  DOMAIN (1)..(184): AP endonuclease family 1 domain identified by PFam, accession name AP_endonucleas1, E-value=2.2e-27, PFam score of 104.4
  misc_feature (1)...(711): Xaa = X or * as defined in Table 2

SEQ ID NO: 50005 - protein, 438 aa, Homo sapiens
  DOMAIN (110)..(151): kw TRANSCRIPTASE REVERSE II ORF2 domain identified by eMATRIX, accession number DM01354I, p-value=1.000e-40, raw score of 15.55
  DOMAIN (177)..(414): Reverse transcriptase domain identified by PFam, accession name rvt, E-value=5e-07, PFam score of 30.1
MGDFNTPLPTLDRSTRQKVNKDTQELNSDLHQVDLIDIYRTLHPKSTEYTFFSAPHHTYSKIDHILGRKAFLSKCKRIEIITTCLSDHSTIKLELRIKKLTQNHSTTWKLNNLLLNDYWLHNEMKAEIKMFFETNENKDTTYQNLWDTFKAVCRGKFIALNAHKTKQERSKIDTLTSQLKELQKQEKTHSKASRRQKITKLRAELKGLEIQKTLQKINESRRWFFERLNKEEVESLNGPTTGSEIMAVINSLTTKKSPGPDGFTAEFYQRYKEELHINRTKDKNHMIILIDAEKAFDEIQQLFLLKTLNKVVLEVLARAIRQEKEVKVIQLGKEEVKLSLFADDMIVFLENPIVSAQNLLKLISNFSKVSGYKMNVQKSQTFLYTNNRPTESQIVSELPFIIASKRIIYLGIQLTRDVKDLFKENYKPLLNEIKEDTK

SEQ ID NO: 50006 - protein, 666 aa, Homo sapiens
  DOMAIN (154)..(195): kw TRANSCRIPTASE REVERSE II ORF2 domain identified by eMATRIX, accession number DM01354I, p-value=1.000e-40, raw score of 15.55
  DOMAIN (319)..(544): Reverse transcriptase domain identified by PFam, accession name rvt, E-value=2.1e-51, PFam score of 184.2
MVKGSIQQEELTILHIYAPNTGAPRFIKQVLSDLQRDLDSHTLIMGDFNTPLSTLDRSMRQKVNKDTQELNSALHQAALIDIYRTFHPKSTEYTFFSAPHHTYSKIDHIVGSKALLNKCKRTEIITNYLSDHSAIKLELRIKNLTQSRSTTWKLNNLLLNDYWVHNEMKAEIKMFFETNENKDTTYQNLWDAFKAPLARLIKKKREKNQIDTIKNDKGDITTDPTEIQTTIREYYKHLYANKLENLEEMDTFLDTYTLPRLNQEEVESLNRPITGSEIVAIINSLPTKKSPGPDGFTAEFYQRYKEELVPFLLKLFQSIEKEGILPNSFYEASIILIPKPGRDTTKKENFRPISLMNIDAKILNKILANRIQQHIKKLIHHDQVGFIPGMQGWFNIRKSINVIQHINRAKDKNHMIISIDAEKAFDKIQQPFMLKTLNKLVLEVLARAIRQEKDIKGIQLGKEEVKLSLFADDMIVYLENPIVSAQNLLKLISKFSKVSGYKIHVLKSQAFLYTNNRQTESQIMRELPFTIASKRIKYLGIQLTRDVKDLFKENYKPLLNEIKEDTNKWKNIPCSWIGRINIMRRSSSAPSGCHLCPPSLYLHSPNVELKQASFSVAGFQWKLGITAPTQPRGVGDDFVTSTSPPSLDMFPRLKGAENSPHRSGRD

SEQ ID NO: 50007 - protein, 1096 aa, Homo sapiens
  DOMAIN (37)..(83): kw TRANSCRIPTASE REVERSE II ORF2 domain identified by eMATRIX, accession number DM01354O, p-value=1.000e-40, raw score of 8.73
  DOMAIN (70)..(295): Reverse transcriptase domain identified by PFam, accession name rvt, E-value=3.8e-51, PFam score of 183.3
MDKFLDTYTLPRLNQEEVESLNRPITGAEIVAIINTLPTKKSPGPDGFTAEFYHRYKEELVPFLLKLFQSIEKEGILPNSFYEASIILIPKTGRDTIKKENFRPISLMNIDAKILNKILANQIQQHIKKLIHHDQVGFIPGMEGWFNIRKSINVIQHINRAKDKNHMIISIDAEKAFDKIQQPFMLKTLNKLVLEVLARAIRQEKEIKGIQLGKEEVKLSLFADDMIVYLENPTDSAQNLLKLIRNFSKVSGYKINVQKSQAFLYINNRQTESQIMSELPFTIASKRIKYLGIQLIRDMKDLFKENYKPLLKEINEDTNKWKNIPCSWVGRINIVKMAILPKVIYRFNAIPIKLPMTFFTELEKTALKFIWNQKRARIAKSILSQKNKAGGITLPDFKLYYKATVTKTAWYWYQNRDIDQWNRTEPSEIAPRIYNYLIFDKPEKNKQWGKDSLFNKWCWENWLAICRKLKLDPFLTPYTKINSRWIKDLNVRPKTIKTLEENLGFTIQDIGMGKDFMSKTPKGTATKPKIYKWDLIKLKSFCTAKETIIRVNRQPTKWEKIFTTYSSDKGLISRIYNELQQIYKKKTNNPIKKWVKDMNRQFSKEDIYAARKHMKKCSPSLAIREMQIKTTMRYHLTPVRMAIIKKSGNNRLTQEEVESLNRSITGAEIEAIINSFQPKRVQDPMDSQPNSTTENKIPRNPTYKGCEGPLQGELQTTAQGNKRGYKQWKNIPCSWVGRINIVKMAILPKVIYRFNAIPIKLPMTFFTELEKTALKFIWNQKRARIAKSILSQKNKAGGITLPDFKLYYKATVTKTAWYWYQNRDIDQWNRTERSEITPHIYNYLIFDKPEKNKQWGKDSLFNKWCWENWLAICRKLKQDPFLTPYTKINSRWIKDLNVRPKTIKTLEENLGFTIQDIGMGKDFMSKTPKAMTTKAKIDKWDLIKLKSFCTAKETTIRVNRQPTKWEKIFTTYSSDKGLISRIYNELRQIYQKKTTPSKKNQNQEYSSKIITSSIPELKYEVDVVLGAIERGKKKQKVEELDYHVQNTPPPKLLSIKLGKISFPTHGFYNEKSEIETDNQPLHHRQFPGRRQINWKQ

SEQ ID NO: 50008 - protein, 431 aa, Homo sapiens
  DOMAIN (90)..(137): kw TRANSCRIPTASE REVERSE II ORF2 domain identified by eMATRIX, accession number DM01354V, p-value=1.000e-40, raw score of 12.97
MLEVLAWAVRQEKEIKGIQLGKEEVKLSLFADNMTVYLENPIVSAQNLLKLISNFSKVSGYKVSGQKSQALLYTNNRQTESQIMSELPFTIASKRIKYLGIHLTRDVKDLFKENYKPLLKEIKKDTNKWKNIPCSWVGRINIVKMAILPKDIIQENFPNLARQANIQIQEIRKTPQRYSSRRATPRHIIVRFTKVEMKEKMLRAAREKASHHTYSKIDPILGSKPLLSKCKRTEIITNYLSDHSAIKLEFRIKNLTQNCSTTWKPNNLLLNDYWVHNEMKAEIKMFFETNENKDTTYQNLWDTFKAVCRGKFIATNAHKRKQERSKVDTLTSQLKELEKQEQTHSKASRRQEITKIRAELKEIETQKTLQKINESRSWFFERINKLDRPLARLVKKKREKNQIDAIKNDKGDITTNPTEIQTTIRDYYKHL

SEQ ID NO: 50009 - protein, 75 aa, Homo sapiens; identical to SEQ ID NO: 34209
  DOMAIN (28)..(75): kw TRANSCRIPTASE REVERSE II ORF2 domain identified by eMATRIX, accession number DM01354V, p-value=9.873e-21, raw score of 12.97
  misc_feature (1)...(75): Xaa = X or * as defined in Table 2

SEQ ID NO: 50010 - protein, 615 aa, Homo sapiens; identical to SEQ ID NO: 44618
  DOMAIN (37)..(83): kw TRANSCRIPTASE REVERSE II ORF2 domain identified by eMATRIX, accession number DM01354O, p-value=1.000e-40, raw score of 8.73
  DOMAIN (70)..(295): Reverse transcriptase domain identified by PFam, accession name rvt, E-value=1.7e-48, PFam score of 174.5

SEQ ID NO: 50011 - protein, 1048 aa, Homo sapiens; identical to SEQ ID NO: 40597
  DOMAIN (110)..(151): kw TRANSCRIPTASE REVERSE II ORF2 domain identified by eMATRIX, accession number DM01354I, p-value=1.000e-40, raw score of 15.55
  DOMAIN (356)..(535): Reverse transcriptase domain identified by PFam, accession name rvt, E-value=7e-24, PFam score of 92.8

SEQ ID NO: 50012 - protein, 580 aa, Homo sapiens; identical to SEQ ID NO: 39023
  DOMAIN (50)..(95): kw TRANSCRIPTASE REVERSE II ORF2 domain identified by eMATRIX, accession number DM01354N, p-value=1.000e-40, raw score of 13.17
  DOMAIN (136)..(359): Reverse transcriptase domain identified by PFam, accession name rvt, E-value=1.1e-42, PFam score of 155.2

SEQ ID NO: 50013 - protein, 499 aa, Homo sapiens
  DOMAIN (341)..(388): kw TRANSCRIPTASE REVERSE II ORF2 domain identified by eMATRIX, accession number DM01354V, p-value=1.000e-40, raw score of 12.97
  misc_feature (1)...(499): Xaa = X or * as defined in Table 2
MGKKQSRKTENSKNQSASPPPEECSSSPAMEQSWMENDFHELREEGFRSNFSELKEDVRTHSKEAKNLEKRLDEWLTGITSVEKSLNDLMELKTMARELCDKCTSFSSKFHQLEERVSVTEDQMNEMKSWFFEKINKIDRLLARLIKKKREKNQIEAIKNDKGDITTDPTEIQTTIREYYKHLYTNKLENLEEMDTFTGTYTLPRLNQEEIESLNKPITGSEIEAIINSLPTKKSPGPDGFTAEFYQRYKEELLFNIRKLINLIQLINRTQDPXPPLVLSRIGRRVHQYLENPIVSAQNLLKLKSNFSKVSGYKINVQKSQAFLYIKKRQTESQIMSELPFTIASKRIKYLGIQLIRDVKDLFKENYKPLLNEIKEGTNKWKNIPCSWIGRINIVKMAILPKVIYRFNAIPIKLPMTFFTELEKITLKFIWNQERACIAKTILSKKNKAGGIMLPDFKLYYKATVIKTAWDWYQNRYLDQWNRTEPSEITPHIYNHLIF

SEQ ID NO: 50014 - protein, 1064 aa, Homo sapiens
  DOMAIN (198)..(239): kw TRANSCRIPTASE REVERSE II ORF2 domain identified by eMATRIX, accession number DM01354I, p-value=1.000e-40, raw score of 15.55
  DOMAIN (444)..(724): Reverse transcriptase domain identified by PFam, accession name rvt, E-value=8.3e-81, PFam score of 281.9
MYDVSRFQTYQSLAAEWRRNYQKSLSLKRSYYESLPQVLLGYTRKEGSGAATISLMTDEPGLDNPAYVSSAEDGQPAISPVDSGRSNRTRARPFERSTIRSRSFKKINRALSVLRRTKSGSAVANHADQGRENSENTTAPEAPHHTYSKIDHIVGSKALLSKCKRTEIITNYLSDHSAIKLELRIKNLTQNHSTTWKLNNLLLNDYWVHNEMKAEIKMFFETNENKDTTYQNLWDACKAVCRGKFIALSAHKRKQERSKIDTLTSQLKELEKQEQTHSKASRRQEITKIRAELKEIETQKTLQKIDESRSWFIERINKIDRLLTRLIKKKREKNQIDAIKNDKGDITTDPTEIQTTIREYYKHLYANKLENLEEMDKFLDTYTLPRLNQEEVESLNRPITGSEIVAIISSLPPKRSPGPDGFTAEFYQRYKEELVPFLLKLFQLIEKEGILPNSFYEASFILIPKPGRDTTKKENFRPISLMNIDAKILNKILANQIQQHIKKPLHHDQVGFIPGMQGWFNIRKSINVIQHINRAKDKNHMIISIDAEKAFDKIQQPFMLKTLNKLGIDGTYFKIIRAIYDKPTANIILNGQKLEAFPLKTGTRQGGTRQGCPLSPLLFNIVLEVLARAIRQEKEIKGIQLGKKEVKLSLFADDMIVYLENPIVSAQNLLKLISDFSKVSGHKINVQKSQAFLYTNNRQTESQIMSELPFTIASKRIKYLGIHLTRDVKDLFKENYKPLLKEIKEDTNKWKNIPCSWVGRINIVKMAILPKVIYRFSAIPIKLPMPFFTELEKTTLKFIWNQKRAPIAKSILSQRNKAGGITLPDFKLYYKATVTKTAWYWYQNRDIDQWNRTEPSEITPHIYNYLIFDKPEKNKQWGKDSLFNKWCWENWLAICRKLKLDPFLTPYTKINSRWIKDLNVRPKTIKTLEENLGITIQDIGMGKDFMFKTPKAMATKDKIEKWDLIKLKSFCTAKETTIRVNRQPTKWEKIFATYSSDKGLISRIYNELKQIYKKKTNNPIKKWAKDMNRHFSKEDIYAAQKHMKKCSPLLGDKYLYTERKGGRE

SEQ ID NO: 50015 - protein, 1982 aa, Homo sapiens [sequence omitted]

SEQ ID NO: 50016 - protein, 1070 aa, Homo sapiens; identical to SEQ ID NO: 36416
  DOMAIN (154)..(195): kw TRANSCRIPTASE REVERSE II ORF2 domain identified by eMATRIX, accession number DM01354I, p-value=1.000e-40, raw score of 15.55
  DOMAIN (400)..(594): Reverse transcriptase domain identified by PFam, accession name rvt, E-value=8.6e-35, PFam score of 129.0

SEQ ID NO: 50017 - protein, 869 aa, Homo sapiens
  DOMAIN (472)..(520): IMMUNOGLOBULIN V REGION domain identified by eMATRIX, accession number DM00031A, p-value=1.000e-40, raw score of 16.80
  DOMAIN (92)..(568): Immunoglobulin domain identified by PFam, accession name ig, E-value=1.6e-12, PFam score of 45.4
MTNHCFKRQFQKHEMLLKEDCEPGDSSFILGEQHWENMLCEPKQHPPQQGEGRAAGQAQNPLNTDVSPGAGAKESEEKIYQHLNYTYFKQKCMSCSGFTFSSYAMHWVHQAPGKGLEWVSAIGAGGGTYYADSVKGRFTISRDNAKNSLYLQMNSLRAEDMAVYYCARDTIDAYGDEKPSTIVTRIRVLRKLRDTCHMGEADRTFLSPIAQHPPVCHVETHLGMQVANSSEEDELVWSKWDVDVKFILCCAKYHREQLQESALDLKSLHCPSASPALFLATPSQPVLTTGPGSASSQGGAEMGAHFLVQLVQSGAETRESFDPALPEMETQRTDEQCRAVHPGPQKERHGNMSPPLLMKGSSSPVPSGPGEEPSHREPVSFICGRCILLTLLLGDCLWGEGAWTQGDVLQPSDRASFLAMGVNTTVQQVGDLSGYFPNSVGKACKCREFHTLTPLAHTSSTTHETFPGAQCEVQLVESGGGLVQPGGSLRLSCPDSGFTFSNHYMSWVRQAPGKGLEWISYISGDSGYTNYADSVKGRFTISRDNANNSPYLQMNSLRAEDTAVYYCVKHTARGKLEKQEQTYSKASRRQEITKIRAELKETETQKTLQKINESRSWFFEKIYKIDRPLARLIKKKREKNQIDAIKNGKGDITTDPTEIQTTLREYYKHLYANKLENLEGMDKFLDAYTLPRLNQEEVESLNRPITGPEIEAIINSTPTKKSPGPDRFTAEFYQRSDVLARAIRQKKEIKCIQLGKEEVKLSLFADDMIVYLEIPIISAQNLLKLISNFSKVSGYKISVQKSQAFLYTNNRQTESQIMSELPFTIASKRIKYLGIQLTRDVKDLFKDNCKPLLNEIKEDTNKWKNIPCS

SEQ ID NO: 50018 - protein, 417 aa, Homo sapiens
  DOMAIN (289)..(336): kw TRANSCRIPTASE REVERSE II ORF2 domain identified by eMATRIX, accession number DM01354V, p-value=1.000e-40, raw score of 12.97
  DOMAIN (51)..(302): Reverse transcriptase domain identified by PFam, accession name rvt, E-value=2.2e-06, PFam score of 21.0
MWDYVKRPNLRLIGVPESDGENGTKLEDTLQDIIQENFPNLARQANIQTQEIQRTPQRYSSRRATPRHIIVRFTKAVMKEKMLSAAREKGWVTHKGKPIRLTADLLAESLQARREWGPIFNILKKKELSTQNFISSQTKLQNLEEMDKFLDTYTLPRLNQEEAESPNRPVTGSEIVAIINAYQPKKVQDQMDSQPNSTRVLKVLARAIRQEKEIKGIQLGKEELKLSLFADDMIVYSENPSLSAQNLLKLIGNFSKVSGYKINVQKSQAFLYTNNRQTESQIMSELLFTIASKRIKYLGIKLTRDVKDLFKENYKPLLNEIKEDTNKLKNIPCSWIGTINIVKMAILPKVIYRFSAIPIKLPMTFFTELEKTTLKFIWNQKTAHVAKSILCQKNKAGGIMLPVFKLYHKATVTKTVW

SEQ ID NO: 50019 - protein, 1548 aa, Homo sapiens
  DOMAIN (214)..(260): kw TRANSCRIPTASE REVERSE II ORF2 domain identified by eMATRIX, accession number DM01354O, p-value=1.000e-40, raw score of 8.73
  DOMAIN (247)..(995): Reverse transcriptase domain identified by PFam, accession name rvt, E-value=7.1e-104, PFam score of 358.5
ELEKTALKFQWNQKRARVAKSILSQKNKAGGIMLPDFKLYYKATVTKTACVTGSGPETLKPIDNNKLKFNAIGCLQSPRVDKEGQLCAASVVYSIQDNVLLDPELSTQTEQIKEGHCCGTAFPMPSEPLLHLFLLWQSGLNSARICEEHSQQMRYQTQLPIEYYKRVCANKLENLEEMDKFLDTYTLPRLNQEEVESLNRPITDFEIEAIINSLPTKKSPGPDGFTAEFYQRYKEELVPFLLKLFQSIEKEGILSNSFYEASIILIPKPGRDTTKKENFRPTSLMNIDAKILNKILDSANRIQQHIKKLIQHDQVGFIPGLQGWFNIRKSINVIQHINRTKDKNHMIISIDAEKAFDKTQQPFMLKTLNKFGVDGTYLKIIRAIYDKPTANIILNGPKLEAFPLKTGTRQGCPLSPLLFNTVLEVLARAIRQEKEIKAQNLLKLISNFSKVSGYKINVQKSQAFLYTNNRQTKSQIMSELPFTIASKRIKYLGIQLTRDVKDLFKENYKPLLNEIKEDTNEWKNIPCSWVGRINIMKMAILPTELEKTALKFQWNQKRARVAKSILSQKNKAGGIMLPDFKLYYKATVTKTACVTGSGPETLKPIDNNKLKFNAIGCLQSPRVDKEGQLCAASVVYSIQDNVLLDPELSTQTEQIKEGHCCGTAFPMPSEPLLHLFLLWQSGLNSARICEEHSQQMRYQTQLPIEYYKRVCANKLENLEEMDKFLDTYTLPRLNQEEVESLNRPITDSESEAIINSLPTKKSPGPDGFTAKFYQRYKEELVPFLLKLFQSIEKEGILPNSFYEASIILIPKPGRDTTKKENFRPTSLMNIDAKTLNKILDSANRIQQHIKKLIQHDQVGFIPGLQGWFNIRKSINVIQHINRTKDKNHVIISIDAEKAFDKIQQCFMLKTLNKLGIDGTYLKIDDMIVYLENPIVSAQNLLKLISNFSKVSGYKINVQKSQAFLYTNNRQTESQIMSELPFTIASKRIKYLGIQLTRDVKDLFKENYKPLLKEIKEDTNKWKNIPCSWVGRINIVKMAILPKVIYMFAALPVGGVAACSVVRLLRRLGASGLRVGGLGARRLLPRRLADVDECAENINLCENGQCLNVPGAYRCECEMGFTPASDSRSCQDIDECSNGDNLCQRNADCINSPGSYRCECAAGFKLSPNGACVDRNECLEIPNVCSHGLCVDLQGSYQCICHNGFKASQDQTMCMAARNPTLTTLTTRRRARTLTSLAQHRHTTITPRSSTYTAPQTLPKGQGGIQEVKNRAITTGPKAPTLATAQRTRRHIIQPPSPENTPNQQPITHPHTIHNPIGMEAPSMKRDHKQAIQPTEISSTPQDTHTMLQLMKEAGCYNGITSRDDFPVTEVLNQVCPSTWRGACKTAVQLLFGQAGLSFMWKIAGFGFIKAVFSRPKFHKVEGEKIENGESSSGLYVDELSLCSLLRNYRKWSVSEFHGLCSSGVGITVDGRDMRKSFCYRSYNGTTCENELPFNVTKRMCCCTYNVGKAWNKPCEPCPTPGTGPDLVAAVKQRRYEGISKPRWGEKGM

SEQ ID NO: 50020 - protein, 876 aa, Homo sapiens
  DOMAIN (272)..(317): kw TRANSCRIPTASE REVERSE II ORF2 domain identified by eMATRIX, accession number DM01354N, p-value=1.000e-40, raw score of 13.17
  DOMAIN (212)..(466): Reverse transcriptase domain identified by PFam, accession name rvt, E-value=8.3e-07, PFam score of 27.0
MGDFNTPLSTLDRSMRQKVKKDTQELNSALHQADLIDIYRTLHPKSTEYTFFSAPHHTYSKIDHILGSKALLSKCKRTEIITNYLSDGSAIKLELRIKNLTQNRSTTWKLNNLLLNDYWVPNEMKAEIKMFFETNENKDTTYQNLWDAFKAVCRGKFIALNAHKRKQERSKIDTLTSQLKELEKQEQTHSKASRRQEITKIRAELKEIETQKTLQKINESRSWFFERINKIDRPLARLIKKKREKNQIDTIKNDKGDITTNPTEIQTTIREYYKHLYANKLENLEEMDKFLDTYTLPRLNQEEVESLNRPITGSEIVAIINSLPTKKSPGPDGFTAEFYQRYKEELVPFLLKLFQSIEKEGILLLEVLARAIRQEKEIKGIQLGKEEVKFSLFADDMIVYLENPIVSAQNLLKLISNFSKVSGYKINVQKSQAFLYTNNRQTESQIMSELPFTIASKRIKYLGIQLTRDVKDLFKENYKPLLKEIKEDTNKCKNIPCSWVGRINIVKMAILPKVIYRFNAIPIKLPMPFFTELEKTTLKFIWNQKRARIAKSILSQKNKAGGITLPDFKPYYKATVTKTAWYWYQKRDIDQWNRTEPSEITPHIYNYLIFDKPEKNKQWGKDSLFNKWCWENWLAICRKLKLDPFLTPYTKINSRWIKDLNVRPKTIKTLEENLGNTIQDIGMGKDFMSKTPKAMATKDKIDKWDLIKLKSFCTAKETTIRVNRQPTKWEKIFTTYSSDKGLISRIYNELKQIYKKKTNNPIKKWAKDMNRHFSKEDIYAAKKHMKKCSSSLAIREMQIKTTMRYHLTPVRMAIIKKSGNNSLLITIREYYKHLYANKLENLEEMDKFLDTYTLPKLSEEEVESLDMLSFYTTGSK

SEQ ID NO: 50021 - protein, 989 aa, Homo sapiens
  DOMAIN (120)..(161): kw TRANSCRIPTASE REVERSE II ORF2 domain identified by eMATRIX, accession number DM01354I, p-value=1.000e-40, raw score of 15.55
  DOMAIN (366)..(626): Reverse transcriptase domain identified by PFam, accession name rvt, E-value=2.9e-67, PFam score of 236.9
MTDELREEGFRRSNYSELQEEIQTKGKEVKNFEKNLDEYITRITNTEKCLKELMELKAKARELPPHHTYSKIDLTVGSKALLSKCKRTEIITNCLSDHSAIKLELRIKKVTQNHSTTWQLNNLLLNDYWVHNEMKAEIKMFFETNENKDTTYQNLWDTFKAVCRGKFIALNAHKRKQERSKIDTLTSQLKELEKQEQTHSKASRRQEITKIRAELKEIETQKTLQKINESRSWFFERINKIDRPLARLIKKKREKNQIDVIKNDKGDITTDPTEIQTNITEYYKHLYANKLENLEEMDKFLKTYALPRLNQEEVESLNRPITGSEIVAIINSLPTKKSPGPDGFTAEFYQRYKEELVPFLLKLFQSIEKKEILPISFDEASIILLSKPGRDTTKKENFRPISLMNIEAKILNKILANRIQQHIKKLIHHDQVGFIPGMQGWFNIRKSINVIQHVNRTKDKNHMIISIDAEKAFAKIQQPFMLKTLNKLGIDGTYLKIIRAIYDKPTANIILNGQKLEAFPLQTGTRQGCPLSPLLFNIVLEVLARAIRQEKEIKDDMIAYLENPIVSTQNLLKLISNFSKVSGYKINVQKSQAFLYTNNRQTESQIMSELSFTIASKRIKYLGTQLTRDVKDLFKENYKPLLNEIKEDTNKWKNIPCSWVGRINIVKMAILPKVIYRFNAIPIKLPMTFFTELEKTTLKFIWNQKRARIAKSILSQKNKAGGITLPDFKLHYKATVTKTAWYWYQNRDIDQWNRTEPSEITPHIYNYLTFDKPEKNKQWGKESLFNKWCWGNWLAVCRKLKLDPFLISYTKINSRWIKDLNVRPKTIKTLEENLGNTIQDIGMGKDFMSKTPKAMATKDKIDKWDLIKLKSFCTAKGTAIRVNRQPTEWEKTFATYSSDKRLISRIYNELRHIYKKKTNNPIKKWAKDMNRHCSKEDIYAAKKHMKKCSSSLAIREMQIKTTVRYHLTPVRMAIIKSQETTGAGEDVEK

SEQ ID NO: 50022 - protein, 1120 aa, Homo sapiens
  DOMAIN (110)..(151): kw TRANSCRIPTASE REVERSE II ORF2 domain identified by eMATRIX, accession number DM01354I, p-value=1.000e-40, raw score of 15.55
  DOMAIN (356)..(692): Reverse transcriptase domain identified by PFam, accession name rvt, E-value=7.1e-07, PFam score of 28.0
  misc_feature (1)...(1120): Xaa = X or * as defined in Table 2
MGDFNTPLSTLDRSMRQKVNKDIQELNSAVHQVDLIDIYRTLHPKSTEYTFFLAPHRTYSKIDHIVGSKALLSKCKRTEIIRNCLSDHSAIKLELRINKLTQNCSTTWKLNNMLLNDYWVHNEMKAEIKMFFETNENKDTTYKNLWDTFKAVCRGKFIALNAHKRKQERSKIDTLTSQFKELEKQEQTHSKASRRQEITKIRAELKEIETQKTLQKINESRSWFFEMISKIDRPLARLIKKKREKNQIDTIKNDKGDIITDPTEIQTTIREYYKHLYAIKLENLEEMDKFPYTNTLPRLNEEEIESLNRTITGSEIEAIIKSLPTKKSPGPDGFTAKFYQRYKEELVPFLLKLFQSIEKEGILPNSFYEASIILIPKPVLEVLARAIRQEKEIKGIHLGKEEVKLSLFADDMIVHLENPIFSAQNLLKLISNFSKVSGYKINVQKSQAFLYTTNKQTESQIMSELPFTIASKRIKYLGIQLTRDVKDLFKENYKPLLNRNKRGHKQMEEHSMLMDRKNQYCENGHTGQENLEEVDKFLDTYTLSRLNQEEVESLSRPITSSEIEAVINSLPTKKSPGPGGFTAEFYQSIVLEVLARAIRQEKEIKGIQLGKEEVKLSLFADDMIVYLENPIISAQNLLKLISNFSKVSGYKINVQKSEAFLYTNNRQTESQIMSELPFTIASKRIKYLGIQLTRDVKDLFKENYKPLLXYYSGSLEAKSTHHETLGLIHTATKGLIRAFEDGGIDSVMEWEVDEVLNWTNTLNFDEIQGKKIAKVIMLLLESSREPQIAKDFASFPSINLQQMLKEVPKRFGDERGAIVHYTILNNHVYRRSLGKYTDFKMFSDEILLSLTRKVLLPDLEFYVNLGDWPLEHRKVNGTPSPIPIISWCGSLDSRDVVLPTYDITHSMLEAMRGPSWINKTERAFFREPWKHYVPIKRNLSDLLEKVKWAKENDEEAKKIAKEGQLMARDLLQPHRLYCYYYQRRSWRSENGHIASSKIQTTIREYYKHLYANKLENLEEMDKFLDTYTLPRLNQEEVESLNRPVTGAEIVAIINSLPNKKSPGPDGFTAEFYQSQVPEDGLSPSEPLNIYEDDPVDSNCDTDTTTDDEYYLHENDKESEL

SEQ ID NO: 50023 - protein, 1357 aa, Homo sapiens
  DOMAIN (563)..(608): kw TRANSCRIPTASE REVERSE II ORF2 domain identified by eMATRIX, accession number DM01354N, p-value=1.000e-40, raw score of 13.17
  DOMAIN (658)..(888): Reverse transcriptase domain identified by PFam, accession name rvt, E-value=1.9e-31, PFam score of 117.9
  misc_feature (1)...(1357): Xaa = X or * as defined in Table 2
MHIVVETALSASWQNKAKPPARVLLQVVPNVWFLVAVVWELYPSLDLMDRSIECSSSPATEQSWTENDYDKLREEGFRRSNYSELQEDIQTKGKDVENFEKNLEECITRITNTQKCLKELMELKTKARELREECRSLRSRCDQLEERVSVMEDEMNEMKQEGKFREKRIKRNEQSLQEIWDYVKRPNLRLIGVPESDGENGTKLKNTLQDIIQENFPNLARQAKVQIQEIQRMPQRYSLTRATPRHIIVRFTKVEMKEKMLRAAREKGAPRFIKQVLSDLQRDLDSHTLIMGDFNTPLSTLDRSTRQKVNKDTQELNSALHQVDLIDIYRTLHPKSTEYTFFSAPHHTYSKIDHILGSKALLSKCKRTEIITNYLSDHSAIKLELRIKNLTQNRSTTWKLNNLLLNDYWVHNEMKLEIKMFFETNENKDTTYQNLWDAFKAVYRGKFIALNAHKRKQERSKIDTLTSQLKELEKQEQTHSKASRRQEITKIRAELKEIETQKTLQKINESRSWFFERINKIDRXTLARVIKKKGEKNQIDAIKNDKGDITTDPTEIQTTLSRDYYKHLYANKLENLEGMDKFLDTYTLPRLNQEEVESLNRPITGSEIVAVINSLPTKKSPGPDGFTAEFYQRYKEELVPFLLKLFQSIEKEGILPNSFYEPSIILIAKPGRDTTKKENFRPISLMNIDAKILNKILANQIQQHIKKLIHHDQVGFIPGMQGWFNIRKSINVIQHINRTKDKNHMIISIDAEKAFDKIQQHFMLKTLNKLVLEVLARAIRQEKEIKGIQLGKEEVKLSLFADDMIVYVENPFVSAPNISLKLISNFSKLSGYKINVQKSQAFLYTNNRQTESQIMSELPFVIASKRIKYLGIQLTRDVKDLLKENYKPLLNEIKEDTNKWKNIPCSRVGGRINLVKMAILPKVIYRFNAIPIKLPMTFFTELEKTTLKFIWNQKRAHIAKSILSQKNKAGGITLPDFKLYYKAIVTKTAWYCYQNRDIDQWNRTEPSEIMLHIYNYLIFDQPEKNKQWGKDSLFNKWCWENWLAICRKLKLDPFLTPYTKINSRWIKDLNVRPKTIKTLEENLGITIQDISMGKDFMSKTPKAKATKAKIDKWDLIKLKSFCTAKETTIRVNRQPTKWEKIFATYSSDKGLISRIYNELKQIYKIKTNNPIEKWVKDMNRHFSKEDIYAAKKHMKKCSSSLAIREIQIKTTVRYHLTPVRMVIIKKSGNNRAPGGRGGCGCSFGRLKRSCVPALKRVADLPAQRSSSAKGETASSSGSLNPVPPDWEKPPSRGRQTPHTGELRLASDGCLSGMKLPEEGIGSSLCCSAASAGDTQANGVRSGLPANSSRPEAEGPDC

SEQ ID NO: 50024 - protein, 98 aa, Homo sapiens
LQVEIYKTVKMHCIWHKQMVSSYFFYQKKNELSNFEEVFLKTASGMFFSTVGCHPTRCGEFEKNNPDLYLKELLNLAENNKGKVVAIGECGLDFDRLQ

SEQ ID NO: 50025 - protein, 276 aa, Homo sapiens
  DOMAIN (1)..(264): Metalloenzyme of unknown function UPF0006 domain identified by PFam, accession name UPF0006, E-value=5.7e-09, PFam score of 21.8
  misc_feature (1)...(276): Xaa = X or * as defined in Table 2
LHGGNLQDSKDALHLAQTNGMFFSTVGIHPTRCGXYFEKNNPDLYLKGVAKIFAEKTLKGKLWQLGECGLDFDRLQFCPKDTQLKYFEKQFELSEQTKLPMFLHCRNSHGWNFLDIMKRNRDRCVGGVVHSFDGTKEAASSLIDLDLYIGFNGCASPENLEANLGRFWKSIPSEKLMIEADAPWCGVKSTHAGSKYIRTAFPSKKKWESGHCLKDRNEPCHIIQILEIMSAVRDEDPLELANTLYNNTIKVFFSWNIIGICLPLSIMYVKFHSKTS

SEQ ID NO: 50026 - protein, 507 aa, Homo sapiens
  DOMAIN (139)..(150): Trp-Asp (WD) repeat proteins proteins domain identified by eMATRIX, accession number BL00678, p-value=1.474e-09, raw score of 9.67
  DOMAIN (115)..(208): WD domain, G-beta repeat domain identified by PFam, accession name WD40, E-value=9.8e-09, PFam score of 42.5
  misc_feature (1)...(507): Xaa = X or * as defined in Table 2
QEHLQRASPRLLQLLPPLPPPPPPPAFGGSLSSLGSRMSRQVVRSSKFRHVFGQPAKADQCYEDVRVSQTTWDSGFWCSVNPXVLWALICEASGGGAFLVLPLGKIWTLWDKNAPTGCGSHSAPVLDIAWCPHNDNVIASGSEDCTVMVWEIPDGGLMLPLREPVVTLEGHTKRVGIVAWHTTAQNVLLSAGCDNVIMVWDVGPGAAMLDTGPRGAHPDANYRGDWEPDGGLICTSCRDKRVRIIEPRKGTVVAEKDRPHEGTRPVRAVFVSEGKILTTGFSRMSERQVALWDTKHLEESPVSLRKLHTRNGVPVAFFGPDTNIVYLRGKGSGPIRVFEITSEAPFLHYLSMFSSKESQRGMGYMPKRGRKVNKCEIAGFYKLHDGRCVSPMPKPVPRKSDLFQEDLGPTPPRGPDPALTAEEWLGGRDVGPLFISLKDGYVPPKSRELRVNRGLDPGRRRAAPEASGTPSSDAVSRLEEEMRKLQATVQELQKRLDRLEETVQAKL

SEQ ID NO: 50027 - protein, 82 aa, Homo sapiens
EWAWRSQLRSEHSRADPTRSSCRSCGAKMSGEENPASKPTPVQDVQGDGRWMSLVSVPTWDIEESGGAGGGSGERLVRATLT

SEQ ID NO: 50028 - protein, 246 aa, Homo sapiens
  DOMAIN (34)..(238): Platelet activating factor acetylhydrolase domain identified by PFam, accession name PAF-AH, E-value=4.1e-124, PFam score of 425.7
EWAWRSQLRSEHSRADPTRSSCRSCGAKMSGEENPASKPTPVQDVQGDGRWMSLHHRFVADSKDKSGSKKKNPPPPEVVFIGDSLVQLMHQCEIWRELFSPLHALNFGIGGDGTQHVLWRLENGELEHIRPKIVVVWVGTPNNHGHTAEQGLLPRGQHPNPLREKNRQVNELGTGGTWLGHPRAHFLDADPGFVHSDGTISHHDMYDYLHLSRLGYTPVCRALHSLLLRLLAQDQGQGAPLLEPAP

SEQ ID NO: 50029 - protein, 102 aa, Homo sapiens
MSRQPPGPGFLLLGLLPRRPNIPTPLREKEPTRCRPLALCTQDGTISHHDMYDYLHLSRLGYTPVCRALHSLLLRLLAQDQGTKCSPAGARTLKHPAAFPQH

SEQ ID NO: 50030 - protein, 275 aa, Homo sapiens
  misc_feature (1)...(275): Xaa = X or * as defined in Table 2
PSVAFLXPSLHRYGHTGTAGPGWPCAAGSXAASSSRRGLPSVLQASSNSSHRRCNSTPSGSAGQRRVRRAPXMASTTPGGTESGPCKARNAFRMRSTSAFCRGQXQRPVPSSSSSRSSSRACAAGETASGDPRAQRQLRSXDEESSSPSLDFRQAPWPTAPCVKVSYSSSRMFSGMSPWRSSDNKRNSSFLRKTTGSNFSADLDTPPMPEVCLLPSLGYPLVPPVAEVHMPVPAPILPSAGIRRKIQKAASAKQLPLFQMDDSFSQHRVQGDTKK

SEQ ID NO: 50031 - protein, 92 aa, Homo sapiens
  DOMAIN (40)..(63): TRANSFORMING PROTEIN P21 RAS SIGNATURE domain identified by eMATRIX, accession number PR00449C, p-value=6.824e-19, raw score of 17.27
  DOMAIN (14)..(92): Ras family domain identified by PFam, accession name ras, E- value=1.9e-12, PFam score of 4.8
  misc_feature (1)...(92): Xaa = X or * as defined in Table 2
MSSMNPEYDYLFKLLLRFADDTYTESYISTIGVDFKIRTIELDGKTIKLQIWDTAGQXRFRTITSSYYRGAHGIIVVYDVTDQGSFNNVKQW

SEQ ID NO: 50032 - protein, 75 aa, Homo sapiens
  misc_feature (1)...(75): Xaa = X or * as defined in Table 2
INNHIRDSCWTCHCSCQPPPPPPLLPQPPPXLSAPRVIERKEXDRLCPGEQTSSPTPSPRTQSAAAATQLSLPPP

SEQ ID NO: 50033 - protein, 164 aa, Homo sapiens
  DOMAIN (137)..(164): Protamine P1 proteins domain identified by eMATRIX, accession number BL00048, p-value=8.988e-09, raw score of 6.39
  misc_feature (1)...(164): Xaa = X or * as defined in Table 2
MDGRVMAAGGRQAPGQKKAGTSEAPPSSQEWPEAWYGCLQQKLRAVYLVQSQPCTGPVLAPGAACPAAAASTPGCAQWCGPRACSPTQSSQLCAWFAFSSRCPDFCPNPPRPLXDPPSWPTDPADRCSPELTIRDSCWTCHCSCRRRHRRPCCRSRRPDSPRHG

SEQ ID NO: 50034 - protein, 90 aa, Homo sapiens
MACLSITRGAQSQGGGCGSKRRRWRRRQLQVDMSSMNPGYDYLCKITSDWRLQGLEKSCLLLKVCRMIHIQEKLHQHNWVWDFKIRNYRS

SEQ ID NO: 50035 - protein, 67 aa, Homo sapiens
  DOMAIN (11)..(44): Inorganic pyrophosphatase proteins domain identified by eMATRIX, accession number BL00387D, p-value=5.378e-19, raw score of 21.31
  DOMAIN (2)..(67): Inorganic pyrophosphatase domain identified by PFam, accession name Pyrophosphatase, E-value=0.016, PFam score of -54.9
KNHSHCHLMLLLFLDINDVKRLKPGYLEATVDWFRRYKVPDGKPENEFAFNAEFKDKDFAIDIIKST

SEQ ID NO: 50036 - protein, 368 aa, Homo sapiens
  DOMAIN (93)..(131): Inorganic pyrophosphatase proteins domain identified by eMATRIX, accession number BL00387B, p-value=1.290e-30, raw score of 27.02
  DOMAIN (66)..(270): Inorganic pyrophosphatase domain identified by PFam, accession name Pyrophosphatase, E-value=7e-51, PFam score of 182.5
  misc_feature (1)...(368): Xaa = X or * as defined in Table 2
QFALCAGWWLCGRGGGRTPATMSGFSTEERAVPFSLEYRVFLKNEKGQYISPFHDIPIYADKDVFHMVVEVPRWSNAKMEIATKDPLNPIKQDVKKGKLRYVANLFPYKGYIWNYGAFPQTWEDPGHNDKTLLGCCGLTMDPIDVCXNWEGKVCARGEIIGVKVLGILAMIDGGGTDWKVIAINVDDPGCQPINNDINDVKRLKPGYLXKLPVDWFRRYKVPDGKPENEFAFNAEFKDKDFAIDIIKSTPWTLGKALVTXENRMGKGISCMNTNFVLRAPFKVCILDAAQSPLWDALPTHPCGICPCHSTQQTVDKGVPITQKNLMRFPLEYQADIAYIRVPSWMVLEVKVVAFSKAFKFVEPHPNLK

SEQ ID NO: 50037 - protein, 233 aa, Homo sapiens
  misc_feature (1)...(233): Xaa = X or * as defined in Table 2
VTQEDDIIEEHKPRTPRPSPPLLAPSPACQAFGEGHSPGHPAISTGAGPRPSASFSHPHLSGLHREPPLNWSVCPGLVWSPKPALDETHPFVQQFPHQATLEWGVFHRDVGRRWGRRLGNLQIGSEVARRRRVGGGGLQCRRLGVGASPGADWXXSGXEEACGGRWAAGADGWGLGRPRELIGCRGWRRSLAAAPGPQRPGFVSVSTPRCRPRSGMETQTPALRVQQDDLFQS

SEQ ID NO: 50038 - protein, 315 aa, Homo sapiens
MEEGISSQIGRRENECQQKKCQTLIKPSDLVRTHSYHENSMGETILVIQLPPPGTAFDMWELQFKLITQTFSHHNQLAQKTRREKRARQEAERREKAERAARLAKEAKSETSGPQIKELTDEEAERLQLEIDQKKDAENHEAQLKNGSLDSPGKQDTEEDEEEDEKDKGKLKPNLGNGEDLPNYRWTQTLSELDLAVPFCVNFRLKGKDMVVDIQRRHLRVGLKGQPAIIDGELYNEVKVEESSWLIEDGKVVTVHLEKRGPADAHSRALSVLQASRLLGVHCVPGTVPNAEIQVVDFVIYFWQSVIPQASPISE

SEQ ID NO: 50039 - protein, 362 aa, Homo sapiens
  misc_feature (1)...(362): Xaa = X or * as defined in Table 2
SAELRDVDRSAARLGGEQEEERFDGMLLAMAQQHEGGVQELVNTFFSFLRRKTDFFIGGEEGTAEKLITQTFSHHNQLAQKTRREKESPRRRAERREKAERAARLAKEAKSETSGPQIKELTDEKAERLQLEIDQKKDAENHEAQLKNGSLDSPGKQDTEEDEEEEDEKDKGKLKPNLGNRADLAQXRLNPDPCRELDLAVPFCVNFRLKGKDMVVDIQRGTPRVGLKGQPSDSLMGELYNEVKVEESSWLIEDGKVVTVHLEKINKMEWWSRLVSSDPEINHPRKINPENSKASDLDSXDFASMVEKDDGMTQRTESPMGLPNFQTNRRKQEILKKFMDQHPEMGFFPKAKFPTNPCFFPP

SEQ ID NO: 50040 - protein, 133 aa, Homo sapiens
RDQEEEMDYAPDDVYDYKIAREYNWNVKNKASKGYEEEEEEMETEEKEAGGSYEEQEKGSSSEKEGSEDEHSGSESEREEGDRDEASDKSGSGEDESSEDEARAARDKEEIFGSDADSEDDADSYDEDRGQAP

SEQ ID NO: 50041 - protein, 553 aa, Homo sapiens
  DOMAIN (377)..(428): Neuromodulin (GAP-43) proteins domain identified by eMATRIX, accession number BL00412D, p-value=9.633e-09, raw score of 16.54
  misc_feature (1)...(553): Xaa = X or * as defined in Table 2
DPVPGCRRLVAMAPTIQTQAQREDGHRPNSHRTLPERSGVVCRVKYCNSLPDIPFDPKFITYPFDQNRFVQYKATSLEKQHKHDLLTEPDLGVTIDLINPDTYRIDPNVLLDPADEKLLEEEIQAPTSSKRSQQHAKVVPWMRKTEYISTEFNRYCIFHEKPEVKKWGSVKQQFTEEEIYKDRDSQITAIEKTFEDAQKSVIEGLGWGEARISQHYSKPRVTPVEVMPVFPDFKMWINPCAQVIFDSDPAPKDTSGAAALEMMSQAMIRGMMDEEGNQFVAYFLPVEETLKKRKRDQEEEMDYAPDDVYDYKIAREYNWNVKNKASKGYEENYFFIFREGDGVYYNELETRVRLSKRRAKAGVQSGTNALLVVKHRDMNEKELEAQETRKAQLENHEPEEEEEEEMETEEKEAGGSDEEQEKGSSSEKEGSEDEHSGSESEREEGDRHEASDKSGSGQDDSSDYXARAARDKEEIFGSDADSEDDADSDDEDRGQAQGGSDNDSDSGRNGGGQRTRSHSRSASPFPSGSEHSAQENGSEAAASDSSEADSDSD

SEQ ID NO: 50042 - protein, 295 aa, Homo sapiens
MPADGRDADPTEEQMAETERNDEEQFECQERLKCQVQVGAPEEEEEDAGLVAKAEAVAAGWMLDFLRFSLCRAFRDGRSEDFCRIRNRAEAIIHGLSSLTAYQLRTIYISLMIWGSTEKEHDKLQEEIQNLIKIQAIAVCMENGNFKEAEVFERIFGDPNSYMPLKSKLLMIISQKDTFHSFFQHFSYNHMMEKIKSYVNYVLSEKSSTFLMKAAAKVVESKRTRTITSQDKANENYVETETEANLDTRKRSHKNLFLSKLQHGTQQQDLNKKERRVGTLQSTKKKKESRRATES

SEQ ID NO: 50043 - protein, 66 aa, Homo sapiens
  misc_feature (1)...(66): Xaa = X or * as defined in Table 2
MGIIDTGEXXXXXXXXXXXXXXXXXXXXXXXXXXXXXXXXXXXXXXXXXXXXXXXXXXXXIEIIFL

SEQ ID NO: 50044 - protein, 44 aa, Homo sapiens
MQQYFRPVSLSIFPHARSQILVFFPKPCLSFSSSMFFRSYRLTL

SEQ ID NO: 50045 - protein, 447 aa, Homo sapiens
  DOMAIN (384)..(408): Myb DNA-binding domain proteins repeat proteins proteins domain identified by eMATRIX, accession number BL00037A, p-value= 6.400e-10, raw score of 16.68
  DOMAIN (391)..(439): Myb-like DNA-binding domain identified by PFam, accession name myb_DNA-binding, E-value=3.4e-08, PFam score of 40.6
  misc_feature (1)...(447): Xaa = X or * as defined in Table 2
PGRTTRSMAEDVFLSAPIPRGCADGRDADPTEEHMAQTERNDEEQFECQELLXCHVQVGAPEEEEEEEEDAVLVAEAEAVAAGWMLNFLCLSLCRAFREGRSEDFRRTRNSAEAIIHGLCSLTACQLRTIYICQFLTRIAAGKTLDAQFENDERITPLESALMIWGSIEKEHDKLHEEIQNLIKIQAIAVCMENGNFKGAEEVFERIFGDPNSHMPFKSKLLMIISQKDTFHSFFQHFSYNHMMEKIKSYVNYVLSEKSSTFLMKAAAKVVESKRTRTITSQDKPSGNDVEMETEANLGYKKKCXLTNSLRXLNPQRVQYPYXGSHKNLFYLKLQHGTQQQDLNKKERRVGTPQSTKKKKESRRATESRIPVSKSQPVTPEKHRARKRQAWLWEEDKNLRSGVRKYGEGNWSKILLHYKFNNRTSVMLKDRWRTMKKLKLISSDSED

SEQ ID NO: 50046 - protein, 476 aa, Homo sapiens
  DOMAIN (69)..(88): BINDIN PRECURSOR SIGNATURE domain identified by eMATRIX, accession number PR00761E, p-value=4.600e-09, raw score of 14.32
  misc_feature (1)...(476): Xaa = X or * as defined in Table 2
IPGSTISCLKGQYPSEPFNMAEDVSSAAPSPRRCADGRDPDPTEEQMAETERNDEEQFECQELLECQVQVGAPEEEEEEEEEDAGLVAEAEAVAAGWMLDFLCLSLCRAFRDGRSEDFRRTRNSAKAIIYGLSMLTACPLRTIYICQFLTRIAAGKTPXMHRFENDERITPLGISPXMIWGSIEKEHDKLHEEIQNLIKIQAIAVCMENGNFKEAEEVFERIFGDPNSHMPFKSKLLMIISQKDTFHSFFQHFSYNHMMGKIKSYVNYVLSEKSSTFLMKAAAKVVESKRTRTITSQDKPSGNDVEMETEANLDTRKRSHKNLFLSKLQHGTQQQDLNKKERRVGTPQSTKRRKKEGRRATESRIPVSKSQPVTPENDRARKRQAWLWGRKDKILRSGVREFGEGNWSXILLHYKFNNRTSVMLKARWRTMEGNLKLDFLQDSEDWIVFVKSFDGKGQFKYFDHCILFETCVIDVI

SEQ ID NO: 50047 - protein, 340 aa, Homo sapiens
MEGLFLAVDEIVDGGVILESDPQQVVHRVALRLINQGPSSISQGVLELSCPQALEGQQLLYVTRVTGLNWPTNHPINPKGLEDPIIPSVPVTTTPQFPLPVDEREGRRGPEEQLINQGPSSISQGVLELSCPQALEGQQLLYVTRVTGLNCTTNHPINPKGLEGLNAPSEPSFEPQAPAPYLGPPPPTTYCPCSIHPDSGFPLPPPPYELPASTSHVPDPPYSYGNMAIPVSKPLSLSGLLSEPLQDPLALLDIGLPAGPPKPQEDPESDSGLSLNYSDAESLELEGTEAGRRRSEYVEMYPVEYPYSLMPNSLAHSNYTLPAAETPLALEPSSGTVQTA

SEQ ID NO: 50048 - protein, 119 aa, Homo sapiens
  misc_feature (1)...(119): Xaa = X or * as defined in Table 2
SHLGFPGTWTRLWPSRMSPCPPQQSRNRVIQLSTSELAPALGNWARLPQVTEQXFRGLRKGSRTMPGSSPPATWTKGCLLAXQXCLCPQLGWSRVAPXCRLGALFLACSLLLAAPLRCF

SEQ ID NO: 50049 - protein, 51 aa, Homo sapiens
  misc_feature (1)...(51): Xaa = X or * as defined in Table 2
ETVAVSSAGARASSIMRIMVSSRPSETSLESVFPDSAPPGLXPPPCLSFGL

SEQ ID NO: 50050 - protein, 391 aa, Homo sapiens
  DOMAIN (280)..(297): JUN TRANSCRIPTION FACTOR SIGNATURE domain identified by eMATRIX, accession number PR00043B, p-value=2.320e-12, raw score of 8.73
  DOMAIN (288)..(328): bZIP transcription factor domain identified by PFam, accession name bZIP, E-value=0.00031, PFam score of 20.3
  misc_feature (1)...(391): Xaa = X or * as defined in Table 2
GCSPCPPQQSRNRVIQLSTSELGEMELTWQEIMSITEACRVLNAPSEPSFEAPKPQLPYLGPPPPTTYCPCSIHPDSGFPIPPPPYELPASTSHVPDPPYSYGNMAIPVSKPLSLSGLLSEPLQDPLALLDIGLPAGPPKPQEDPESDSGLSLNYSDAESLELEGTEAGRRRSELCRRCYPVEYPYSLMPNSLAHSNYTLPAAETPLALEPSSGPVRAKPTARGEAQGSRDERRALAMKISFPTDKIVNFPVDDFNELLARYPLTESQLALVRDIRRRGKNKVAAQNCRKRKLETIVHLERKLERLTNERERLLRARGEASRTLKVMRQQLQELYREHFPSHLREXNPGQTAYSPXKKXRACKQACPNGDPSFPCGPRGTKMEAHRLSLAP

SEQ ID NO: 50051 - protein, 136 aa, Homo sapiens
LNLMRWEAVQARGGAFRIPRVDPGPTPIPHNSSSRFDCNSVSTAPRVLVSGICAAGSFVLVAFSHSVGTSLCGYFLLLTSPEAQDPGGEEEAESAARQPLIRTEAPESKPGSSSSLSLRERWTVFKGLLWYIVPLV

SEQ ID NO: 50052 - protein, 253 aa, Homo sapiens
MGGCAGSRRRFSDSEGEETVPEPRLPLLDHQGAHWKNAVGFWLLGLCNNFSYVVMLSAAHDILSHKRTSGNQSHVDPGPTPIPHNSSSRFDCNSVSTAAVLLADILPTLVIKLLAPLGLHLLPYSPRVLVSGICAAGSFVLVAFSHSVGTSLCGSSSSLSLRERWTVFKGLLWYIVPLVVVYFAEYFINQGLFELLFFWNTSLSHAQQYRWYQMLYQAGVFASRSSLRCCRIRFTWALALLQMESRSVAQAGM

SEQ ID NO: 50053 - protein, 605 aa, Homo sapiens
  DOMAIN (416)..(462): kw TRANSCRIPTASE REVERSE II ORF2 domain identified by eMATRIX, accession number DM01354O, p-value=1.000e-40, raw score of 8.73
  DOMAIN (449)..(605): Reverse transcriptase domain identified by PFam, accession name rvt, E-value=6.9e-07, PFam score of 28.1
MTARRRQTRTDTRNNTHQRKIFLLVFGFTQPLRRGHRTATKTRAHLRNSKREPPNPEIKTPTRPPPPILLNPNRRYTMAVVSSHKQTNQARTDHSTPHRPHTRRHGHNSFQVFLECPRAPTGATLHRSPPDDTHTRVLQNGPPRRLSKGPIQGHLPFSFLGIQSVLAWALRVVPKNRRYTMAVLFSLPENRRYTMAVTIGRAIVAADFFIIFQLWQNTVRQLFTQFHAPLVEGKLGWQGVGVTIPVLVLPPGVVFASISSGLGEVTFLSLTAFYPRAVISWWSSGTGGAGLLGALSYLGLTQAGLSPQQTLLSMLGIPALLLASNSLSPRQVKGMSICRAQIGQPVGSPEMSRSSSSPSVFNVVVRVAPRVAPGRNERGAVHPHGLDHRMRTYSGDHRAWLTTLKLYGCVKAQRQRNGIRSPGPDGFTAEFYQRYKEELVPFLLKLFQSIEKEGILPNSFYEASIILIPKPRTDTTKKENFRPISLMNIDAKILNKILANRIQQHIKKLIHHDQVGFIPGMQGWFNIHKSINVIQHINRTKDKNHMIISIDAEKAFEKIQQPFMLKTLNKLGIHGTYLKIIRAIYDKPTANIILNGQKLEALHAL

SEQ ID NO: 50054 - protein, 314 aa, Homo sapiens
MGGCAGSRRRFSDSEGEETVPEPRLPLLDHQGAHWKNAVGFWLLGLCNNFSYVVMLSAAHDILSHKRTSGNQSHVDPGPTPIPHNSSSRFDCNSVSTAPRVLVSGICAAGSFVLVAFSHSVGTSLCGYFLLLTSPEAQDPGGEEEAESAARQPLIRTEAPESKPGSSSSLSLRERWTVFKGLLWYIVPLVVVYFAEYFINQGLVSEGCLFRPFPFSALNVCEVNLVKVSQHQGGWVAVVTQGKKHPISCRRLNVDGMNIISNDGSNKLNRSRKARVSYKVQRTINASLNAATSTRAVSSNPNFVTRQKIEIIFG

SEQ ID NO: 50055 - protein, 505 aa, Homo sapiens
  misc_feature (1)...(505): Xaa = X or * as defined in Table 2
SLSPVADPHPSRGSPLWTLYDPGPSGDLNLMRWIGCAGSRRRFSDSEGEETVPEPRLPLLDHEGAHWKNAEGFWLLGLCNNFSYVVMLSAAHDILSHKRTSGNQSHVDPGPNGDSPTTAYSRFDCNSVFTGAVLLADILPTLVIKLLAPLGLHLLPYRSGPRVLVSGICAGGKFRPGFAFSHSVGTSLCGCWSFASISSGLGEVTFLSLTAFYPRAVISWWSSGTGGAGLLGALSYLGLTQAGLSPQQTLLSMLGIPALLLASYFLLLTSPEAQDPERGEEAKSQAGQPFIRTEGPEGKPGSSSSLSLRERWTVVKGLLWVPLFPWFEVTFPKYFITQGLFELPLFFWTTSLSHAQQYRWYQMLYQAGVFASRSSLRSCSIGFTWALALLQCLNLVFLLADVWFGFLPSIYLVFLIILYEGAPWGSASLREKPFHNIRPWRPSDEHREVCKWRPPCHLXHTGGFILSGASLALPLHDFLLPSSPDTRDPQDAGHIHLWARGTGYQ

SEQ ID NO: 50056 - protein, 90 aa, Homo sapiens
  DOMAIN (52)..(67): G-PROTEIN BETA WD-40 REPEAT SIGNATURE domain identified by eMATRIX, accession number PR00320A, p-value=3.647e-14, raw score of 16.74
  DOMAIN (28)..(65): WD domain, G-beta repeat domain identified by PFam, accession name WD40, E-value=7.2e-07, PFam score of 36.3
MKKMKWRSPQNPTKKETRRPEQLGLNQGLPIVTLSGHMEAVSSVLWSDAEEICSASWDHTIRVWDVESGSLKSTLTGNKVLIGISYSPTL

SEQ ID NO: 50057 - protein, 78 aa, Homo sapiens
  misc_feature (1)...(78): Xaa = X or * as defined in Table 2
CLELRNLFYGACSWEVSISSDSEKPGIFNASPASAVHCXXGFARPSSWRVLGAICTFHHSVYAKTAKRKASTXRHFHH

SEQ ID NO: 50058 - protein, 19 aa, Homo sapiens
CLELRNLFYGASPASAVHC

SEQ ID NO: 50059 - protein, 105 aa, Homo sapiens
  misc_feature (1)...(105): Xaa = X or * as defined in Table 2
WATRSSCSSMMEMPPWCPCGCAGRWRRGGASRGPREAAAGHXKPRTSNQGEQPTRRPSPYAACARRAFAGPWASLPSPSPLSAGGLAWGAPCVAHPTRPSPYLLV

SEQ ID NO: 50060 - protein, 933 aa, Homo sapiens
  misc_feature (1)...(933): Xaa = X or * as defined in Table 2
MDSPVLPVGEFSEPFVHFITQWGCVSKDLWLQVTETQFGQSKGNKKCVKKALACVPGPMLSMQRHLRGFSLAWESVNNKLDAPEIRMISVFCESPRLEGNYNTFKDAARNQKGACEWTDATQENTYTKISSAKLCLWNTLALTLGKADRQPWNAGLCKACGTSSGLESAFSKTSFPPVKEVTPVTTIKNAFQASVHLIFFNITLETTGKQKKNNEKTLTQEASGTILPFTRISFLRQTHECRHPKCLATSPWPTGVILCPIQHRTTLVLRLLSQTRDRSWVGLLALAKARGAVRSLVLNGDAESTLHTPWSGGMEALTTQLGPGREGSSSPNSKQELQPYSGSSALKPNQISNTLLKNYSYNEIHNRRVALGITCVQCTPRSCGMITKREAERMCKSFLGEHKPPKLPENFAFDVVHECAWGSRVHQGRLQQCVPKPNKFIFHSHRTPHAKYTQPDAANFNSGRPHLKLSHKSPTDELSHAPQQEKPMFNGGTRKRTFSLQGGGGGGPNGGSGGPGGGAGVRSYPVIPVPSKGFGLLQKLPPPLFPHPYGFPTAFGLCPKKDDPVLGAGEPKGGPGTGSGGGGAGTGGAKPRPWRQPWRRQRRRQRQLLAAVPQSPWTVPSQPKRVASARRSAARALCPAGPWTKIARTRRCHRPWPRCLRRPRPPARKGSYVSAFRPVVKDTESIAKLYGSAREAYGAGPARGPGPGAGSGGYVSPDFLSEGSSSYNSASPDVDTADEPEVDVESNRFPDDEDAQEETEPSAPSAGGGPDAGRPAFGDLAAEDLVRRPERSPPSGGGGYELREPCGPLGGPAPAKVFAPERDEHVKSAAVALGPPASYVCTPEAXRTPLTCPCIPGEDGLTLDVTGTHLVEKDIENLARDTLCNELDQERKARYAIQQKLKEAQDALHHFSCKMLTPRHCTGNCSFKPPLLP

SEQ ID NO: 50061 - protein, 274 aa, Homo sapiens
  misc_feature (1)...(274): Xaa = X or * as defined in Table 2
KQAHRPREEKRREEKRKEGPSVPETLKKKQRNFTELKIKRLRKKFAQQMLRKARRKLIYEKAKHYPKEYRKMYRTXISNGRGWARKAGQLYLVLKNPKFAVVIRNQKVSMGVSPKLRKVVVSFLRPSSKSSNETFVKALKQRPSDXTMPXGLVRGPIXLPWGYPPQSXSPVNEPXSYKRGYAKIQXEAELPLTDNALIASISWVNSAFICMDDLIHEIYTVGKRFKEANNFLWPLQIVLLPRGGMKKKTTHFVEGGDAGTQRSDQINRLIRRMN

SEQ ID NO: 50062 - protein, 60 aa, Homo sapiens
VRAYQAERMPEQIRLIVGGVDPKQLAVYEELARNVPGFLPTKDLGQPTGFLAQPMKGNAV

SEQ ID NO: 50063 - protein, 52 aa, Homo sapiens
LFLPFSRVLLERLIVNRPHPWGLLITFIELIKNPAFKFWNHEFVHCAPGRVG

SEQ ID NO: 50064 - protein, 730 aa, Homo sapiens
  misc_feature (1)...(730): Xaa = X or * as defined in Table 2
RSLKAFICSILSMDKQSRDPPVKMQGSITTPGSIALAQAQAQAQVPAKAPLAGQVSTMVTTSTTTTVAKTVTVTRPTGVSFKKDVPPSINTTNIDTLLVATDQTERIVEPPENIQEKIAFIFNNLSQSNMTQKEELVNNTELVQSYRQQIGNVVNQANLQLFWNMYNSRRDLDINRPGTVPNAKTLRCPVMLVVGDNAPAEDGVVECNSKLDPTTTTFLKMADSGGLPQVTQPGKLTEAFKYFLQGMGYMPSASMTRLARSRTASLTSASSVDGSRPQACTHSESSEGLGQLNLKFEIEVLCKNLALDINELKPGNLLKDKDRLKNLDEQLSAPKKDVKQPEELPPITTTTTSTTPATNSTCTATVPPQPQYSYHDINVYSLAGLVPHITLNPTAHPQLKQCVRQAIERAVQELVHPVVDRSIKIAMTTCEQIVRKDFALDSEESRMRIAAHHMMRNLTAGMAMITCREPLLMSISTNLKNSFASALRTASPLQREMMDQAAAQIXAQDNCFLLCKVGGVDPKQLAVYEEFARNVPGFLPTNDLSQPTGFLAQPMKQAWATDDVAQIYDKCITELEQHLHAIPPTLAMNPQAQALRSLLEVVVLSRNSRDAIAALGLLQKSMENGLNYMAVAFAMQLVKILLVDERSVAHVTEADLFHTIETLMRINAHSRGNAPEGMDITTRQKVNKKREGFNDTINQPATPNRQSIEHLTQQEQNMQSSQMHMEHSPE

SEQ ID NO: 50065 - protein, 1248 aa, Homo sapiens
  DOMAIN (1169)..(1216): Hypothetical hesB/yadR/yfhF family proteins domain identified by eMATRIX, accession number BL01152C, p-value=8.000e-09, raw score of 25.93
  misc_feature (1)...(1248): Xaa = X or * as defined in Table 2
KNPEFNKMVLNETYRNIKVLLTSDKAAANFSDRSLLKNLGHWLGMITLAKNKPILHTDLDVKSLLLEAYVKGQQELLYVVPFVAKVLESSIRSVVFRPPNPWTMAIMNVLAELHQEHDLKLNLKFEIEVLCKNLALDINELKPGNLLKDKDRLKNLDEQLSAPKKDVKQPEELPPITTTTTSTTPATNTTCTATVPPQPQYSYHDINVYSLAGLAPHITLNPTIPLFQAHPQLKQCVRQAIERAVQELVHPVVDRSIKIAMTTCEQIVRKDFALDSEESRMRIAAYHMMRNLTAGMAMITCREPLLMSISTNFKKTVFASALRTASPQQREMMDQAAAQLAQDNCELACCFIQKTAVEKAGPEMDKRLATEFELRKHARQEGRRYCDPVVLTYQAERMPEQIRLKVGGVDPKQLAVYEEFARNVPGFLPTNDLSQPTGFLAQPMKQAWATDDVAQIYDKCITELEQHLHAIPPTLAMNPQAQALRSLLEVVVLSRNSRDAIAALGLLQKAVEGLLDATSGADADLLLRYRECHLLVLKALQDGRAYGSPWCNKQITRCLIECRDEYKYNVEAVELLIRNHLVNMQQYDLHLAQSMENGLNYMAVAFAMQLVKILLVDERSVAHVTEADLFHTIETLMRINAHSRGNAPEGLPQLDWKXCGSNYEAMIDRAHGGPNFMMHSGISQASEYDDPPGLREKAEYLLREWVNLYHSAAAGRDSTKAFSAFVGQMHQQGILKTDDLITRFFRLCTEMCVEISYRAQAEQQDNPAGNPNMIRAKCYHNLDAFVRLIALLVKHSGEATNTVTKINLLNKVLGIVVGVLLQDHDVRQSEFQQLPYHRIFIMLLLELNAPEHVLETINFQTLTAFCNTFHMLRPTKAPGFVYAWLELISHRIFIARMLAHIPPQAEGGWPMYAQLLIDLIPNYLAPFLRNVELTKPMQILYKGHFKKCLLVLLHDFPEFLCDYHYGFCDVIPPNCIQLRNLILSAFPRNMRLPDPFTPNLKVDMLSEINIAPRILTNFTGVMPPQFKKDLEAYLKTRSPVTFLSDLRRTLQVFHGTGGFGYNLQLHQWHWVLLMSGTQAIAHIHNKGQAHLSMEAPFTHFRHTWDYLSRNFGLWDLGHWRGRYSLFWNGNLANQLPGTPNRHTHYLQVGTMAEPFLQRANTEAIQEQITRVLLERLIVNRPHPWGLLITFIELIKNQRFKFWNHEICYTCAPGNSEKLFPVGSAQLLAWGQEGQGPSKLIGRGTGLPS

SEQ ID NO: 50066 - protein, 273 aa, Homo sapiens; identical to SEQ ID NO: 49308
  DOMAIN (88)..(120): Phosphoglycerate mutase family phosphohistidine proteins domain identified by eMATRIX, accession number BL00175C, p-value= 5.000e-25, raw score of 23.75
  DOMAIN (16)..(229): Phosphoglycerate mutase family domain identified by PFam, accession name PGAM, E-value=4.7e-44, PFam score of 159.8
  misc_feature (1)...(273): Xaa = X or * as defined in Table 2

SEQ ID NO: 50067 - protein, 319 aa, Homo sapiens
  misc_feature (1)...(319): Xaa = X or * as defined in Table 2
NHYISLFQYSQDTCKLLFRNQMTISQIFLCIFSGVLMVFFLIITTSQVSFTNFFTGLKIFFLVIKFWVSEFLHHQTGTYIHIYLLFISMKSFFLYASPLTFMILSHFQASLSSIFGFCSSLFRQSSFFSNILFFXVYTQSYREFRTYYETIPCQFDITFVIFKMCCILILCFDLLNRRNGSIIIQKFGIYGLVKIFIFXIFTNIHLLQXFFQVVFILQFFNIVKKSFLQPAGSKRXKFFSKVRFFSFLXFXKWEARSSASKLFLLIYXXVYRIFSFLLVFPVVCPVGWYLLFFFFLYLFFLFLNLSKNSFYSQWYWFKR

SEQ ID NO: 50068 - protein, 55 aa, Homo sapiens
  misc_feature (1)...(55): Xaa = X or * as defined in Table 2
RPWLHLHGRPGPWPAETPPPQDPEQAPPPGRAGPAGEAEGLSCVPXAPSRRPRTM

SEQ ID NO: 50069 - protein, 177 aa, Homo sapiens
  misc_feature (1)...(177): Xaa = X or * as defined in Table 2
PVGQGARQDDSSSSASPSVRATSQGGHLMSDLFNKLVMRRKGISGKGPGAGEGPGGAFVRVSDSIPPLPPPQQPQAEEDEDDWESXGAPXHLPPPDPDLGRCSDMDTARTSCSDLLPWEGVTEPAVCGDQLQGAEGWLEATQLGRGLVCLYFMGGRLHPACATVFLRGFQRKRHTNQ

SEQ ID NO: 50070 - protein, 302 aa, Homo sapiens
MTDWYEGGHNSERKKKSTISFQVVARFSMTDFTAHRTGCQAPCDVKAEAETDEALGISQQVEQSRSQVQAIGEKVSLAQAKIEKIKGSKKAIKVFSSAKYPAPERLQEYGSIFTGAQDPGLQRRPRHRIQSKHRPLDERALQEKLKDFPVCVSTKPEPEDDAEEGLGGLPSNISSKYVFLDPLAGAVTKTHVMLGAETEEKLFDAPLSISKREQLEQQVPENYFYVPDLGQVPEIDVPSYLPDLPGIANDLMYIADLGPALPPLPLAPFQNCPPSTLRPRRQAGRQQQQRVSFRWEQLFEAT

SEQ ID NO: 50071 - protein, 125 aa, Homo sapiens
  misc_feature (1)...(125): Xaa = X or * as defined in Table 2
RGSREYLHTGCPRSGGCRSQCPGPPTQSPKVRPPQRGAPRLRGGDFPPSRLLDTVSFPSPAXAAFPPCPVPHLPAPVQGAPREVVDPSGGWATLLESIRRAGGIGKAKLRSMKERKLEKKKQKEQ

SEQ ID NO: 50072 - protein, 363 aa, Homo sapiens
MAPSSRAPRTLACRDAPATGSRASTAPVDERALQEKLKEFPVCVSTKAGARGRCRRGTWGSSQQHQLCQLLAALQHHREPVWPEGRAEGCGREARPGLVGTQGIRHRYKKYVFLDPLAGAVTKTHVMLGAETEEKLFDAPLSISKREQLEQQVPENYFYVPDLGQVPEIDVPSYLPDLPGIANDLMYIADLGPSIAPSAPGTIPELPTFHTGYRARIRAVVGARDTMMIKADAALTFRSWSPDTDWRQAAVRCVTNAALDQPMVLGEQVGRTPPAMFEVISTSPPLDVRNNITGGCTPPCDPGSNIILFPPDIRNNITEGISGKGPGAGEGPGGAFARVSDSIPPLPPPQQPQAEEDEDDWES

SEQ ID NO: 50073 - protein, 198 aa, Homo sapiens
  DOMAIN (58)..(73): WILM'S TUMOUR PROTEIN SIGNATURE domain identified by eMATRIX, accession number PR00049D, p-value=4.375e-12, raw score of 0.00
  misc_feature (1)...(198): Xaa = X or * as defined in Table 2
MFHPTCLTCPAFANRPHVHCRPGAPAFAPSAPGTIPELPTFHTEVSPSHSRQTLQDGVTXTAPPPPPPPPPPPPAPEVLGQLQPPLPTLQPRPLLGQGAREGRTAAAAPSPSGPGSSQGSGRPLRWLGHSARVHPPSWGHRQGLAAQHERKRNVEKKKQKEQEQVRATSQGGHLMSDLFNKLVMRRKGHLWEKDPGAW

SEQ ID NO: 50074 - protein, 63 aa, Homo sapiens
  DOMAIN (13)..(63): Actins proteins domain identified by eMATRIX, accession number BL00406E, p-value=1.000e-40, raw score of 8.44
  DOMAIN (1)..(63): Actin domain identified by PFam, accession name actin, E- value=1.8e-38, PFam score of 127.5
  misc_feature (1)...(63): Xaa = X or * as defined in Table 2
MQKXITAWAPAPMKIKIIASPERKYSVWIGGSIWPQLSTFQQMWISKQEYDESGPSIVHRKCF

SEQ ID NO: 50075 - protein, 59 aa, Homo sapiens
MLPGRQGRGFLSASLSTMPPIPGGCRPEATCWRKGLWRIATSNFMNGSERWSRGCRKIS

SEQ ID NO: 50076 - protein, 409 aa, Homo sapiens
  DOMAIN (90)..(113): ACTIN SIGNATURE domain identified by eMATRIX, accession number PR00190C, p-value=1.474e-30, raw score of 11.49
  DOMAIN (29)..(409): Actin domain identified by PFam, accession name actin, E- value=3.9e-204, PFam score of 671.1
  misc_feature (1)...(409): Xaa = X or * as defined in Table 2
INPPPLSRRCQLSHSVLPPLRRRVSLPVAMEEEIAALVIDNGSGMCKAGFAGDDAPRAVFPSIVGRPRHQGVMVGMGQKDSYVGDEAQSKRGILTLKYPIEHGIVTNWDDMEKIWHHTFYNELRVAPEEHPVLLTEAPLNPKANREKMTQIMFETFNTPAMYVAIQAVLSLXASGRTTGIVMDSGDGVTHTVPILRGLPHCSTPFLRLGPGLARDLTDYLMKILTERGYSFTTHGPSGKTFRNIKGEACATSPLDFEQEMGTAASSSSLEKSYELPDGQVITIGNERFRCPEALFQPSFLGMESCGIHETTFNSIMKCDVDIRKDLYANTALSGGTTMDPGIADRMQKEITALAAPAPXKIRIIAPPERKYSVWIGGSILASLSTFQQMWISKQEYDESGPSIVHRKCF

SEQ ID NO: 50077 - protein, 147 aa, Homo sapiens
  DOMAIN (53)..(108): Tubulin subunits alpha beta, and gamma proteins. domain identified by eMATRIX, accession number BL00227B, p-value=1.000e- 40, raw score of 19.29
  DOMAIN (4)..(147): Tubulin/FtsZ family domain identified by PFam, accession name tubulin, E-value=2.5e-92, PFam score of 320.2
RGTMREIVHIQAGQCGNQIGAKFWEVISDEHGIDPTGSYHGDSDLQLERINVYYNEATGNKYVPRAILVDLEPGTMDSVRSGPFGQIFRPDNFVFGQSGAGNNWAKGHYTEGAELVDSVLDVVRKESKSCDCIQGFQLTHSLGGGTG

SEQ ID NO: 50078 - protein, 482 aa, Homo sapiens
  DOMAIN (79)..(134): Tubulin subunits alpha beta, and gamma proteins. domain identified by eMATRIX, accession number BL00227B, p-value=1.000e- 40, raw score of 19.29
  DOMAIN (30)..(373): Tubulin/FtsZ family domain identified by PFam, accession name tubulin, E-value=1.1e-108, PFam score of 374.5
  misc_feature (1)...(482): Xaa = X or * as defined in Table 2
WEVSAQPSPAVPRRAPLRGLSATRSAAGTMREIVHIQAGQCGNQIGAKFWEVISDEHGIDPTGSYHGDSDLQLERINVYYNEAAGNKYVPRAILVDLEPGSMDSVRSGPFGQIFRPDNFVFGQSGAGNNWAKGHYTEGAELVDSVLDVVRKESESCDCLQGFQLTHSLGGRHGVPGWGTLLHQQGSGEEYPDRIHETPFSVHVPSPKVFKTRLLEPLQRHTSRFHHLVENTVKPYSIDNEALYYICLPTAESXPTPTYGALNPPGCSATMSGVTTCLRFPGGQLNADLRKLAVNMVPFPRLHFFMPGFAPLTSRGSQQYRALTVPELTQQMFDSKKMIAAPCDPPPTGRYLTVAAIFRGRMFHGRRWDEADGSNVAGTRNRQVISWEWVPNNVKTAVCDIPPPGAWKMSATFIGNQPRPSRRLFKRIYEQFTAMFPAQGPSLHWLHGRRAMDGDGSSPEAREQHERPWCPEYQQYPGTPRPT

SEQ ID NO: 50079 - protein, 59 aa, Homo sapiens
KDWHLHLFCGGMSSVKAGQRIFTSFAILRLLQATRAYTFKSQGMRWLGLGSEALHLRVT

SEQ ID NO: 50080 - protein, 52 aa, Homo sapiens
LDRGTSLGRSIPCPPVLCSMRKIHLRPQVLRPTSPRNISPILIRPSRMPSFG

SEQ ID NO: 50081 - protein, 42 aa, Homo sapiens
SPKGGPPIRVTAPNFMRICVKRPPNRLCVSNMAVYFTWVQAG

SEQ ID NO: 50082 - protein, 74 aa, Homo sapiens
WYRDLDRGTSLGRSIPSPPALCSVRKIPLRPQVLRPTSPRNISPISNPDPTGNRTVQLTWQPVPEPLELWPKAL

SEQ ID NO: 50083 - protein, 78 aa, Homo sapiens; identical to SEQ ID NO: 47813

SEQ ID NO: 50084 - protein, 106 aa, Homo sapiens
  misc_feature (1)...(106): Xaa = X or * as defined in Table 2
AYADQLXLRRHKSSSSSSSSSSSSSSSSSSSPLAPXLGSGDLPXEINPPSSCSLLREKDPPTTSGPQPTSPRNISPISNPDPTGNRTVQLTWQPLPQPLELWPKAL

SEQ ID NO: 50085 - protein, 293 aa, Homo sapiens
  misc_feature (1)...(293): Xaa = X or * as defined in Table 2
LCTPTPFPLFWKTVRKYSSNNQKGEXNTVLMEVCPRSPRTNXKDSQXPFELLTKMTSQGSDISGDLPWEINPLSSCSLLHEKDPPTTSGPQTDQPKKHLTNFKSETKETHFIRGPKTPVLVTDWEGRLPLVFNHSRDASLIIHPRFRGVRPRRDACLGPSPLAASPAFLEEGQVPQPLLSMSLTPSLLFWRRGKKPSTPSSPLAASPAFLEEGQVPQPHISVPRSLISTPQPLITLHPDPFPAFLEDSKEVLKQQPKGRIKHCADGGMSKEPKNQLKGLPVTKAGNIHGINDI

SEQ ID NO: 50086 - protein, 54 aa, Homo sapiens
  misc_feature (1)...(54): Xaa = X or * as defined in Table 2
SHRPSQXVLQLIKVAHPELFVPPSGFVVSLTSGMKLQTLTTREWMRILLIFWNG

SEQ ID NO: 50087 - protein, 313 aa, Homo sapiens
MAMGLFFIPFLNCTQQQWFLLGLLKTAGIWEKEHHRLSQHGNINLIPEKGRSPQSQKLGLLDRVRLSNPRGSNTKGKLFTPLNVDAIEESPSKEPKPVGLNNKERFRTAFRMKAYAFWQSSEDAGTGDPMAEDRGYGNDFPIEDMIPTLKAAIRAVRILQFRLYKKKFKETLRPYDVKDVIEQYSAGHLDMLSRIKYLQTSCLSSLKSIYPAQKIGCRREGEVVGKAQRKEEQERRGAVEERMQEKERKRTQERQGKSGFLRLLVRREKRGATPGLCCPLLAKDGLRRLPADGNRLKLHFGGWRRRNYPFSWL

SEQ ID NO: 50088 - protein, 134 aa, Homo sapiens
SPKGGPLIQVTAPNFMRVHVKRPPNRLKYGHPTANLLYFCPQPNSLFRCSFFSLLLSHASVVLAPSSAFSSSVCGAWFPHGPKMGSWSPIVFLKTTTFGDDNKTACSIFYTTPPPTRGRAAWKENQYAQEGRVK

SEQ ID NO: 50089 - protein, 439 aa, Homo sapiens; identical to SEQ ID NO: 39438
  DOMAIN (175)..(198): POTASSIUM CHANNEL SIGNATURE domain identified by eMATRIX, accession number PR00169G, p-value=8.657e-11, raw score of 9.39
  DOMAIN (5)..(226): Ion transport protein domain identified by PFam, accession name ion_trans, E-value=8.7e-07, PFam score of -41.9

SEQ ID NO: 50090 - protein, 554 aa, Homo sapiens
MTNAEHYKHSLHAYGAWAIMAQWEMENCKHEEGTFPVSSGRERQRGGEVTRTQCCNGPQHILRVSRFFTEPDGLNIIGDYSGPAQAATQLPMSWMLLHLGYPERKEMPLGKAAVYGKHTLKELTAGGKSFPPERAFGQCISCPTTFFICKMGIMIVPACRVKCSSTLTLGLAMCPVLVHVTSANITQAETCCPFSLNGGPAPGGTEYKGLWHVEFLKQPAGKHGLYDAPATRFALSNTCPVKSRTSVVYGLAEVKRSPFSCSLPTYLQRCITGSSVSPPLHAAREPSCLERLFPAGASRLGWLLLLYAPEVLSACLYQNRGHSAPWLNVQSLGPDCLDSQLWLRHLQPTCTQVKQPAMLLTQSLFGGLFTQTRMKFGGSGDLPWEINPLSSCSLLHEKAPPTTSGPQTDQPKKHLTNFKSEAFRLFFIKYKNPAQFTARLAATLRRFTALDPKREQPPLTVIFHYLPKSYKTAPPPSPFADSLFGLSPPAPRHFPKNALPSPGLSHVFQLLEAVLAAAVVGSIVVVKAGPTAGRLWCYSSSSNVVLMAAASVMN

SEQ ID NO: 50091 - protein, 110 aa, Homo sapiens
  misc_feature (1)...(110): Xaa = X or * as defined in Table 2
YSCLLILIRKITQNSVEVLGRRKFLGGGMEREWVMFLEGCFKRDXGQRGNQFQIRVTAPNFMCVCVKRPPNRLCVSNKAVYFTWVQVGFQIFEKPEPIEEICKVCWRPMA

SEQ ID NO: 50092 - protein, 143 aa, Homo sapiens
  misc_feature (1)...(143): Xaa = X or * as defined in Table 2
GGGAEAEEELGPSSAWRGAACPCPRKAGLVAKAEGPRQASLRGLTPLKRECIIREASLQXLNTKVKAAFPVRDRRWSFGFTDKTCLFCLGSEIGEVFLGLVGLRTXGRRWIFLMEQRAGGQGIDLPREVPRSKSGHQISLVSI

SEQ ID NO: 50093 - protein, 1375 aa, Homo sapiens
  DOMAIN (370)..(393): POTASSIUM CHANNEL SIGNATURE domain identified by eMATRIX, accession number PR00169G, p-value=8.657e-11, raw score of 9.39
  DOMAIN (192)..(425): Ion transport protein domain identified by PFam, accession name ion_trans, E-value=2.4e-05, PFam score of -64.0
  misc_feature (1)...(1375): Xaa = X or * as defined in Table 2
PPDPLPGLPCPPGGPPLPAFGGGWGGARGSWHWSSRACSRRRRLVHAPRAPLLPRAAAEKAKRPAGARQMGLKARRAAGAAGGGGDGGGGGGGAANPAGGDAAAAGDEERKVGLAPGDVEQVTLALGAGADKDGTLLLEGGGRDEGQRRTPQGIGLLAKTPLSRPVKRNNAKYRRIQTLIYDALERPRGWALLYHALVFLIVLGCLILAVLTTFKEYETVSGDWLLLLETFAIFIFGAEFALRIWAAGCCCRYKGWRGRLKFARKPLCMLDIFVLIASVPVVAVGNQGNVLATSLRSLRFLQILRMLRDGPGEGGTWKLLGSAICAHSKELITAWYIGFLTLILSSFLVYLVEKDVPEVDAQGEEMKEEFETYADALWWGLITLATIGYGDKTPKTWEGRLIAATFSLIGVSFFALPAGILGSGLALKVQEQHRQKHFEKRRKPAAELIQAAWRYYATNPNRIDLVATWRFYESVVSFPFFRKEQLEAASSQKLGLLDRVRLSNPRGSNTKGKLFTPLNVDAIEESPSKEPKPVGLNNKERFRTAFRMKAYAFWQSSEDAGTGDPMAEDRGYGNDFPIEDMIPTLKAAIRAVRILQFRLYKKKFKETLRPYDVKDVIEQYSAGHLDMLSRIKYLQTRIDMIFTPGPPSTPKHKEVFRKGQHFTFPSQQSSRGLNHMXARPSTSEIEDQRHXWGKFVKSLKGQVQGLGRKLDFLVDMHMQHMERLQVQVTEYYPTKGTSSPAEAEKKEDNRYSDLKTIICNYSETGPPEPPYSFHQVTIDKVSPYGFFAHDPVNLPRGGPSSGKVQATPPSSATTYVERPTVLPILTLLDSRVSCHSQADLQGPYSDRISPRQRRSITRDSDTPLSLMSVNHEELERSPSGFSISQDRDDYVFGPNGGSSWMREKRYLAEGETDTDTDPFTPSGSMPLSSTGDGISDSTVPLFLSSEILQKQVGQSITSMLGFLSRGPSMKLCMGLACVLSLWNTVSGIKGEAKKEKGMTFLPTTDSKKFFSLLSVTSYSSFAFHKFSVAVYNISNLKTVDPAKFPTRYCYCLNNRTNDLSDFTALLVDIIGNSTSYLTEIFKSTSILSVNQSNESDCIFICVMTGKSGRNLSDFWEIEEKYPIINYTFTSGLSGVLALLLTQSLFGGLFTRTRMKFGAVTRIGGPPLGNQSPSSCSLLHEKDPPTTSGPQTDQPKKHLTNFKSAARPTFLGQGQVPLNPFSFTLSGKSCFPRRQEPPNRLFPHPNLLSLCPNPLFLCPNPFSTFLEGKNHHPHPFSVSQVFSLGLPPSLWEHSPMAHRLRVQPRQQPPDIHKQVISLQSGHSLLVKSQSWSQDPIKFQLPHHHKNTASVCINPSVYEKEEERYGDLFMRKNQKTS

SEQ ID NO: 50094 - protein, 94 aa, Homo sapiens
  misc_feature (1)...(94): Xaa = X or * as defined in Table 2
ILDYVFSSSHLFQSKLLGRRGRASHGTKLXAGPGGGGEVIKGLXGGGAEAEEELGPSSAWQGAACSFPRKAGLAAKGEGPRQASLHGLTPLKCG

SEQ ID NO: 50095 - protein, 44 aa, Homo sapiens [sequence omitted]

SEQ ID NO: 50096 - protein, 101 aa, Homo sapiens
MLPAVGSVDEEEDPAEEDCPELVPIETTQSEEEEKSGLGAKIPVTIITGYLGAGKTTLLNYILTEQHSKRVAVILNEFGEGSALEKSLSVSQGGELYEEWP

SEQ ID NO: 50097 - protein, 55 aa, Homo sapiens
  misc_feature (1)...(55): Xaa = X or * as defined in Table 2
MFSQFSFEQGLVSIKDKSQQVIVQGVHELYDLEETPVSWKDALRDQXDWSSLAEI

SEQ ID NO: 50098 - protein, 30 aa, Homo sapiens
MKVSYVKNDYSEFNLSLVILLSAQPYKKNK

SEQ ID NO: 50099 - protein, 64 aa, Homo sapiens
MDLIVVLNFFTSSSGTKSVLLMRTISAKATCLVASLIRPSGFSSVKCALGPIHMLRLGTGQWVG

SEQ ID NO: 50100 - protein, 116 aa, Homo sapiens
  misc_feature (1)...(116): Xaa = X or * as defined in Table 2
ILGGRKLRLEKSLGCAAQGGGALYEEWLELRNGCLCCSVKDNGLXRAIENLMQKKGKFDYILLETTGFADPGAVASMFWVDAELGSDIYLDGIITIVDSKYGLKHLAEEKPDGLIQ

SEQ ID NO: 50101 - protein, 121 aa, Homo sapiens
GAGSWEQLNPGEAWEAASPPTHPGLPYFLRPFEGSPCVTTITTLRTLGACPCPHHTSNLDPVLFRTSSFLASVLVLVATPFSRKIDDKPVKIDKWDGSAVKNSLDDSAKKVLLEKYKYVEN

SEQ ID NO: 50102 - protein, 198 aa, Homo sapiens
MTPGEDKELEIKFNQVASEPPIKALDSEVWVSFLVGEHINVLGGRHALIPQGGGMKALRPHLICLFIWLVLIRVIYSWGPNPRATNRCQSLACWELGRTAGSEQWWKIDDKPVKIDKWDGSAVKNSLDDSAKKVLLEKYKYVENFGLIDGRLTICTISCFFAIVALIWDYMHPFPESKPVLAFPELFPLDVAASSHSF

SEQ ID NO: 50103 - protein, 41 aa, Homo sapiens
MAAAAVTGREKRCVSEAVMRLAVLPTAVQEVAVAACWISGR

SEQ ID NO: 50104 - protein, 106 aa, Homo sapiens
EEQHSMLGSGFKAERLRVNLRLVINRLKLLEKKDERARIRVEHIIREDYLVEAMEILELYCDLLLARFGLIQSMKELDSGLAESVSTLIWAAPRLQSEVAELKIVA

SEQ ID NO: 50105 - protein, 203 aa, Homo sapiens
  misc_feature (1)...(203): Xaa = X or * as defined in Table 2
EEQHSMLGSGFKAEHLRVNLRLVINRLELLEGKKKKKTELAQKAGKEIADYLAAGKDERARIRVEHIIREDYFVEAMEILELYCDLLLARFGLIQSMKELDSGLAESVSTLILAASRLQSEVEGFPNIYSSXIPSNSPIILNLXMAIKGCKNYRLLHQIVVPGPSQKPLQNFLLDLRLPWTTLWPIFGLEGKIPLWERIKSEP

SEQ ID NO: 50106 - protein, 359 aa, Homo sapiens
  DOMAIN (8)..(46): ATP synthase alpha and beta subunits proteins domain identified by eMATRIX, accession number BL00152E, p-value=3.887e- 18, raw score of 22.68
  DOMAIN (173)..(316): PLAT/LH2 domain identified by PFam, accession name PLAT, E- value=0.026, PFam score of 1.9
MNDAFGGGSLTALLVIETQADDVSAYIPTNVISITDRQILETELFYKDIRSAINIGSVCVLCWICCPNQDYEAGGRLSLAHVYLQLHKGENIEDIPKEVLTDCAHLVKANSTQGCKNNVNVVNTPRSNLKKTADVDVRQIGFHRQKDVKIVTMEKKVNEILNRLEKTKWSRARRLMFVIQNFGKEKRGVVITLYGSEGRSEPHHLCDPQKTVFERGGLDVFLLTTWTSLGNLHSLRLWHDNSGVSPSWEMQLMDICYVGIDIGHTSLKWLPWPYYNHTITPPATFLKSKQALGQMAFVAELAQKARKEIADYLAAGKDERARIRVEHIIREDYLVEAMEILELYCDLLLARFGLIQSMK

SEQ ID NO: 50107 - protein, 380 aa, Homo sapiens
MHGTFLRFHPDSPPTGAENAATPPLASGRGPQHLSDLRLRTPRPGLPAVLTVPSWTTYSTGDGEILYLWLRLLDLCAARDLVPPEEEGGAGRCRSFCSPSPQPARDPAWRKKKKTELAQKARKEIADYLAAGKDERARIRVEHIIREDYFVEAMEILELYCDLLLARFGLIQSMKELDSGLAESVSTLTWAAPRLQSEVAELKIVADQLCAKYSKLMHNLSVEAPSKILVERYLIEIAKNYNVPYEPDSVVMAEAPSGVETDLIDVGFTDDVKKGGPGRGGGGGFTAPVGGPDGMVPMPMPMPMPSANTPFSYPLPKGPSDFNGLPMGTYQAFPNIYPSQIPATPPSYESVDDINADKNISSAQIVGPGPKPEASAKLPS

SEQ ID NO: 50108 - protein, 1142 aa, Homo sapiens
MAGGQEVEAVVADQLCAKYSKEYGKLCRTNQIGTVNDRLMHKLSVEAPPKILVERYLIEIAKNYNVPYEPDSVVMVEDILEMSLVEFGNIGEAFLEQNQSPESSVTLTSANATLLLSRQNISTLPLSSYTLGHPAPVRLGFPSALALKELLNKHPGVNVQVFALDPVLGTFLILTSVILMVLVVINLFVSAILMAFGKERKSLKVVMQSNTICYRENRISTVPPSGTRETARKAKGHRGLPENPVQLSEAFNCQDKLCNWIPVGQCPAARSTVYANERAQLPGTVTMASRVIFPLPLAFESLHTPGKSSSQGSDAGAGPPILGLFCPWTRGPRLSALRARRLSSPIADVNKNIPPSKHRTILSSRPDGSILFLPPFFVVTITPPARADVQEKDGHTIEQDEGERQHQIEKTEEENTNKPKRKQKLAPGTPQSNMKPVHERSQECLPPKKRDLPVTSEDMGRTTSCSTNHTPSSDASEWSRGVVVAGQSQAGARVSLGGDGAEAITGLTVDQYGMLYKVAVPPATFSPTGLPSVVNMSPLPPTFNVASSLIQHPGIHYPPLHYAQLPSTSLQFIGSPYSLPYAVPPNFLPSPLLSPSANLATSHLPHFVPYASLLAEGATPPPQAPSPAHSFNKAPSATSPSGQLPHHSSTQPLDLAPGRMPIYYQMSRLPAGYTLHETPPAGASPVLTPQESQSALEAAAANGGQRPRERNLVRRESEALDSPNSKGEGQGLVPVVECVVDGQLFSGSQTPRVEVAAPAHRGTPDTDLEVQRVVASQVGPQSTILRTQCLCNHLTFFASDFFVVPRTVNVEDTIKLFLRVTNNPVGVSLLASLLGFYVITVVWARKKDQADMQKGCQTPAGVHPPAPQLEEAGTIPSGGLVKVTVLADNDPSAQFHYLIQVYTGYRRSAATTAKLSVYLILPGCRTRTRDPLSGVGSRPVAGAEYRLPGQFGRTSTVAASNTQAEGAAGHRGFWLAKQHPKDAVTLELRCTPCRSIARLSDAGGVPAGARRVRCAAVLANCSLDMKRGVCASRSATVRKRSDKDVEELGDRESAVGVSDFLDGDAHYERNGNNSHLYQRHKKTKRGVAIARDKMPPDFQDHVIPGQEIKAKSFYSPVDSDETGDKIRYNSKRRHWRTGMLGL

SEQ ID NO: 50109 - protein, 314 aa, Homo sapiens
MRSVNQRYLETYFRLPEQFRSLEPVVRERIRSRLTRGKVECTLRYEPDVSAQGELILNEKLAKQLVTAANWAEAPPGVETDLIDVGFTDDVKKGGPGRGGSGGFTAPVGGPDGTVPMPMPMPMPMPSANTPFSYPLPKGPRIPFDFGFAGFVIAWYVSNLVGGTMYWWFAARELRRRNIHNAFKLNLFESARYIKGAWSFVWSTNIAHSIWSARNSCSTVLVGIVLGPAAAGLFKIAMTFFDAAGTPAGLLGKSFYPEVMRLDPRTTRPWLLGVKSGLLAGGIGILVALAVLIVGKPLISLVFGVKYLEAYDLI

SEQ ID NO: 50110 - protein, 384 aa, Homo sapiens
  misc_feature (1)...(384): Xaa = X or * as defined in Table 2
EEQHSMLGSGFKAERLRVNLRLVINRLKLLEKKKTELAQKARKEIADYLAAGKDERARIRVEHIIREDYLVEAMEILELYCDLLCLARLGLYSSYXKELDSGLAESVSTLIWAAPRLQSEVAELKIVADQLCAKYSKEYGKLCRTNQIGTVNDRLMHKLSVGTPPQILVERYLIEIAKNYNVPYEPDSVVMAEAPPGVETDLIDGGFPDDVKKRGPWKKEGSGGFTAPVGGPDGTVPMPMPMPMPMPSANTPFSYPLPKGPSDFNGLPMGTYQAFPNIHPPQIPATSPIRIESVRWTFNCLIKEYSIFLAQICLGPGPKARRPFAKFPSRPADNFXQLLFLPELPSVPDTLPTASAGASTFRHLKDIDFDDLSRRFEGAGKRKT

SEQ ID NO: 50111 - protein, 84 aa, Homo sapiens
  misc_feature (1)...(84): Xaa = X or * as defined in Table 2
GCISTSRLGSMPTTTLRLLQKISXRSYSSAPASCLISIVKSASDXRARAPTRGSYGGPLLRLSSSSSLASGRCVTSRASLRPRS

SEQ ID NO: 50112 - protein, 92 aa, Homo sapiens
TYFEDNPRDLQLLRHDLPLHPAVVKPHLGHVPDYLESKVPEPTAQLQAQRKEIQTHSQALLRLLGLSGAEHIVEHRLTPFVDRRGSGAYCTA

SEQ ID NO: 50113 - protein, 84 aa, Homo sapiens
  misc_feature (1)...(84): Xaa = X or * as defined in Table 2
GAVPAVRLGGPLHVHLPHARXPSNLSALQFYQDGSLRWWQTVSXRAASRSPPTRPVTIKSVCTPILPGWLSSLVANCIVKSASD

SEQ ID NO: 50114 - protein, 128 aa, Homo sapiens
  DOMAIN (29)..(75): DEAD-box subfamily ATP-dependent helicases proteins domain identified by eMATRIX, accession number BL00039D, p-value=7.500e- 14, raw score of 21.67
  misc_feature (1)...(128): Xaa = X or * as defined in Table 2
DCVIATDAEVLGAPVKGKRRGRGPKGDKASDPEAGVARGIDFHHVSAVLNFDLPPTPEAYIHRAGRXXCDGPGICMVGTLRDLGCAGQSLRVGDASCTVFPCRTARANNPGIVLTFVLPTEQFHLCKI

SEQ ID NO: 50115 - protein, 54 aa, Homo sapiens
MGRPRRRCFIEKSPTRPMVIGNYRTQMWDKQKEVFLPSTPGLGMHVEVKDTTAS

SEQ ID NO: 50116 - protein, 610 aa, Homo sapiens
  DOMAIN (40)..(79): DEAD-box subfamily ATP-dependent helicases proteins domain identified by eMATRIX, accession number BL00039A, p-value=2.565e- 28, raw score of 18.44
  DOMAIN (34)..(254): DEAD/DEAH box helicase domain identified by PFam, accession name DEAD, E-value=2e-26, PFam score of 86.4
  misc_feature (1)...(610): Xaa = X or * as defined in Table 2
ARGQRVRAALLSSAMEDSEALGFEHMGLDPRLLQAVTDLGWSRPTLIQEKAIPLALEGKDLLARARTGSGKTAAYAIPMLQLLLHRKRQVRWXNRQXEGLVLVPTKELARQAQSLIQQLATYCCSGMSELANVSACXKTQSLRELCLMEKPDVVVGTPSRILSHFAARQPETFVTPWSFLVVERSLTFFFPFGFEEELKKSSSGKAESLAPDFNKAFLMSATFNEDVQALKELILHNPVTLKLQESQLPGARPVTAVSGGLXDLREDKFLLLYALLKLFIDSGASLWLFCSTLXEREFTGLRLFLWEQFQLSPTCVLNGELPLRSRVPHHLQQFNQGFYGLCHRQLNAEVLGAPVQGQASGPRAQRGQVPLDPEAGVARGIDFHHCVCVLNFXSFPPTPEAYIHRAGRXXCDGPGICMDSTRXQPRAXSXPFVLPTEQFHCRQDXGASQWREQGAPSLLPYKFGMEEIEGFRYRXGVHPQDAMRSVTKQAIREARLSLIKEELLHSEKLKTYFGRQPLGDLQALRHGPYLCTPQLVEAPTWGHVPDLPGSSCFSVALGAPFTKKREEACLPSCRKAQESKVPRTPLRSFKHKGKKFRPDSQALREVVGPL

SEQ ID NO: 50117 - protein, 125 aa, Homo sapiens
  DOMAIN (40)..(63): Immunoglobulins and major histocompatibility complex proteins domain identified by eMATRIX, accession number BL00290A, p-value= 2.588e-14, raw score of 20.89
  DOMAIN (36)..(104): Immunoglobulin domain identified by PFam, accession name ig, E-value=4.1e-08, PFam score of 31.2
TTTKFAGRRPKVTVLGQPKAAPSVTLFPPSSEELQANKATLVCLISDFYPGAVTVAWKRGSSPVKAGVETTTPSKQSNNKYAASSYLSLTPEQWKSHKSYSCQVTHEGSTVEKTVAPTEYLLRVY

SEQ ID NO: 50118 - protein, 182 aa, Homo sapiens
  DOMAIN (84)..(118): IMMUNOGLOBULIN V REGION domain identified by eMATRIX, accession number DM00031B, p-value=2.324e-12, raw score of 15.41
  DOMAIN (34)..(117): Immunoglobulin domain identified by PFam, accession name ig, E-value=3e-09, PFam score of 34.9
  misc_feature (1)...(182): Xaa = X or * as defined in Table 2
MAWTPLLLLLLSHCTGSLSQPVLTQPPSSSASPGESARLTCTLPSDINVGSYNIYWYQQKPGSPPRYLLYYYSDSDKGQGSGVPSRFSGSKDASANTGILLISGLQSEDEADYYCGCFTVFWSTFXVLVPEHQQSWLPLWTPGVVSLLVCLVPSFVPPPLTKVPSSLSSPVKESAILAVDIH

SEQ ID NO: 50119 - protein, 277 aa, Homo sapiens
  DOMAIN (90)..(124): IMMUNOGLOBULIN V REGION domain identified by eMATRIX, accession number DM00031B, p-value=1.422e-13, raw score of 15.41
  DOMAIN (40)..(125): Immunoglobulin domain identified by PFam, accession name ig, E-value=2.9e-08, PFam score of 31.7
  misc_feature (1)...(277): Xaa = X or * as defined in Table 2
RVRVSTMAWTPLLLLLLSHCTGSLSQPVLTQPPSSSASPGESARLTCTLPSDINVGIYNIYWYQQKSGSPPRYLLYYYSDSYKGLGSGVPSRFSGSKDASANTGILLISGLQSDDEGDYYCATWDSSLTGQVFGGGDTKLTRPXGQPKACPPGVTLVPNPPSSRSFQAQQGPQLVMSSXSDFLTPGSPLNSCPWKADSQPPFKAGVETTHTPPKQSNNQVRGPAGYLSLTAEQWEVPTESYSCQVTHXRGAPWEKTVGPYRMFHRFLNPSPPHHGMT

SEQ ID NO: 50120 - protein, 172 aa, Homo sapiens
  DOMAIN (66)..(81): WILM'S TUMOUR PROTEIN SIGNATURE domain identified by eMATRIX, accession number PR00049D, p-value=3.593e-09, raw score of 0.00
  misc_feature (1)...(172): Xaa = X or * as defined in Table 2
NSETREHNHRYVPQRETSGGTDGWKSKQPEXLXRRQLVQSWAKSXNQPKLPSSPHXELPWVTPSARNFRSGPYSPPPPPPPQPLPSSHLSSLHFYSPFVSYTSFDLYSSSYHSYLMDEDTVEPKELRSSQKVIGHSFTGFQPTLSANPYDRGDGKIIELLPRKAQTFPVVRT

SEQ ID NO: 50121 - protein, 167 aa, Homo sapiens
  DOMAIN (76)..(96): SOMATOSTATIN RECEPTOR TYPE 1 SIGNATURE domain identified by eMATRIX, accession number PR00587A, p-value=7.863e-11, raw score of 8.06
GSTYSELLSGTACVVTALHLAQQRRHHLLGGLASRHDAPEQLAVGAPVQPRPLPAPAGAQALVGHAHVVVEGGPPGSGGPGEGAIARGPGAAAAAGAGPGAPRRRRLQASAGPCSRSSEPGRRSAPRAAPPAPSAGPHVAFPSRRPAAGSPPRSRPPPPPGIPTGGR

SEQ ID NO: 50122 - protein, 162 aa, Homo sapiens
  misc_feature (1)...(162): Xaa = X or * as defined in Table 2
TRQVYSGGVRTPPCQSHPHRPRSSCRPPPPPRRPRSSRRRRGLSPRRAPAHWSSRSTRPAWWAPSRRHAPRPPWSPGPASGXCSVYFPILPLALFPLPVHHGGVHVCGREGVGLVQEGDSHSGEWSXRSAWGSTSLRAAPRSGGRPPAGGGWRYTRPPSRRC

SEQ ID NO: 50123 - protein, 318 aa, Homo sapiens
  DOMAIN (190)..(217): Protamine P1 proteins domain identified by eMATRIX, accession number BL00048, p-value=4.263e-09, raw score of 6.39
  misc_feature (1)...(318): Xaa = X or * as defined in Table 2
GSGRIPGRAGLEGPGPAFQKSRLSPASGSAGPRGASPSAVPPGRRPGVPAFPASNPPPVAAVPGPWVTCWGKGLQGEGKAPRAPHAGTPQRSPGSARPTGLSPPAXPSRXRARRPSPETPPGHGRAGPPPPDGAVQRQGPGCRAPSASRPPGSARARRRRWPAARPPGCPARPGPRGGRPRRRPSPPAAGRARRRAPRTPAARSRXVCPRGRRSAAPPRGHGTAPCAAAAPPPPRGLGRPADAPEQPRCRCARPAPPLPAPAGAQALVGHAHLLLKAALGHDFTFLWATIHEVIPKMRWGQSQCQRGGPSSHTPDLSA

SEQ ID NO: 50124 - protein, 87 aa, Homo sapiens
  misc_feature (1)...(87): Xaa = X or * as defined in Table 2
LRGQKVLLLGDRARLSQKKKERKREREREREGHGRNGRRRNGQGRGPEGQRXNERTGQERTGHGREGRKEGRKEGRKEGRNERERGY

SEQ ID NO: 50125 - protein, 110 aa, Homo sapiens
  DOMAIN (64)..(110): Vertebrate metallothioneins proteins domain identified by eMATRIX, accession number BL00203, p-value=4.398e-09, raw score of 13.94
PRFTDENLEMCTVIQSVQCYHRSWHHSSPPEPAPHHQSPPAHSPVLCWFRRLGGGEDWAPSSGGRAVWRSHCSCFCCCSSSCCSCSQSGKRTAAAPWPTTSPAPSRSCCA

SEQ ID NO: 50126 - protein, 233 aa, Homo sapiens
  DOMAIN (62)..(86): HMW KININOGEN SIGNATURE domain identified by eMATRIX, accession number PR00334B, p-value=7.033e-12, raw score of 8.69
  misc_feature (1)...(233): Xaa = X or * as defined in Table 2
AGRSALPVDAVQVQAEGLWPPAVLLHHHHHPHHHYHHYHHHHHHHHHPXHHHPHHHHHHHRNHHHHHHHHLHHHHHHHHHHLYHSHYHHHHHHHDHHHYHHFHDHYHHHHHHYSHHHHPHHHHHXRHDHYAHHHHHQHHCHHCHHPHRHGHYHYHHHGTVAFGALEDSAVARTGLPLPEGVLCGAPTAAASAAVPPPAVPAPNQGRGPQLHPGQQLRPLLHAHAALQWPTTHL

SEQ ID NO: 50127 - protein, 135 aa, Homo sapiens
RGWAFKNPDTIEQCRREGFSQKMQEQKNEGCQVYGFLEVNKVAGNFHFAPGKSFQQSHVHVHDLQSFGLDNINMTHYIQHLSFGEDYPGIVNPLDHTNVTAPQASMMFTVAGLIDSLIYHSARAIQKKIDLGKTT

SEQ ID NO: 50128 - protein, 365 aa, Homo sapiens
MEALGKLKQFDAYPKTLEDFRVKTCGGATVTIVSGLLMLLLFLSELQYYLTTEVHPELYVDKSRGDKLKINIDVLFPHMPCAWSQYLSLIFLLPDLSIDAMDVAGEQQLDVEHNLFKQRLDKDGIPVSSEAERHELGKVEVTVFDPDSLDPDRCESCYGAEAEDIKCCNTCEDVREAYRRRGWAFKNPDTIEQCRREGFSQKMQEQKNEGCQVYGFLEVNKINMTHYIQHLSFGEDYPGIVNPLDHTNVTAPQASMMFQYFVKVVPTVYMKVDGEVLRTNQFSVTRHEKVANGLLGDQGLPGVFVLYELSPMMVKLTEKHRSFTHFLTGVCAIIGGMFTVAGLIDSLIYHSARAIQKKIDLGKTT

SEQ ID NO: 50129 - protein, 157 aa, Homo sapiens
MEALGKLKQFDAYPKTLEDFRVKTCGGATVTIVSGLLMLLLFLSELQYYLTTEVHPELYVDKSRGDKLKINIDVLFPHMPCAWSQYLSLIFLLPDLSIDAMDVAGEQQLDVEHNLFKQRLDKDGIPVSSEAERHVCELQLESGNKTVVPTTWNCKIK

SEQ ID NO: 50130 - protein, 184 aa, Homo sapiens
  misc_feature (1)...(184): Xaa = X or * as defined in Table 2
FRGRLASPFRPVPMEALGKLKQFDAYPKTLEDFRVKTCGGATVTIVSGLLMLLLFLSELQYYLTTEVKGRGLMRGRGLAFXEXDLXGWEWGRRGLGLSLTEVALPQVHPELYVDKSRGDKLKINIDVLFPHMPCAYLSIDAMDVAGEQQLDVEHNLFKQRLDKDGIPVSSEAERHVLSFVVSAD

SEQ ID NO: 50131 - protein, 54 aa, Homo sapiens
  misc_feature (1)...(54): Xaa = X or * as defined in Table 2
XFVFQHPAAVLRPTSHGINTQIGTRHVRKKYIDVDLQFISPRLVHVELRIAPPX

SEQ ID NO: 50132 - protein, 120 aa, Homo sapiens
  DOMAIN (27)..(43): Extracellular proteins SCP/Tpx-1/Ag5/PR-1/Sc7 proteins domain identified by eMATRIX, accession number BL01009E, p-value=1.439e- 11, raw score of 13.50
  DOMAIN (29)..(41): SCP-like extracellular protein domain identified by PFam, accession name SCP, E-value=0.0015, PFam score of 16.7
GIPKTERIGCGSHFCEKLQGVEETNIELLVCNYEPPGNVKGKRPYQEGTPCSQCPSGYHCKNSLCEPIGSPEDAQDLPYLVTEAPSFRATEASDSRKMVFPAQDKPGELQATLDHTGHTS

SEQ ID NO: 50133 - protein, 124 aa, Homo sapiens
  DOMAIN (87)..(108): Extracellular proteins SCP/Tpx-1/Ag5/PR-1/Sc7 proteins domain identified by eMATRIX, accession number BL01009D, p-value=8.313e- 10, raw score of 14.19
  DOMAIN (38)..(110): SCP-like extracellular protein domain identified by PFam, accession name SCP, E-value=2.5e-07, PFam score of 30.3
VQHFPGQPGWCLCGKDFKSSCQTPGREKERRLATMHGSCSFLMLLLPLLLLLVATTGPVGALTDEEKRLMVELHNLYRAQVSPPASDMLHMVVWAKTERIGCGSHFCEKLQGVEETTIELWCAL

SEQ ID NO: 50134 - protein, 184 aa, Homo sapiens
  misc_feature (1)...(184): Xaa = X or * as defined in Table 2
QEDSCPLHPLSGIPFRRFQPTPEEAGAVVPGEGPTHDQGPSSALTRRXACQGPLHLARTTAEPGHAHPWHXRWQRYMGKLGRDLEKVCPVWSSVACSSPGLSWAGKTEAKTSLEGGNSASASASSWAWGRSSLAPVRDILGSREFSGLLEGTFVLSVTLSADFGIGTWVDLGKVTGSSSKEGRL

SEQ ID NO: 50135 - protein, 348 aa, Homo sapiens
  DOMAIN (204)..(225): Extracellular proteins SCP/Tpx-1/Ag5/PR-1/Sc7 proteins domain identified by eMATRIX, accession number BL01009D, p-value=6.927e- 17, raw score of 14.19
  DOMAIN (81)..(252): SCP-like extracellular protein domain identified by PFam, accession name SCP, E-value=1.2e-33, PFam score of 124.9
  misc_feature (1)...(348): Xaa = X or * as defined in Table 2
APVTKRKEVFAKDSKGSALDAGRDPKRPALPETLCESGWASNTAPTAPPQPGWCLCGKDFKSSCQTPGREKERRLATMHGSCSFLMLLLPLLLLLVATTGPVGALTDEEKRLMVELHNLYRAQVSPPASDMLHMRWDEELAAFAKAYARQCVWGHNKERGRRGENLFAITDEGMDVPLAMEEWHHEAXDTTTSAPHSCSPGQMCGRYTQVVWAKTERIGCGSHSCEKLQGVEETNIELLVCNYEPPGNVKGKRPYQEGTPGSQCPSGYHCKNSLCEPIGSPEDAQDLPYLVTEAPSFRATEASDSMKMGAEGPDKPSVVSGLNSGPGHVWGPLLGLLLLPPLVLAGIF

SEQ ID NO: 50136 - protein, 93 aa, Homo sapiens
FVPALGSSAVMLSRSRCVSRAFSRSLSAFQKGVSLCQGPGYPNSRKVVINNSVFSVRFFRTTAVCKDDLVTVKTPAFAESVTEGDVRWEKGKI

SEQ ID NO: 50137 - protein, 440 aa, Homo sapiens
  DOMAIN (118)..(153): 2-oxo acid dehydrogenases acyltransferase component lipoyl bi domain identified by eMATRIX, accession number BL00189A, p-value= 3.813e-23, raw score of 19.58
  DOMAIN (229)..(440): 2-oxo acid dehydrogenases acyltransfera domain identified by PFam, accession name 2-oxoacid_dh, E-value=2.4e-74, PFam score of 260.4
MPAVTILKPNLKQIILGLKAAEVSSLPPSIVLDAKEITTQITRQILKGNCPLGRHSLPGVSLCQGPGYPNSRKVVINNSVFSVRFFRTTTVCKYDLVTVKTPAFAEPVTEGDVRWEKAVGDTVAEDEVVCEIETDKTLVQVPSPANGMIEALFVPDGGKVEGGTPLFTLRKTGAAPAKAKPAEAPAAAAPKAEPIAAAVPPRAAPIPTQMPPVPSPSQPPSSKPVSAEAQNTCAMLTIFNEIDVSNIQKMRARHKEAFLKKHNLKLGFMSASVKASAFALQEQPVVNAVIDDITKEVVYRDYIDISVAVATPQGLVVPVIRNVEAMNYADIEQTITELGEKARKNEFAIEDMDGGTFTISNGGVFGSLFGTPIINPPSAILGMHGIFDKPVAIGGKVEVQPMMYVALTYDHRLIDGREAVTFLRKIKAAVEDPRVLLFDL

SEQ ID NO: 50138 - protein, 518 aa, Homo sapiens
  DOMAIN (431)..(460): 2-oxo acid dehydrogenases acyltransferase component lipoyl bi domain identified by eMATRIX, accession number BL00189C, p-value= 6.786e-29, raw score of 17.57
  DOMAIN (297)..(518): 2-oxo acid dehydrogenases acyltransfera domain identified by PFam, accession name 2-oxoacid_dh, E-value=8e-70, PFam score of 245.4
MESEALVVCINHCMAVNYGMIYQRGSSNMNILSLSLKHPEKTGISPTANHGISDLQEGEAACGSLRTPLVGRRVLRPAPLPVVVRPYIRCPPALGSSAVMLSRSRCVSRAFSRSLSAFQKGNCPLGRRSLPEDDLVTVKTPAFAESVTEGDVRWEKAVGDTVAEDEVVCEIETDKTSVQVPSPANGVIEALLVPDGGKVEGGTPLFTLRKTGAAPAKAKPAEAPAAAAPKAEPTAAAVPPPAAPIPTQMPPVPSPSQPPSGKPVSAVKPTVAPPLAEPGAGKGLRSEHREKMNRMRQRIAQRLKEAQNTCAMLTTFNEIDMSNIQEMRARHKEAFLRKLKLKLRLMSAIVEGSAFALQEKPLLMEGIDDTTKEVVYRDYIDISVAVAHPRGLVVPVIRNVEAMNFADIERTITELGEKARKNELAIEDMDGGTFTISNGGVFGSLFGTPIINPPQSAILGMHGIFDRPVAIGGKVEVRPMMYVALTYDHRLIDGREAVTFLRKIKAAVEDPRVLLLDL

SEQ ID NO: 50139 - protein, 392 aa, Homo sapiens
  DOMAIN (305)..(334): 2-oxo acid dehydrogenases acyltransferase component lipoyl bi domain identified by eMATRIX, accession number BL00189C, p-value= 6.786e-29, raw score of 17.57
  DOMAIN (169)..(391): 2-oxo acid dehydrogenases acyltransfera domain identified by PFam, accession name 2-oxoacid_dh, E-value=3.6e-65, PFam score of 229.9
MLSRSRCVSRAFSHSLSAFQKGNCPLGRHSLPGVSLCQGPGYPNSRKVVINNSVFSVRFFRTTTVCKYDLVTVKTPAFAEPVTEGDVRWEKAVGDTVAEDEVVCEIETDKTLVQVPSPANGMIEALFVPDGGKVEGGTPLFTLRKTGAAPAKAKPAEAPAAAAPKAEPIAAAVPPRAAPIPTQMPPVPSPSQPPSSKPVSAVKPTAVPPLAEPGAGKGFMSAFVKASAFALQEQPVVNAVIDDTTKEVVYTDYIDISVAVATPRGLVVPVIRNVEAMNFADIERTITELGEKARKNELAIEDMDGGTFTISNGGVFGSLFGTPIINPPQSAILGMHGIFDKPVAIGGKVEVRPMMYVALTYDHRLIDGREAVTFLRKIKAAVEDPRVLLFDL

SEQ ID NO: 50140 - protein, 264 aa, Homo sapiens
  misc_feature (1)...(264): Xaa = X or * as defined in Table 2
RGRFLPPCHPAALPPCRPAALLPVVAARGAPSPPPPHVLPCVGSGLGYNMLGMIKNSLFGSVETWPWKVLSKGDKEEVAYEERACEGGKFATVEVTDKPVDEALTGKQLPKVAKYAGGTNDKGIGMGMTVPISFAVFPNXRWLSCRKKLKVWFPDFQTNFQSDPPAPSDKSVKIEEREGIHCLIPCQFGGYAKEADYVAQATRLRAALGGPATYRGDIYFCTGYDPPMKPYGRRNEIWLFEDMSDPTEPRTYWEVCLCVSFLRG

SEQ ID NO: 50141 - protein, 14 aa, Homo sapiens
MFLGLVGLRTRGRK

SEQ ID NO: 50142 - protein, 128 aa, Homo sapiens
NLVPSLGSGDLPWEINPLSSCSLLHEKDPPTTSGPQTDQPKKHLTNFKSAARPTSWGRGKYPSTPSPSPLAASPAFLGGKNPPIAYFHTPTSYLCAPIPYFCAPTPSLLFWRARTTTPTPSLCLKSFL

SEQ ID NO: 50143 - protein, 68 aa, Homo sapiens
  misc_feature (1)...(68): Xaa = X or * as defined in Table 2
MPEPQRPGVPPEPPPPGACYACRKSGHWARNARSPGFLLSRVPSPPGPSRTPSFGXLSQWKPTCTQVK

SEQ ID NO: 50144 - protein, 554 aa, Homo sapiens; identical to SEQ ID NO: 50090

SEQ ID NO: 50145 - protein, 304 aa, Homo sapiens
  DOMAIN (105)..(116): Lipases serine proteins. domain identified by eMATRIX, accession number BL00120C, p-value=9.591e-11, raw score of 12.62
  DOMAIN (1)..(162): Lipase domain identified by PFam, accession name lipase, E- value=1.5e-05, PFam score of -81.1
MELEATNIVVRAVLLFPRTTGQPLSTRRRAPIEGILPSSSVLLQLDKDVGRGLDPAGPFFHNTPKEVRLDPSDANFVDVIHTNAARILFELGVGTIDACGHLDFYPNGGKHMPGCEDLITPLLKFNFNAYKKDHSSWAVPAPLQLPDAWGGMATVFQQLLWHLLFGGSQVLVPRPGRKRLHRQLKSEHGGEEFYRVTKQLLDERGTQKRSTYDLRSSDPPAQETSHQFQIRDASLIIHPGFRGVRPRRDACLGPSPLAASPAFLGKGQPGVLRPNWRVLPPQMKTNGNLYFNRISIGLCEHIEV

SEQ ID NO: 50146 - protein, 128 aa, Homo sapiens
LGSGDLPWEINPLSSCSLLCEKHPPTTSGPQTDQPKKHLTNFKSETKETCFIHEPKTLAPVTDWEGSLPLVFNHCRDGLSDHSATFQGCQTMQGCLPWSFTLSGKSRFSGEGANHHGHRASGNSHSGS

SEQ ID NO: 50147 - protein, 91 aa, Homo sapiens; identical to SEQ ID NO: 30804

SEQ ID NO: 50148 - protein, 99 aa, Homo sapiens
LGSGDLPWEINPLYSCSLLSRFKKIKACYHSPATSWPFKTYKLSLQLPHFTCPKTRQALQVSSGAVPYQPNCFAYPPCGAQPVPSFVLNTFLHNSLCRA

SEQ ID NO: 50149 - protein, 68 aa, Homo sapiens
LGSRTFPWEINPPSSCSLLREKDPPTTSGPQTDQTKKHLTNFKSGKRPLFTLFSNFPHYPSTSFFFQS

SEQ ID NO: 50150 - protein, 74 aa, Homo sapiens
LRLGDLPWEINPLSSCSLLCEKDPPTTSGPTKKHLTNFKSSKRPLFTLFSNLPHYPSTSFSFQSWRYTSISPFS

SEQ ID NO: 50151 - protein, 40 aa, Homo sapiens; identical to SEQ ID NO: 33428

SEQ ID NO: 50152 - protein, 10 aa, Homo sapiens
MFLGLVGLRT

SEQ ID NO: 50153 - protein, 251 aa, Homo sapiens; identical to SEQ ID NO: 33436

SEQ ID NO: 50154 - protein, 359 aa, Homo sapiens; identical to SEQ ID NO: 35623
  DOMAIN (315)..(327): RNase H domain identified by eMATRIX, accession number PF00075C, p-value=7.848e-10, raw score of 11.58
  DOMAIN (213)..(346): Reverse transcriptase domain identified by PFam, accession name rvt, E-value=5.5e-06, PFam score of 15.3

SEQ ID NO: 50155 - protein, 138 aa, Homo sapiens
LGSGDFPWEINPLSSCSLLREKDPRTTSGPQTDQPSKHLTNLKSASTPPPYNPFITSPPHTRSGLQFRSTSSPPAPAQQFTLKKVAEAKGIVKVNAPFSLSDLSQISVRLGSFIKYEKSSPVHGSFGSNPETLYSPRP

SEQ ID NO: 50156 - protein, 287 aa, Homo sapiens; identical to SEQ ID NO: 31761
  DOMAIN (200)..(243): 1 kw MIND INHIBITOR DIVISION CONTROL domain identified by eMATRIX, accession number DM01756B, p-value=4.822e-15, raw score of 22.91
  DOMAIN (165)..(270): ParA family ATPase domain identified by PFam, accession name ParA, E-value=3.6e-23, PFam score of 90.4

SEQ ID NO: 50157 - protein, 17 aa, Homo sapiens
  misc_feature (1)...(17): Xaa = X or * as defined in Table 2
MVYGASEAIRQHQSSAX

SEQ ID NO: 50158 - protein, 252 aa, Homo sapiens
MQAMEKWKREAKVETEKDQKNQYQQTWLSDSASGYRYTKLPFYFRHNNLIPALAHLLFLDSLYSDLLTAAFFMQFWLSAQMSSDQRGLPGYLLWAEEISLLEISELTSGKQDSSWPEVKAGLKKEANYLSSDSARLHPGEINSLVAHTKPVWWSLHMDTHEIWCRDSNWGDLPWEINPLSSCSLLHEKDPPTTSGPQTDQPKKHLTNFKSAQLKASGKTSRSHINTSKRCSNCCRCSGLPAMVPLVCPSEIQ

SEQ ID NO: 50159 - protein, 272 aa, Homo sapiens
NLVPSLGSGDLPWEINPLSSCSLLHEKDPPTTSGPQTDQPKKHLTNFKSAARPTSWGRGKYPSTPSPSPLAASPAFLGQRQVPLSWGRGRCPSTPSPSPSAASPAFLGQGQRQVPLSWGRGRCPSTPSPSPSAASPAFLGQGQRQVPLSWGRGRCPSTPSPSPSAASPAFLGQGQRQVPLSWGRGRYPSTPSPSPSAASPAFLGQGQRQVPLSWGRGRCPSTPSPSPSAASPAFLGQRQVPLSWGRYPSTPSPSPSAASPTFLGQDLPLSWG

SEQ ID NO: 50160 - protein, 112 aa, Homo sapiens
  misc_feature (1)...(112): Xaa = X or * as defined in Table 2
LGSGDLPWEINPSSSCSLLREKDPPTTSGPQTDQPKKHLTNFKSAXKRTNTASYKWHSQSRVPAPRDGLVAAPTESEVAFLPVPPHQGPPLGNLGPSTVTTSFRCWLLDPRS

SEQ ID NO: 50161 - protein, 47 aa, Homo sapiens
LGLGDLPWEINPLSSCSLLHEKDPPTTSGPQTDQPKEHLTNFKSDED

SEQ ID NO: 50162 - protein, 41 aa, Homo sapiens
TRHLVILMVEKLRRQHQTASSGPSTYNPQQQNPNQKSRSVA

SEQ ID NO: 50163 - protein, 47 aa, Homo sapiens; identical to SEQ ID NO: 45429

SEQ ID NO: 50164 - protein, 261 aa, Homo sapiens
  DOMAIN (193)..(210): Zinc finger, CCHC class domain identified by PFam, accession name zf-CCHC, E-value=0.00025, PFam score of 27.8
MLLTQSLFGGLFTQTRMKFGAKTRDLDQGTSLGRSLPCPPTLCSMRKIHLRPQVLRPTSPRNISPISNPGETKETRFIRGPKTPAPVTDWEGSLPLVFNHCRDASLIIHPRFKGVRPRRDACLGPSPLAASPTFLGKGQDLINLAFKVYNNRKKLQFLASTVRQTAATSPAHKNFQMPEPQRPGVPPEPPPTGACYMCRKSGHWAKECPQPGIPPKPRPICVGPHRKSDCSTYLAATPRAPGNLAQGSLTDSFPDLLGLAA

SEQ ID NO: 50165 - protein, 97 aa, Homo sapiens
  misc_feature (1)...(97): Xaa = X or * as defined in Table 2
SFYHLSSSHLVRLTVSFRDXPSPTCPAIYSXKGGWSQRHSQGACYTCRKSGHWARNARSPGFLLSHVPSVWDPTENRTVQLTWQPIPEPLELWPKAL

SEQ ID NO: 50166 - protein, 269 aa, Homo sapiens
  DOMAIN (207)..(224): Zinc finger, CCHC class domain identified by PFam, accession name zf-CCHC, E-value=4.6e-05, PFam score of 30.3
MVNPKFFASEKITQEHNDKDFFRHTKLKEVTNSRSTLHLTPAHLRVSLKAHTVYYLATTVDYSGPKDSSVSSHVAHTKPVWWYLHTDAHEIWCRDLDRGTSLGRSIPCPPVLCSVRKIHLRPQVLRPTSPRNISPILNHRQRRHVLSVYPKLRRQSRTGKAAFPWCLIIAEMPDYSPTFQRCQTTQGRLPWSFTLSSKSRFSGEGARACYKCQKSDHQAKECPQPGIPPKPCPICAGPHWKSDCSTHLAATPRAPGTLAQGSLTDSFLA

SEQ ID NO: 50167 - protein, 443 aa, Homo sapiens
NLVPSLGSGDLPWEINPLSSCSLLHEKDPPTTSGPQTDQPKKHLTNFKSEAKEICFIREPKTPAPVTDWEGSLPLVFNHCRDASLIIHSRFKGVRPRRDACLGPSPLAASPIFLGKGQRLKTDTARLPRKPPRPSRMPSFGVKHVNVTIDCLPEGAATRGTARTSKPTTKSQKTLPSTSPGHWTQSTPWASALRSSPWTETAAPSETEETLNTGRPPELPARATATWFSASHTLPALATRRVARTQWLTADRQTWASISSVPWAQTISEKKPGGSLWETRSSPPTTAGTEEAMNTTSLLAPAAEIMATPGSPSQASPTSGAFTHGTQTPSPTKATAPRYPQTGNSILTFGRPFLPFAGDLFAEWPFTAGEEPVLVPRPHQVSKTRSPPSFHLTLKTVTVALLGNGEECYVYLSVSELREIRTRLYSPDAGLNEEKMLTKLLLI

SEQ ID NO: 50168 - protein, 105 aa, Homo sapiens
  DOMAIN (21)..(53): Phosphofructokinase proteins domain identified by eMATRIX, accession number BL00433D, p-value=3.880e-29, raw score of 13.22
  DOMAIN (23)..(57): Phosphofructokinase domain identified by PFam, accession name PFK, E-value=8.1e-30, PFam score of 82.5
MLLSGLWFELVSSPEPVSSLSMRVTVLGHVQRGGTPSSFDRILGSRMGVEAVMALLEGTPDTPACVESLSGNQAVRLPLMECVQVTKDVTKAMDEKKFDEALYLT

SEQ ID NO: 50169 - protein, 56 aa, Homo sapiens
  DOMAIN (37)..(56): Phosphofructokinase domain identified by PFam, accession name PFK, E-value=0.0057, PFam score of 9.1
  misc_feature (1)...(56): Xaa = X or * as defined in Table 2
MKTTVKRGLVLRNEKCNENYTTDFIFNLYSEEGKGIFDSRKNXLGHMQQGGSPTPF

SEQ ID NO: 50170 - protein, 172 aa, Homo sapiens
  DOMAIN (36)..(68): Phosphofructokinase proteins domain identified by eMATRIX, accession number BL00433D, p-value=7.589e-17, raw score of 13.22
  DOMAIN (1)..(172): Phosphofructokinase domain identified by PFam, accession name PFK, E-value=1.7e-57, PFam score of 158.0
SRLNIIIVAEGAIDKNGKPITSEDIKNLVVKRLGYDTRVTVLGHVQRGGTPSAFDRILTKDVTKAMDEKKFDEALKLRGRSFMNNWEVYKLLAHVRPPVSKSGSHTVAVMNVGAPAAGMNAAVRSTVRIGLIQGNRVLVVHDGFEGLAKGQIEEAGWSYVGGWTGQGGSKLG

SEQ ID NO: 50171 - protein, 256 aa, Homo sapiens
  DOMAIN (87)..(121): Phosphofructokinase proteins domain identified by eMATRIX, accession number BL00433A, p-value=1.450e-34, raw score of 19.03
  DOMAIN (87)..(211): Phosphofructokinase domain identified by PFam, accession name PFK, E-value=9.5e-83, PFam score of 226.9
MHKDEFHLKFFMGVNQSRQLVRTPQRTAGEASTSSMLIPKPPPKTDILKSLDTMDDPDTVGSIPVFKTEWIMTHEEHHAAKTLGIGKAIAVLTSGGDAQGMNAAVRAVVRVGIFTGARVFFVHEGYQGLVDGGDHIKEATWESVSMMFQLGRHDDDWEEHLCRRLSETRTRGSRLNIIIVAEGAIDKNGKPITSEDIKNLVVKRLGYDTRAVRLPLMECVQVTKDVTKAMDEKKFDEALKLRGRSSHEQLGGCTSF

SEQ ID NO: 50172 - protein, 88 aa, Homo sapiens
MHMSSASCFRLVALLSQPCRQGRQCSSFLTPPHGWPQGCVLLQAILAYSWQSASEQTLPTADNSVPLLEPQKRHASELLVVGLPPTRP

SEQ ID NO: 50173 - protein, 112 aa, Homo sapiens
SPRGHYQLLLSGRALADRYRRIYTAALNDRDQGGGSAGHPASRSENLENTVIIPDIKLHSNPSAFNIYCNVRHCVLEWQKKEISLAAASKNSVQSGESDSDEEEESKEPPIN

SEQ ID NO: 50174 - protein, 1155 aa, Homo sapiens
  DOMAIN (759)..(808): F-box domain identified by PFam, accession name F-box, E- value=0.093, PFam score of 19.3
VCAHIVQAIRMEATRVREEWEHAISSKENANSQPNDEDASSDAYCFELLSMVLALSGSNVGRQYLAQQLTLLQDLFSLLHTASPRVQRQVTSLLRRVLPEVTPSRLASIIGVKSLPPADISDIIHSTEKGDWNKLGILDMFLGCIAKALTVQLKAKGTTITGTAGTTVGKGVTTVTLPMIFNSSYLRRGESHWWMKGSTPTQISEIIIKLIKDMAAGHLSEAWSRVTKNAIAETIIALTKMEEEFRSPLWLALASLCVLDQDHVDRLSSGRWMGKDGQQKQMPMCDNHDDGETAAIILCNVCGNLCTDCDRFLHLHRRTKTHQRQVFKEEEEAIKVDLHEGCGRTKLFWLMALADSKTMKAMVEFREHTGKPTTSSSEACRFCGSRSGTELSAVGSVCSDADCQEYAKIACSKTHPCGHPCGGVKNEEHCLPCLHGCDKSATSLKQDADDMCMICFTEALSAAPAIQNKINHIVLKDLLDPIKELYEDVRRKALMRLEYEGLHKSEAITTPGVRFYNDPAGYAMNRYAYYVCYKCRKAYFGGEARCDAEAGRGDDYDPRELICGACSDVSRAQVWEYLHYQLSIPNLKSKMLQAALTEQWRLEAFKFAKPEKNLKRHQTKGPERRELQEKEPEPQRWSRVGALRGTSASDAGGARGAAAAGARSGGPGAPHVRAAGPAAAAVPGARGGVWGKPPPAAAKIESGVVVHADTLEAEVEGLLDLRRSRLQMKRGGRDSDRNSSEEGTAEKSKKLRTTNEHSQTCDWGNLLQDIILQVFKYLPLLDRAHASQVCRNWNQVFHMPDLWRCFEFELNQPATSYLKATHPELIKQIIKRHSNHLQYVSFKVDSSKESAEAACDILSQLVNCSLKTLGLISTARPSFMDLPKSHFISALTVVFVNSKSLSSLKIDDTPVDDPSLKVLVANNSDTLKLLKMSSCPHVSPAGILCVADQCHGLRELALNYHLLSDELLLALSSEKHVRLEHLRIDVVSENPGQTHFHTIQKSSWDAFIRHSPKVNLVMYFFLYEEEFDPFFRYEIPATHLYFGRSVSKDVLGRVGMTCPRLVELVVCANGLRPLDEELIRIAERCKNLSAIGLGECEVSCSAFVEFVKMCGGRLSQLSIMEEVLIPDQKYSLEQIHWEVSKHLGRVWFPDMMPTW

SEQ ID NO: 50175 - protein, 58 aa, Homo sapiens
NPSAFNIYCNVRHCVLEWQKKEISLAAASKNSVQSGESDSDEEEESKEPPIKLPKVSH

SEQ ID NO: 50176 - protein, 4694 aa, Homo sapiens
  DOMAIN (915)..(949): Regulator of chromosome condensation (RCC1) proteins domain identified by eMATRIX, accession number BL00625B, p-value=5.131e- 16, raw score of 17.69
  DOMAIN (657)..(1000): Regulator of chromosome condensation (RCC1) domain identified by PFam, accession name RCC1, E-value=4.6e-10, PFam score of 40.4
  misc_feature (1)...(4694): Xaa = X or * as defined in Table 2
AAPVAAPGALFMPVPDGSVAAAGLGLGLPAADSPGHYQLLLSGRALADRYRRIYTAALNDRDQGGGSAGHPASRNKKILNKKKLKRKQKSKSKVKTRSKSENLENTVIIPDIKLHSNPSAFNIYCNVRHCVLEWQKKEISLAAASKNSVQSGESDSDEEEESKEPPIKLPKIIEVGLCEVFELIKETRFSHPSLCLRSLQALLNVLQGQQPEVLQSEPPEVLESLFQLLLEITVRSTGMNDSTGQSLTALSCACLFSLVASWGETGRTLQAISAILTNNGSHACQTIQVPTILNSLQRSVQAVLVGKIQIQDWFSNGIKKAALMHKWPLKEISVDEDDQCLLQNDGFFLYLLCKDGLYKIGSGYSGTVRGHIYNSTSRIRNRKEKKSWLGYAQGYLLYRDVNNHSMTAIRISPETLEQDGTVMLPDCHTEGQNILFTDGEYINQIAASRDDGFVVRIFATSTEPVLQQELQLKLARKCLHACRISLFDLEKDLHIISTGFDEESAILGAGREFALMKTANGKIYYTGKYQSLGIKQGGPSAGKWVELPITKSPKIVHFSVGHDGSHALLVAEDGSIFFTGSASKGEDGESIKSRRQSKPYKPKKIIKMEGKIVVYTACNNGSSSVISKDGELYMFGKDAIYSDSSSVVTDLKGHFVTQVAMGKAHACVLMKNGEVWTFGVNNKGQCERDTGAMNQGGKGFGVESMASAMDEALEEELDEKDEKYMMCPPGMHKWKLEQCMVCTVCGDCTGYGASCVSSGRPDRVPGGICGCGSGESGCAVCGCCKACARELDGQEARQRGILDAVKEMIPLDLLLAVPVPGVNIEEHLQLRQEEKRQRVIRRHRLEEGRGPLVFAGPIFMNHREQALARLRSHPAHVKHKRDKHKDGSGERGEKDASKITTYPPGSVRFDCELRAVQVSCGFHHSVVLMENGDVYTFGYGQHGQLGHGDVNSRGCPTLVQALPGPSTQVTAGSNHTAVLLMDGQVFTFGSFSKGQLGRPILDVPYWNAKPAPMPNIGSKYGRKATWIGASGDQTFLRIDEALINSHVLATSEIFASKHIIGLVPASISEPPPFKCLLINKVDGSCKTFNDSEQEDLQGFGVCLDPVYDVIWRFRPNTRELWCYNAVVADARLPSAADMQSRCSILSPELALPTGSRALTTRSHAALHILGCLDTLAAMQDLKMGVASTEEETQAVMKVYSKEDYSVVNRFESHGGGWGYSAHSVEAIRFSADTDILLGGLGLFGGRGEYTAKIKLFELGPDGGDHETDGDLLAETDVLAYDCAAREKYAMMFDEPVLLQAGWWYVAWARVSGPSSDCGSHGQASITTDDGVVFQFKSSKKSNNGTDVNAGQIPQLLYRLPTSDGSASKGKQQTSEPVHILKRSFARTVSVECFESLLSILHWSWTTLVLGVEELRGLKGFQFTATLLDLERLRFVGTCCLRLLRVYTCEIYPVSATGKAVVEETSKLAECIGKTRTLLRKILSEPLDHCMVKLDNDPQGYLSQPLSLLEAVLQECHNTFTACFHSFYPTPALQWACLCDLLNCLDQDIQEANFKTSSSRLLAAVMSALCHTSVKLTSIFPIAYDGEVLLRSIVKQVSTENDSTLVHRFPLLVAHMEKLSQSEENISGMTSFREVLEKMLVIVVLPVRNSLRRENELFSSHLVSNTCGLLASIVSELTASALGSEVDGLNSLHSVKASANRFTKTSQGRSWNTGNGSPDAICFSVDKPGIVVVGFSVYGGGGIHEYELEVLVDDSEHAGDSTHSHRWTSLELVKGTYTTDDSPSDIAEIRLDKVVPLKENVKYAVRLRNYGSRTANGDGGMTTVQCPDGVTFTFSTCSLSSNGTNQTRGQIPQILYYRSEFDGDLQSQLLSKANEEDKNCSRALSVVSTVVRASKDLLHRALAVDADDIPELLSSSSLFSMLLPLIIAYIGPVAAAIPKVAVEVFGLVQQLLPSVAILNQKYAPPAFNPNQSTDSTTGNQPEQGLSACTTSSHYAVIESEHPYKPACVMHYKVTFPECVRWMTIEFDPQCGTAQSEDVLRLLIPVRTVQNSGYGPKLTSVHENLNSWIELKKFSGSSGWPTMVLVLPGNEALFSLETASDYVKDDKASFYGFMCFAIGYEFSPGPDEGVIQLEKELANLGGVCAAALMKKDLALPIGNELEEDLEILEEAALQVCKTHSGILGKGLALSHSPTILEALEGNLPLQIQSNEQSFLDDFIACVPGSSGGRLARWLQPDSYADPQKTSLILNKDDIRCGWPTTITVQTKDQYGDVVHVPNMKVEVKAVPVSQKKMSLQQDQAKKPQRIPGSPAVTAASSNTDMTYGGLASPKLDVSYEPMIVKEARYIAITMMKVYENYSFEELRFASPTPKRPSENMLIRVNNDGTYCANWTPGAIGLYTLHVTIDGIEIDAGLEVKVKDPPKGMIPPGTQLVKPKSEPQPNKVRKFVAKDSAGLRIRSHPSLQSEQIGTSEKSMETITFIDEIHNDDGCVWLRLNDETIKKYVPNMNGYTEAWCLSFNQHLGKSLLVPVDESKTNTDDFFKDINSCCPQEATMQEQDMPFLRGGPGMYKVVKTGPSGHNIRSCPNLRGIPIGMLVLGNKVKAVGEVTNSEGTWVQLDQNSMVEFCESDEGEAWSLARDRGGNQYLRHEDEQALLDQNSQTPPPSPFSVQAFNKGASCSAQGFDYGLGNSKGDRGNISTSSKPASTSGKSELSSKHSRSLKPDGRMSRTTADQKKPRGTESLSASESLILKSDAAKLRSDSHSRSLSPNHNTLQTLKSDGRMPSSSRAESPGPGSRLSSPKPKTLPANRSSPSGASSPRSSSPHDKNLPQKSTAPVKTKLDPPRERSKSDSYTLDPDTLRKKKMPLTEPLRGRSTSPKPKSVPKDSTDSPGSENRAPSPHVVQENLHSEVVEVCTSSTLKTNSLTDSTCDDSSVEFKSFGWKVSNKVHFSIGKAPLKDEQEMRASPKISRKCANRHTRPKKEKSSFLFKGDGSKPLEPAKQAMSPSEAECARAEIASFLWHEGIVHDAMAXSSFLKFHPELSKEHAPIRSSLNSQQPTEEKETKLKNRHSLEISSSHLNMFNIGTPHGPRYILRWGSINKNKVLSYALRNPPLHEKCEDGKTETTFEMSMHNTMKSKSPLPLTLQHLVAFWEDISLATIKAASQNMIFPSPGSCAVLKKKECEKGRNKKSKKEKKKKEKAEVRPRGNLFGEMAQLAVGGPEKDTICELCGESHPYPVTYHMRQAHPGCGRYAGGQGYNSIGHFCGGWAGNCGDGGIGGSTWYLVCDRCREKYLREKQAAAREKVKQSRRKPMQVKTPRALPTMEAHQVIKAQCQSFLLSLSSAAEPSILCYHPAKPFQSQLPSVKEGISEDLPVKMPCLYLQTLARHHHENFVGYQDDNLFQDEMRYLRSTSVPAPYISVTPDASPNVFEEPESNMKSMPPSLETSPITDTDLAKRTVFQRSYSVVASEYDKQHSILPARVKAIPRRRVNSGDTEVGSSLLRHPSPELSRLISAHSSLSKGERNFQWPVLAFVIQHHDLEGLEIAMKQALRKSACRVFAMEAFNWLLCNVIQTTSLHDILWHFVASLTPAPVEPEEEEDEENKTSKENSEQEKDTRVCEHPLSDIVIAGERAHPLPHTFHRLLQTISDLMMSLPSGSSLQQMALRCWSLKFKQSDHQFLHQSNVFHHINNILSKSDDGDSEESFSISIQSGFEAMSQELCIVMCLKDLTSIVDIKTSSRPAMIGSLTDGSTETFWESGDEDKNKTKNITINCVKGISLPRYVSCFTVDISRDLGNKVTSMTFLTGKAVQDLCPRIKQVDLDSRHIGWVTSELPGGDNHIIKIELKGPENTLRVRQVKVLGWKDGESTKIAGQISASVAPARGNCEAGDSCRVFRLITSQVFGKLISGDAEPTPEQEEKALLSSPEGEEKVYNATSDADLKEHMVGIIFSRSKLTNLQKQVCAHIVQAIRMEATRVREEWEHAISSKENANSQPNDEDASSDAYCFELLSMVLALSGSNVGRQYLAQQLTLLQDLFSLLHTASPRVQRQVTSLLRRVLPEVTPSRLASIIGVKSLPPADISDIIHSTEKGDWNKLGILDMFLGCIAKALTVQLKAKGTTITGTAGTTVGKGVTTVTLPMIFNSSYLRRGESHWWMKGSTPTQISEIIIKLIKDMAAGHLSEAWSRVTKNAIAETIIALTKMEEEFRSPVRCIATTRLWLALASLCVLDQDHVDRLSSGRWMGKDGQQKQMPMCDNHDDGETAAIILCNVCGNLCTDCDRFLHLHRRTKTHQRQVFKEEEEAIKVDLHEGCGRTKLFWLMGTGQILKTMEGQWVGFPRNTQGKPTTSSSKACRFCGSRSGTELSAVGSVCSDAHCQEYAKIACSKTHPCGHPCGGVKNEKHCLPCLHGCDKSATSLKQDAHDMCMICFTEALSAAPAIQLDCSHIFHLQCCRRVLENRWLGPRITFGFISCPICKNKINHIVLKDLLDPIKELYEDVRRKALMRLEYEGLHKSEAITTPGVVRFYNDPAGYAMNRYAYYVCYKCRKAYFGGEARCDAEAGRGDDYDPRELICGACSDVSRAQMCPKHGTDFLEYKCRYCCSVAVFFCFGTTHFCNACHDDFQRMTSIPKEELPHCPAGPKAKQLEGTECPLHVVHPPTGKEFALGCGVCRNAHTFKTTQILCLQREKLPSSPTEDGGEV

SEQ ID NO: 50177 - protein, 272 aa, Homo sapiens
  misc_feature (1)...(272): Xaa = X or * as defined in Table 2
SQGIPELHYTPGPRGRWCGWWPIVEPRMGASQGCCVLGHLAQQGGGASQAVRGANGVHAGCRGDPHPRSDHYPGGRPWLPGASQDPAVAPGGHGHPSYLARLPCAAEPGTPPAEPPRPSSLPGAATAPAGTXPALADAPPRRVGGAGQPGRGHVXPKLVPGWQSQDSIXPSLPSSPARHTLAASATPXAPGSGARPAWXCXWAPALAPVIPVDAHSPPGGAGHGPGHXGPRGSVLGLRLPAGCPGPRQPHRPGQSGPQPSSPPGGALRSASR

SEQ ID NO: 50178 - protein, 180 aa, Homo sapiens
SDDQPEKPHFDSRSVIFELDSCNGSGKVCLVYKSGKPALAEDTEIWFLDRALYWHFLTDTFTAYYRLLITHLGLPQWQYAFTSYGISPQAKGITKATCEWGEHIIPLGSMAINSISKLTQLTQSSMYSLPNAPTLADLEDDTHEGRKGTEGSQLKCEHQLPPPMSHVGGGQRESLARKEK

SEQ ID NO: 50179 - protein, 130 aa, Homo sapiens
FLDRALYWHFLTDTFTAYYRLLITHLGLPQWQYAFTSYGISPQAKITYNIKMNRRKCVHWKLAVEPLQWELRSCVSAGMGTGPKQKVSSMKPRSCSVCSRRQSNSMGTTVSQSFLSYGKNVLFFPVRCCF

SEQ ID NO: 50180 - protein, 357 aa, Homo sapiens
  misc_feature (1)...(357): Xaa = X or * as defined in Table 2
RAMEEEASSPGLGCSKPHLEKLTLGITRILESSPGVTEVTIIEKPPAERHMISSWEQKNNCVMPEDVKNFYLMTNGFHMTWSVKLDEHIIPLGEALAINKHLKTDFSFTQSSMLFTFLIAPTLGQTWEDDTHGSQWMIQPEKPHFGLFAVLIFXGWVSCNGSGKVCLVYKSGKPALAEGHWRFLFPGTELLYWHFLTDTFTAYYRLLITHLGLPQWAILPFTSYGISPQAKQWFSMYXTYSPYNTNLVTQKETDSFCGIKLDPSKVFXGGKNKIVIPKKKGPVQPAGGQKGPFRDPPVPSISSIFKSSSGLWGNPTREVSTPPSNSLPAPEWWFPCTDGPRGDLQFCVWTVGLFLVE

SEQ ID NO: 50181 - protein, 945 aa, Homo sapiens
  DOMAIN (583)..(595): FLAVODOXIN SIGNATURE domain identified by eMATRIX, accession number PR00369B, p-value=7.300e-11, raw score of 13.29
  DOMAIN (841)..(936): Ribosomal protein L32 domain identified by PFam, accession name Ribosomal_L32e, E-value=5.5e-10, PFam score of 46.6
  misc_feature (1)...(945): Xaa = X or * as defined in Table 2
MDALMLALGALMLALGLGDPKSAQVSDPDGAEPGPGRATGTDPLVQIHWKLGISEALSIPGGRLYRDLWSLTPVCLHIPGIAHHGPFTLGRMDVVEVAGSWWAQEREDIIMKYEKGHRAGLPEDKGPKSFGSYNNNVDHLGIVHETELPPLTAREVKQIRREISRKSKWVKMLGEWDTYKNSRKLIDRAYQGIPMNIRGPMWSVLLNIEEIKLKNPGRYQVRSARAQPTGQAVSGAQVSSWRERQDHPGELGVKIMKEKGKRSSEHIQQMDLDVSGTLRRHIFFRDRYGTKQRELLYILLAYEEYNPEVGYCRDLSHIAALFLLYLPEEDAFWALVQLLASERHSLQERLTKTSRCGPWARFWNRFVDAWARDDDTVLKHLRASMKKLTRKQGDLPPPASRTTSLEPGRQGNRCPXPTELSGRGRRRDPGPRARAKSSARSGNAKPEQGSSASRPVPASRGGKTLCKGDRQAPPGPPARFPWPICGGPQGSWRFLQWNSMPRLPTDLDVGDPWFRRYDFRQSCWVRAISQEDQPATCWQAEHPAERETQSVYWELKAYVYLNAVRVRCMNKFRLSCLEEEQLLLLVTSTFGNGDCSGQFEIEKSCELLFQMAESVDYDYDVQDTILDGLLILPCYGSMTTDQQRRIFLPPPPGIRKCVISTNISATSLTIDGTRYVVDGGFVKQLNHNPRLGLDILEVVPISKSEALQRSGRAGRTSSGKCFRIYSKDFWNQCMPDHVIPEIKRTSLTSVVLTLKCLAIHDVIRFPYLDPPNERLILEALKQLYQCDAIDRSGHVTRLGLSMVEFPLPPHLTCAVIKAASLDCEDLLLPIAAMLSVENVFIRPVDPEYQKEAEQRHRELAAKAGGFNDFATLAVIFEQCKSSGFRKFLVHNVKELEVLLMCNKSYCAEITHHVSSKNRKAIVERAAQLAIKVTNPNARLRSKENE

SEQ ID NO: 50182 - protein, 46 aa, Homo sapiens
TISSIIRKARKPQDLLNNYTPRSSPLRSSGRTRMYKGKNVRPGNSS

SEQ ID NO: 50183 - protein, 130 aa, Homo sapiens
  misc_feature (1)...(130): Xaa = X or * as defined in Table 2
WALMNGSESRFFVSSSQGRSELVPNSNYAVDYXPLTAHAVSSGGTSPVLARLLREKLESLLPLHLGQVAKYAGQLRGRVKQQFATMGERRRFWEKLFVNDRAGAVAGKQRSESHYXNDRTVNQRTARPSR

SEQ ID NO: 50184 - protein, 349 aa, Homo sapiens
  DOMAIN (217)..(263): Arenaviral nucleocapsid protein domain identified by eMATRIX, accession number PF00843K, p-value=6.047e-09, raw score of 19.49
MAMTVNLVNSCRVGPVTDFLEAMPVTPFCTELNQPTLPNIRKWKGPRGCWKAVVAEKPSSQLQKGAGYAGFLWDAAAGMELRDAGSQESSPSNGHGKLAGPSPYLGRFKVGSHDLTLVNLHLAALTLLGSENPSKNHSDGHRLASFAQTLQETLKEEGAICNAHAPSGGGLSGFPSDSFPCSCYYGSTPVARKKRFAKCRGYIYDFVYELLSLKPPSQGEKDVIILGDFGQGPDSNDYDILRKEKFHHLIPAHTFTNISTKNPQGSKSLDNIWISKSLKKVFTGHWAVVREGLTNPWIPDNWSWGGVASEHCPVLAEFYTEKDWSKKDAPRNGSGVALERSEANIKHER

SEQ ID NO: 50185 - protein, 27 aa, Homo sapiens
QLQGKESEGKPLRPPPEGACALQMAPS

SEQ ID NO: 50186 - protein, 262 aa, Homo sapiens
  misc_feature (1)...(262): Xaa = X or * as defined in Table 2
EALESAPEGRRXGSGTKTLSPSPPAGSWVCRIPMGRGCRHGAERPPGSQESSPSNGHGKLAGPSPYLGRFKSSSXTXQSPQTPAQGVSASXGLGAAPVLRLQGPVPPSHCGKSRPDPCXPSPGSPDPPGERESQQESQXWPPVGELCTDPTGNPERGGRHLQSHAPSGGGLSGFPSDSFPCSCYYGSTPVARKKRFAKCRGYIYDFVYELLSLKPPSQGVAEMPPPAVGQQGQAEPRGIPQSPAGGRVFFQDFYSLCLENTS

SEQ ID NO: 50187 - protein, 49 aa, Homo sapiens
  misc_feature (1)...(49): Xaa = X or * as defined in Table 2
XLENSQGQLIYESATTCEYLDEAYPGKKLLPDDPYEKACQKNFVKNLPS

SEQ ID NO: 50188 - protein, 542 aa, Homo sapiens
  DOMAIN (133)..(188): 7 kw 103-1A LACTOYLGLUTATHIONE GLUTATHIONE LYASE domain identified by eMATRIX, accession number DM01181A, p-value=3.538e- 09, raw score of 22.11
  DOMAIN (125)..(199): Glutathione S-transferases domain identified by PFam, accession name GST, E-value=1.6e-12, PFam score of 44.6
MRYGSSLNCYLISRSDLGVRLMGEASWASGSGIEPGVDAFVLLLSGTPYSVYGVAVFSPLYFLNKLAFVLHGGLALNSFLCEIQEPSLGSGSGPLSRNIYAGGITCVPSYFTGSAPPGPVPEGSIRIYSMRFCPFAERTRLVLKAKGIRHEVININLKNKPEWFFKKNPFGLVPVLENRQGQLIYESAITCEYLDEAYPREKAVAGMTPYEENFAKKMIFKICFSKGLLPKENFNLLILKKPVFLKPKKRLLHLRPSLECCCPWMIKGASMSRDIAKFTPLPSPRAASDRLMEPKGKGSLEAELKKLQNSIQESTQAFDEHLKRLFERRVKAEMVTNQEELKISNLAFSLLLDEELSSREKFLNNYLTRKQHEKSQTSEAVRKSREDLDVCKEHYDNLLAEDKVMDRSFKKEFSEIPGHQVDILYKLFKRRPRISKQKTHSETTSVVPFGELPGSGKLNKDAFAQLMKAMDELDNISNMPEGLDPLVWNHFCMTRRAKVENEQKVKQKAADLLEMATFLQKRVEEEEKVQQEIERVFHELIL

SEQ ID NO: 50189 - protein, 406 aa, Homo sapiens
  DOMAIN (101)..(124): Glutathione S-transferases domain identified by PFam, accession name GST, E-value=0.048, PFam score of 10.1
MNPLGDYSIEPGVDAFVLLLSGTPYSVYGVAVFSPLYFLNKLAFVLHGGLALNSFLCEIQEPSLGSGSGPLSRNIYAGGITCVPSYFTGSAPPGPVPEATIRIYSMRFCPFAERTRLVLKAKGIRQQDVRTRYFTRLSLPILPRITLKTTQQLNVGLHALLDCKTLTLTELGRNLPTKARTKHNIKRIDRLLGNRHLHKERLAVYRWHASFICSGNTMPIVLVDWSDIREQKRLMVLRASVALHGRSVTLYEKAFPLSEQCSKKAHDQFLADLASILPSNTTPLIVSDAGFKVPWYKSVEKLGWYWLSRAYAIARTSSSERFDIMLLIALMLQLTCWLAGVHAQKQGWDKHFQANTVRNRNVLSTVRLGMEVLRHSGYTITREDLLVAATLLAQNLFTHGYALGKL

SEQ ID NO: 50190 - protein, 111 aa, Homo sapiens
MTSCLIPLAFRTRRVLSAKRGRTSCCRCGSKPSGTGPGGALPRSTTRSVPRLHDFRACGPTSWLTHRSRAFSPKAPVQLSVFQFPHLYRDSCRQDLRPILQVAFIGFTSQV

SEQ ID NO: 50191 - protein, 52 aa, Homo sapiens
HPLGSANYQGCTAAKLHRQPPLLQSSPNFILICYLSRHNSHKNTRALPANRV

SEQ ID NO: 50192 - protein, 110 aa, Homo sapiens
FGAVTRIGGPPLGNQSPSSCSLLHEKDPPTTSGPQTDQPKKHLTNFKSGAATRGTARTSKPTTKSQKTLPSTSPGHWTQSTPWASALRSSPWTETAAPSETEETLNTGRP

SEQ ID NO: 50193 - protein, 23 aa, Homo sapiens
  misc_feature (1)...(23): Xaa = X or * as defined in Table 2
FFSYFRPSGCILPLXELPEARCP

SEQ ID NO: 50194 - protein, 85 aa, Homo sapiens
  misc_feature (1)...(85): Xaa = X or * as defined in Table 2
VGSSPSRLXSLRGQVLNKNXSIQLGCLHIVGNPIXNSXDVPWAGWSEDXGRRWISSRSSSKDRGPVSXRSPPVPGLQHQMSHASM

SEQ ID NO: 50195 - protein, 109 aa, Homo sapiens
  misc_feature (1)...(109): Xaa = X or * as defined in Table 2
LKNHKRSEYALPHLNXXPSTTKEVXMDRSSALSDDITLXKSFSWLILAQKSPPLSTLQPPLLPAREQTLFDCNSPLPTQILXNGPTLISLRXLSQDEPGKGLSQGNVIT

SEQ ID NO: 50196 - protein, 994 aa, Homo sapiens
  DOMAIN (179)..(745): Gag P30 core shell protein domain identified by PFam, accession name Gag_p30, E-value=4.5e-12, PFam score of 45.7
  misc_feature (1)...(994): Xaa = X or * as defined in Table 2
MAPPLSPFADSLFGLSPPAPRDKGDTFYPWTQNSGARHGLGRQPSLGVSSLQGRLSDHSPTFQRCQTTQGRLPWSFTLSGKSCFSEEGAIPTPSVAESFQSSFSTDPSDLSPPPQPAHRQAELSPNSSSASTPPPYNPPTTSPPHTRSGLQFSSATSSSPPAQQFPLREVAGAEGIVNAHVPFSLSDLSQISQHLGSFSSDPTKYIQEFRYLTLSYNLTWSDLNVILTSTLSPDERERVFPVSQSHADNRRLHEPDLQEGIRAVPREDPPVELPGKFPRKKLQKLESGPQTPQQELINLAFNVYNNREEAARRQCISELQLLASTQQKTDTAQSPQKPTEPSQMLWITLTVEVAAAALILLEALKITNYTQLTLYSSHNFQNLFSYSYLTHMLSASRLLQLYSLFVESPTITNCSWPGLQSGLPHYSGYHTXPSXLHLSDPPDVHPISPHFLLPCFSPXSHLVYXWQFHQAXSPSHQQRQAMLXYLPHLSLRLPLCPPPLPLSKPNXLPWSFTLSGKSCFSEEGAIPTPSVAESFQSSFSTDPSDLSPPPQPAHRQAELSPNSSSASTPPPYNPPTTSPPHTRSGLQFSSATSSSPPAQQFPLREVAGAEGIVNAHVPFSLSDLSQISQHLGSFSSDPTKYIQEFRYLTLSYNLTWSDLNVILTSTLSPDERERVFPVSQSHADNRRLHEPDLQEGIRAVPREDPPVELPGKFPRKKLQKLESGPQTPQQELINLAFNVYNNREEAARRQCISELQLLASTQQKTDTAQSPQKPTEPSQMLWITLTVEVAAAALILLEALKITNYTQLTLYSSHNFQNLFSYSYLTHMLSASRLLQLYSLFVESPTITIVPGPDFNPASHIIPDTTPDPHDCISLIHLMFTPFPHISFFPVSHPDHTWFIDGSSTRPNRHSPAKAGYAIVSSTSIIEATTLPPSTTSQQAELVALTQALTLAKDYASISILILNMPFIFCTTMRSYGLKEVFSLHKGPPSLMPL

SEQ ID NO: 50197 - protein, 586 aa, Homo sapiens
  DOMAIN (456)..(506): ENV polyprotein (coat polyprotein) domain identified by eMATRIX, accession number PF00429, p-value=2.500e-19, raw score of 31.08
  DOMAIN (334)..(581): ENV polyprotein (coat polyprotein) domain identified by PFam, accession name ENV_polyprotein, E-value=4.4e-48, PFam score of 165.2
  misc_feature (1)...(586): Xaa = X or * as defined in Table 2
ESDPSNSTTSMDRTLLMSSIVPRLPSACRILPTGFTIPEXSCVHRTASLIPPLPPGSRKYSPPLPLNSLIFLKNSAYTAVPALQTDWATSPISLHLRTSFNSPHLYPPEELIYFLDRSSKTSPDISHQQAAALLRTYLKNLSPYINSTPPIFGPLTTQTTIPVAAPLCISWQRPTGIPLGNLSPSRCSFTLHLRSPTTNINETIGAFQLHITDKPSINTDKLKNISSNYCLGRHLPCISLHPWLSSPCSSDSPPRPSSCLLIPSPENNSERLLVDTRRFLIHHENRTFPSTQLPHQSPLQPLTAAALAGSLGVWVQDTPFSTPSHLFTLHLQFCLAQGLFFLCGSSTYMCLPANWTGTCTLVFLTPKIQFANGTEELPVPLMTPTQQKRVIPLIPLMVGLGLSASTVALGTGIAGISTSVMTFRSLSNDFSASITDISQTLSVLQAQVDSLAAVVLQNRRGLDLLTAEKGGLCIFLNEECCFYLNQSGLVYDNIKKLKDRAQKLANQASNYAEPPWALSNWMSWVLPIVSPLIPIFLLLLFGPCIFRLVSQFIQNRIQAITNHSIRQMFLLTSPQYHPLPQDLPSA

SEQ ID NO: 50198 - protein, 94 aa, Homo sapiens
  misc_feature (1)...(94): Xaa = X or * as defined in Table 2
GFCILHIVLEPWFSAPSAPLSTSLYWLFXLYILLNFFQSFQLLCLWFECPPVAQSNLIVXSLLLSARQSHSPSSFFPLLVRNCVPLEEERCSAF

SEQ ID NO: 50199 - protein, 500 aa, Homo sapiens; identical to SEQ ID NO: 33417
  DOMAIN (442)..(465): POTASSIUM CHANNEL SIGNATURE domain identified by eMATRIX, accession number PR00169G, p-value=8.657e-11, raw score of 9.39
  DOMAIN (269)..(493): Ion transport protein domain identified by PFam, accession name ion_trans, E-value=7.6e-07, PFam score of -41.0

SEQ ID NO: 50200 - protein, 193 aa, Homo sapiens
  misc_feature (1)...(193): Xaa = X or * as defined in Table 2
TTMLLIQSLFGGLFTWTRMKFGAVARIGGHPLGDQSPSSCSLLPEKDPPTTSGPQIDQPKKHLTDFKSGTPLXLYTHVSRVSDHAGTPALVLHPYGKSRFSGEGATQRQYPIPQQALKGLMPAITRLLQHGLLKPINSPYHSPILPVLKPDKPYKLVQDLPLSTKLFCLSTPWCQTHILFYPQYLPLQPIILF

SEQ ID NO: 50201 - protein, 875 aa, Homo sapiens
  DOMAIN (529)..(627): Gag P30 core shell protein domain identified by PFam, accession name Gag_p30, E-value=5.3e-27, PFam score of 98.1
MEGLAKKTTEQRQEGREGVNHGIFAAVTTRNVSRYWQISPGGDTKSPLIENPRHTGIYSCIHGVHIEEKKKSPDFNLTGSQSNMLKLLRSAKNISSMSNMNSSRMDSPKRAADFIQRGSLIMDMVSDKGNLMYSDNRSFQGKESIFGDNMNELQTFVANRQKDNLNNYVFQGQHPLTLNESNPNTVEVAVSTESKANSRPRQLWKKSVDSIRQDSLSQNPVSQRDEATAENRTHSLKSPRYLPEEMAHSDISETSNRATCHREPDNSKNHKTKDNFKRSVASKYPKDCSEVERTYLKTKSSSPRDKIYTIDVRSLAGRWGTLIDIMKTKSFRRQGNPTTGEQGYQKGRGPEKKALSFHKKSLRVSPPAFLRKNHGEKNYGGATLIKAVSGRISFRAAGPVFGGVPTPSVAESFQSSFSTDPSDLSPPPQPAHRQAELSPNSSSASTPPPYNPPTTSPPHTRSGLQFSSATSSSPPAQQFPLREMNGKEFFLYPNLTLITVGFMSQTSRKALEQFPERIPQWNYQANSPVEGLKKAAYKAVNYDKLKKTTQGKDENPAQFMARLAATIRCYTALDPEGPEGRLILSMHFITQSTPDIRKKLQKLESGPQTPQQELINLAFKVYNNREEAARRQCISELQLLASTVRQTPATSPAHENFQTPEPQQPGVPPEPPPPGDCYKCQKSSHQAKECPQPGIPSKPRPIYLLGLAAEDLTPPIASEANRTITDALDNSHSGGCVLEMNYNEGRPKIAVIHRLGWQRVFVRVRGASPNNQALVIPVGVEERVIGGGVLQEKLGPVPTNCYSMGGEAGVIHCKGHQKASDPIALGNAYADKVARQAASSPTSVPHGQFFSFTLVTPTYSPAETSTYQSLPTQGK

SEQ ID NO: 50202 - protein, 194 aa, Homo sapiens
  DOMAIN (85)..(102): Zinc finger, CCHC class domain identified by PFam, accession name zf-CCHC, E-value=0.017, PFam score of 19.5
MATAVHLPASQPGTHQKIIDMAMKALDAGQQPALWALASTDFTSLKKLRPQSVTSRNSRAVTSSSERKGGTPDYSPTFQRCQTTRSLYTCRKSGHQAKECPQPGFLLSRVPSVRDPTENRLFNSPGSHSQSPWNSGQGSLTDSFPDLLGLSAETDTARSPRKPRRPSRTRASVSQFIQNHIQAITIILYDKCFF

SEQ ID NO: 50203 - protein, 94 aa, Homo sapiens
EAGVIHCKGHQKASDPIALDNAYADKVARQAVFYIVWNHVPKITGLMEEMGLDADLSKQPKLTQLVEGEGPSQKVPMFLNMIHRRVKELRVAAE

SEQ ID NO: 50204 - protein, 274 aa, Homo sapiens
MVYGASEEIRQCQSSAGKPRRSQSESLGPEFQGLWEWLPGKRDLPLRVKEKGLRGTCPCPRKAGLAAKGEGEGVEGFLPLPQESREGNRRTGDWSPKGGPPIRVTAPNFMRVCVKRPPNRLCVSNMAVYFTWVQKKKSSLAFSSVVTSDLKSKKRRLSGKSLETSSASLMVYGASEATGQRQSSAAKPRRSQSESLGPEFQGLREWLPESKPQSLFKEPERSIKKTFQRSLKASEDRSEIDLQHHPDRGTLAASVVLVTESLQKTYSITDGDVS

SEQ ID NO: 50205 - protein, 742 aa, Homo sapiens
  DOMAIN (206)..(217): RNase H domain identified by eMATRIX, accession number PF00075B, p-value=9.182e-13, raw score of 12.56
  DOMAIN (144)..(332): Reverse transcriptase domain identified by PFam, accession name rvt, E-value=5.5e-38, PFam score of 139.6
  misc_feature (1)...(742): Xaa = X or * as defined in Table 2
RPSKSQTMLNSLSTALIISKIYFLPHTXHIYFLLPGSFCYTHSLLSLPQLPLFLCLDLNAASHIIPDTTPDPHDCISLIHLTFTFPQISFFPVSHPDHTWFIDGSSTRPNTTHQQRQAMLXYLPHLSLRLPLCLPPLPLSKPNXLPXLKPINSPYNSPILPVQKPDKSYRLVQDLRLINQIVLPIHPVVPNPYTLLSSIPSSTTHYSMLDLKDAFFTIPLHPSSQPLFAFTWTDPDTHQSQQLTWAVLPQGFRDSPHYFSQALSHDLLSFHPSASHLIQYIDDLLLCSPSFESSQQDTLLLLQCLFSKGYRVSPSKAQISSPSVTYLGIILHKNTHALPADRWPSCLRAAAAAALILVEALKITNYAQLTLYSSHNFQNLFSSSHLTHILSAPRLLLLYSLFVESPTITIVPGLDLNAASHIIPDTTPDPHDCISLIHLTFTFPQISFFPVSHPDHTWFIDGSSTRPNHHSPAKAGYAIVSSTSIIEATALPPSTTSQQAELVTLTQALTLAKGLRINIYTDSKYAFHILQHHAVIWAERGFLTTQGSSIINASLIKTLLKTTLLPKEAGVIHCKGHQKASDPIALGNAYADKVARQAASSPTSVPHSQFFSFASVTPTYSPTETSTYQSLPTQGKWFLDQGKYLLPASQAHSILSSFHNLFHVGYKPLDRLLEPLISFPSWKSILKEITSQCSICYSTTPQGLFRPPPFPTHQARGFAPAQDWQIDFTHMPRVRKLKYLSL

SEQ ID NO: 50206 - protein, 196 aa, Homo sapiens
  misc_feature (1)...(196): Xaa = X or * as defined in Table 2
RPSKSQTMLNSLSTALIISKIYFLPHTXHIYFLLPGSFCYTHSLLSLPQLPLFLCLDLNAASHIIPDTTPDPHDCISLIHLTFTFPQISFFPVSHPDHTWFIDGSSTRPNTTHQQRQAMLXYLPHLSLRLPLCLPPLPLSKPNXLPXLKPSLLQKDYASISILILNMPFIFCSTMQSYGLKEVSSLHKGPPSLMPL

SEQ ID NO: 50207 - protein, 125 aa, Homo sapiens
  misc_feature (1)...(125): Xaa = X or * as defined in Table 2
TTPDPHDCISLIHLTFTPFPHISFFRVPHPYHIWFIDGSSTRPNATHQQRQAMLXYLPHLSLRLLLCPPPLPLSKPNXLPXLKPSLLQKDYASIFILTLNMPFISCTTMQEVSSLHKGPLSLIPL

SEQ ID NO: 50208 - protein, 111 aa, Homo sapiens
  misc_feature (1)...(111): Xaa = X or * as defined in Table 2
TFIRTHFLTQPQPCPRHQPSRXLSSSPPAGXTGIFARLLIFSCLLQILNHMQHTLAGQSVLVKNLTPQTLQPRWTGPYLVIYSTPTVRPPAGSSPLGSPFQSKAVSISQPA

SEQ ID NO: 50209 - protein, 86 aa, Homo sapiens
  misc_feature (1)...(86): Xaa = X or * as defined in Table 2
ISGTCSNLLGEEVLEERLAAAVQAFGSSRVLEMWLGFVSQWRQVIVTQKCIAVWLLPLYYCTPXRQGXLIPVVGFEGQILIFEVFS

SEQ ID NO: 50210 - protein, 584 aa, Homo sapiens; identical to SEQ ID NO: 35965
  DOMAIN (455)..(505): ENV polyprotein (coat polyprotein) domain identified by eMATRIX, accession number PF00429, p-value=2.500e-19, raw score of 31.08
  DOMAIN (49)..(579): ENV polyprotein (coat polyprotein) domain identified by PFam, accession name ENV_polyprotein, E-value=4.2e-53, PFam score of 182.3

SEQ ID NO: 50211 - protein, 130 aa, Homo sapiens
  DOMAIN (106)..(126): NATURAL RESISTANCE-ASSOCIATED MACROPHAGE PROTEIN SIGNATURE domain identified by eMATRIX, accession number PR00447G, p-value= 9.544e-09, raw score of 6.69
  DOMAIN (18)..(99): ENV polyprotein (coat polyprotein) domain identified by PFam, accession name ENV_polyprotein, E-value=3.8e-12, PFam score of 43.1
QFANRTEELPVPLMTPTRQKRVIPLIPLLVGLGLSASTIALGTGIGGISTSVTTFHSLSSVFSASITDISQTLSVLQAQVDSLAAVILQNHRGLDLLTAVWSADLEAQRSLLLIFLLVPLFTFRSPVSSY

SEQ ID NO: 50212 - protein, 127 aa, Homo sapiens
  DOMAIN (70)..(78): RNase H domain identified by eMATRIX, accession number PF00075E, p-value=7.545e-10, raw score of 8.53
  misc_feature (1)...(127): Xaa = X or * as defined in Table 2
KEPTQHSFSYTHSLLSLPQLPLFLCPDFNPASHIIPDTTPDPHDCISLIHLTFTPFPHISFFPVSHPDHTWFTDGSSTRPNATHQQRQDMQXYLPHLLLTLPLCPPPLPLSKPNQLPXLRPSLLQKG

SEQ ID NO: 50213 - protein, 428 aa, Homo sapiens
  DOMAIN (282)..(300): RNase H domain identified by eMATRIX, accession number PF00075J, p-value=1.225e-16, raw score of 15.78
  DOMAIN (257)..(341): Integrase core domain identified by PFam, accession name rve, E-value=1.9e-18, PFam score of 67.8
MNFEGTETLHCNGHCKVIAMTLGNQEVNQRNFSTGTTGPMEGMWLLSSNSHHSLKYAGALAILSAFQYQERGSQAGHRDSWPETKETHFICGPKTPALVTDWEGSLPLVFNHCRDASLIIHPRFSGVRPRRDACLGPSPLAATPQTITDTELWVTLTVEVWDISTPSLATDHMPVTIPLKPNHPYPAQRQYPIPQHALKGLKPVITRLLQHGLLKPINSPYNSPILPVQKLDKSYRLVQNLRLINKIVSPIHPVVPNPPAFTSQITQAVSQALGIQWNLHIPYHPQSSGKVERTNGLLKVHLTKLSLQLKKDWTVLLPLALLRIRACPRDATGYSRFELLYGRTFLLGPNLIPDTSPLGDYLPVLQQARQAANLLLPTPDPQPHEDTLAGRSVLVKNLTPQTLQPRWTGPHFIIYSTPTAVCLQDPPH

SEQ ID NO: 50214 - protein, 1018 aa, Homo sapiens
  misc_feature (1)...(1018): Xaa = X or * as defined in Table 2
MEEPLGFKQTLVVAQQNPLWTSGGGGHSPSGSGHRGVCITTLPVPEGSSQKETPHVSEKLKEKNESLPGNPENSSRSSERPPRRHSKARDSDEENDPDDEDAVVNAVGCLGKNSGFLAPELQKYQKQIKDGTAGTPAISTTTTVEIRKSSVMTTGDHLLSGKKAQRPAPGHSSCPSTETEEEKGKRLLYWVVWQVAVNSASQLEAHNSENPVSLSCRIRERPGLWHGYRPSRSPLPHSLSGSYSLWALRTDTVCDMSVMLAEMSLERLRKVVTEVEMPAIPVLRAIVEAESPKPTSKGISGITLFCRVGVMRGTEPNEEQSLRSNNIAELSPGAINSCQSEYHAAFNSMMMERMTTDINALKRQYSRIKKKQQQQVHQVYIRAGQGMSLILHPEHQALCLMQGSVGLPPAVCSVSXFPWLTLQTAGGSPTDPSSDTVLGAQDAEXETFLVLPXCTPDEPAAVASFXFESTAASVHXYLWSCVPSSYFKSCMVFTLTGIDCSWTQLCNVIRSQTRSSFGSVPLMTPTRQKRVIPLIPLLVGLGLSASTIALSTGIAGISTSVTTFRSLSNDISASITDISQTVSVLKAQSEXLGFKQTLVVAQQNPLWTSGGGGHSPSGSGHRGVCITTLPVPEGSSQKETPHVSEKLKEKNESLPGNPENSSRSSERPPRRHSKARDSDEENDPDDEDAVVNAVGCLGKNSGFLAPELQKYQKQIKDGTAGTPAISTTTTVEIRKSSVMTTGDHLLSGKKAQRPAPGHSSCPSTETEEEKGKRLLYWVVWQVAVNSASQLEAHNSENPVSLSCRIRERPGLWHGYRPSRSPLPHSLSGSYSLWALRTDTVCDMSVMLAEMSLERLRKVVTEVEMPAIPVLRAIVEAESPKPTSKGISGITLFCRVGVMRGTEPNEEQSLRSNNIAELSPGAINSCQSEYHAAFNSMMMERMTTDINALKRQYSRIKKKQQQQVHQVYIRAGQGMSLILHPEHQALCLMQGSVGLPPAVCSVSQGNQLTVLLASTAGLG

SEQ ID NO: 50215 - protein, 281 aa, Homo sapiens
  DOMAIN (128)..(261): ENV polyprotein (coat polyprotein) domain identified by PFam, accession name ENV_polyprotein, E-value=1.9e-18, PFam score of 64.5
MDEEKREHLNALGRRALGEGPMYQCTRGSGAGNYLTTYVREPEQKALAILWTQGWGWGPVNNSERLLVDTQRFLIHHENRTSSSVQLPHQSPLQPLMAVALAGSLGVWVQDTPFSTPSHLFTLHLQFCLAQGVFFLCVSSTYMCLPANWTGTCTLVFLTPKIQFANRTEELPVPLMTPTRQKRVIPLIPLLVSLRLSAFTIALGTGIAGISTSVTTFRSLSNDFSASITDVSQTLSVLQAQVDSLAAVVLQNRRGLDLLTAPPTIFLSGCSCVPFINIINW

SEQ ID NO: 50216 - protein, 62 aa, Homo sapiens
  misc_feature (1)...(62): Xaa = X or * as defined in Table 2
XSADLPWEINPLSSCSLLHEKDPPTSSGPQTDQPKEHLTNFKSEKKETRFIRGPKTPAPVMD

SEQ ID NO: 50217 - protein, 191 aa, Homo sapiens
  misc_feature (1)...(191): Xaa = X or * as defined in Table 2
FPKSIFFLPPDAYTFLFPWLLQLYSLFVESPTITHCSWPRLQSGLPHYSGYHTXPSXLYLSDPPDIHPISAYFLLSCSSPXSRLIYXWQFHQAXSPHTSKGRLCYSTSHXPASXNLSFPFHRGNVSSRKXLLSVPSAILLLLRDYSGPLPSLHIKLRDLPPPRTGKSAYSTCPESGNXNTSWSRXTLICQS

SEQ ID NO: 50218 - protein, 133 aa, Homo sapiens
  misc_feature (1)...(133): Xaa = X or * as defined in Table 2
PIGTNTECVVLFQPMETGHSSRVNMSGYKXPCPPLFGVLSWQNCWRVYPFCLLFGGPLSVMDPEGSPSGCSNSLGLGADSVTLSTGGVFQPNVRGLNCNGKIVMGRCPLEFVPIPATSPISRKKPERSTAFSH

SEQ ID NO: 50219 - protein, 166 aa, Homo sapiens
  DOMAIN (91)..(109): Gram-negative pili assembly chaperone proteins domain identified by eMATRIX, accession number BL00635B, p-value=2.432e- 09, raw score of 13.18
  misc_feature (1)...(166): Xaa = X or * as defined in Table 2
RPSFKTPENSPTLVPTWTTLFYALFFSYPHLPTSLIRPKYFNQIICFPDYSWSTATSHCCPSSQSKCLLCVSLTSPQYQPLPQDLPSAXSLPLXVPTPPLIPLEAALRNIAHSLSIPPPKNFRRSNTSTLFCFICLINIRRQECQASEPRPGHRIPCDLHVYIQMA

SEQ ID NO: 50220 - protein, 392 aa, Homo sapiens
  DOMAIN (241)..(281): kw TRANSCRIPTASE REVERSE II ORF2 domain identified by eMATRIX, accession number DM01354Y, p-value=9.571e-24, raw score of 10.69
MEDRVGPSEERSQQKLSITPARLAGGDSLNPAGRTGDLLVETSPLLAAVFPAHDNSLCNKPYWLVQDLRLINQIVLPIHPMMLLGEISVTKALAGSLIKALAVFHTAESPGYALLDSYYLLQKGSVCISILQEEEAFSWPGKGECRDKSWASLGLIPAFPQGGQWKQALGLLDHSCLCFGELGTRLAAPASFSTFPITNRERERKTDKLIPKFMWKCKGPRITKTILEKNEVGEFTLLDFKTYHKFAVIKTMWYWHKDRYIDQQNDIESPEINSYVYGQLIFDKDSARLHPGEINSLVAHTKPVWWSLHMDAHEIWCRDSDRGSSLGRINPLSSCSLLREKDPPTTSGPQTDQPNEHLTNFKSGRDKGDTFYPWTQNSGAGHGLGRQPSLGV

SEQ ID NO: 50221 - protein, 356 aa, Homo sapiens
  DOMAIN (158)..(272): ENV polyprotein (coat polyprotein) domain identified by PFam, accession name ENV_polyprotein, E-value=8.1e-18, PFam score of 62.3
MLAALAALACSQRLFGLGAHSGRALQPATALWEPLSGLAKAEAGSLSLRGGVEGEAQTGTGLHMALVGQHEFWVGVGLVDPTLRAAGQLHQPWAVAEAKVIVKVNAPLSLSDLSQNQLAFRLFFIEYKNPAQFMVCLAATLTRFTALDPERSSTYMCLPANWTGTCTLVFLTPKIQIANRTEELPVPLMTPTRQKRVIPLIPLLVGLGLSASTIALSTGIAGISTSVTTFRSLSNDFSASITDISQTLSVLQAQVDSLAAVVLQNRRDLDLLLSNLLFHGFPAIFSTRGTPCFSIVVSCTVVSLHSCDLPWLMRCLGRALMTTEFLLEDLSHFLGVGGGMPEAGPQQPAQEEARAS

SEQ ID NO: 50222 - protein, 393 aa, Homo sapiens
  DOMAIN (210)..(221): RNase H domain identified by eMATRIX, accession number PF00075F, p-value=4.750e-11, raw score of 12.87
  DOMAIN (147)..(294): RNase H domain identified by PFam, accession name rnaseH, E- value=1e-27, PFam score of 105.5
QFTLKKVAGAEGSQDDRERVFSLAQSHADNHRLHEPDLQEGSRVVPQEDPQWNSQANSPDLLGLATEDRRCPIASEAPWTITDAELQLLQLCSLFVESPTITIVPGPDFNPASHIIPDTTPDPHDCISLIHLTFTPFPHISFFPVSHPDHTWFIDGSSTRPNCHSPAKAGYAIVSSTSVIDATALPPSTTSEQAELVALTQALTLAKGLCINIYTDSKYAFHILHHRVVTWAERGYLTTQGSSIINASLIKTLLKAALLPKEAGVIDCKGHQKASEPIALGNAYADKVARQAASSPTSVPHGQFFSFTSVTPTYSPAETSTYQSLPTQGKWCSYQGNCQDFKAHNQKPENTTKYKPRTLDPEHTLGICSEILSLDRDSCSFRNRGDPEHRQAS

SEQ ID NO: 50223 - protein, 88 aa, Homo sapiens
  DOMAIN (5)..(54): Eukaryotic RNA polymerase II heptapeptide repeat proteins domain identified by eMATRIX, accession number BL00115Z, p-value= 7.750e-09, raw score of 3.12
  misc_feature (1)...(88): Xaa = X or * as defined in Table 2
CSGSMPSSSSVSRPTSPFGSPLLSSPATSSSPKTPPTSATSGSSCPTTGLXMWTWSGFTGPVKAATWRWTSATYPRWSWRPRAPLCPP

SEQ ID NO: 50224 - protein, 221 aa, Homo sapiens
  misc_feature (1)...(221): Xaa = X or * as defined in Table 2
RPVHGHLHAVPVWRDSVRGLAPSSSPRVPGRDLIKQTPRLRARVVLSPFKTADAAHSHPGLTQPGRGRMKADISAATPGPFMCRVTPLALGVSTEPSPARLVLNFVLFCFVLRRSLALSPRLEVLWLDLGSLQPPPPGFKQFSCLSLPSSWDYRCMPPWAGQFLEFXVEDGVXHIGQADLELLTSGDPPASASQSAGITGVSNRAQPQVSECGHGVALRRQ

SEQ ID NO: 50225 - protein, 106 aa, Homo sapiens
  misc_feature (1)...(106): Xaa = X or * as defined in Table 2
VRMVIIKKSENNRCWRKCGEIGMLLNCWXECKLVQPVWKTVDPAIPLLGIYPKDYISFYGKDTCTHMFIVALFTIAKTGNQPKCPSMIDWIKKMWHIYTMEYYAAI

SEQ ID NO: 50226 - protein, 25 aa, Homo sapiens
CPSMIDWIKKMWHIYTMGYYAAITP

SEQ ID NO: 50227 - protein, 257 aa, Homo sapiens
  DOMAIN (2)..(51): kw TRANSCRIPTASE REVERSE II ORF2 domain identified by eMATRIX, accession number DM01354Z, p-value=4.194e-31, raw score of 9.06
  misc_feature (1)...(257): Xaa = X or * as defined in Table 2
GREKAREQVDLTLFTIAKTWNQPKCPSVIDWIKKIWHIYTMGYYAAIKKDEFVSFAGTWMKLXTVSVEADPHIEGRFFRFKNYASKTPSLKLQRQSRPFQETSHPTGIEKRSPPNLQKATQPHIMSAKEYAFSRKMYGKTGRKKGEVKVRERKGKGAGRSDTIYNSKDLEPTQMPISDRLDKENMDIYTMGYYAAIKKDEFVSFAGTMDEAVNQGYSSRARTRHWSMKKILLQLARCLPKWPLSFVLESQGLGGVGS

SEQ ID NO: 50228 - protein, 168 aa, Homo sapiens
  DOMAIN (82)..(131): kw TRANSCRIPTASE REVERSE II ORF2 domain identified by eMATRIX, accession number DM01354Z, p-value=1.000e-40, raw score of 9.06
  misc_feature (1)...(168): Xaa = X or * as defined in Table 2
KTTMRYYLTPVRMAIIKKSENNRCWRGCGETRMLLHCWFECKLVQLLWKTWXFLKDVELKIPFDPAIPLLGVYPKDYKSCYYKDTCTRMFIAALFTIAKTWNQPKCPSVIDWIKKMWHIYTMEYYAAIKKDEFVSFAGTWMKLETIILSKLSQGQKTKHRMFSLISGS

SEQ ID NO: 50229 - protein, 174 aa, Homo sapiens; identical to SEQ ID NO: 38194

SEQ ID NO: 50230 - protein, 632 aa, Homo sapiens; identical to SEQ ID NO: 40739
  DOMAIN (10)..(65): kw TRANSCRIPTASE REVERSE II ORF2 domain identified by eMATRIX, accession number DM01354Q, p-value=1.000e-40, raw score of 9.23
  DOMAIN (1)..(238): Reverse transcriptase domain identified by PFam, accession name rvt, E-value=2.7e-52, PFam score of 187.1

SEQ ID NO: 50231 - protein, 713 aa, Homo sapiens; identical to SEQ ID NO: 34589
  DOMAIN (57)..(100): kw TRANSCRIPTASE REVERSE II ORF2 domain identified by eMATRIX, accession number DM01354T, p-value=1.000e-40, raw score of 9.48
  DOMAIN (1)..(179): Reverse transcriptase domain identified by PFam, accession name rvt, E-value=2.8e-15, PFam score of 64.2

SEQ ID NO: 50232 - protein, 1709 aa, Homo sapiens; identical to SEQ ID NO: 32700
  DOMAIN (797)..(842): kw TRANSCRIPTASE REVERSE II ORF2 domain identified by eMATRIX, accession number DM01354N, p-value=1.000e-40, raw score of 13.17
  DOMAIN (391)..(621): AP endonuclease family 1 domain identified by PFam, accession name AP_endonucleas1, E-value=7e-83, PFam score of 288.8

SEQ ID NO: 50233 - protein, 1203 aa, Homo sapiens; identical to SEQ ID NO: 34339
  DOMAIN (121)..(166): kw TRANSCRIPTASE REVERSE II ORF2 domain identified by eMATRIX, accession number DM01354N, p-value=1.000e-40, raw score of 13.17
  DOMAIN (211)..(387): Reverse transcriptase domain identified by PFam, accession name rvt, E-value=3.5e-23, PFam score of 90.5
  misc_feature (1)...(1203): Xaa = X or * as defined in Table 2

SEQ ID NO: 50234 - protein, 566 aa, Homo sapiens; identical to SEQ ID NO: 46013
  DOMAIN (441)..(482): kw TRANSCRIPTASE REVERSE II ORF2 domain identified by eMATRIX, accession number DM01354I, p-value=1.000e-40, raw score of 15.55
  DOMAIN (196)..(427): AP endonuclease family 1 domain identified by PFam, accession name AP_endonucleas1, E-value=4.6e-53, PFam score of 189.7

SEQ ID NO: 50235 - protein, 1150 aa, Homo sapiens; identical to SEQ ID NO: 44308
  DOMAIN (353)..(394): kw TRANSCRIPTASE REVERSE II ORF2 domain identified by eMATRIX, accession number DM01354I, p-value=1.000e-40, raw score of 15.55
  DOMAIN (114)..(339): AP endonuclease family 1 domain identified by PFam, accession name AP_endonucleas1, E-value=1.3e-69, PFam score of 244.7

SEQ ID NO: 50236 - protein, 754 aa, Homo sapiens; identical to SEQ ID NO: 32653
  DOMAIN (208)..(254): kw TRANSCRIPTASE REVERSE II ORF2 domain identified by eMATRIX, accession number DM01354O, p-value=1.000e-40, raw score of 8.73
  DOMAIN (241)..(418): Reverse transcriptase domain identified by PFam, accession name rvt, E-value=6.7e-11, PFam score of 49.6

SEQ ID NO: 50237 - protein, 842 aa, Homo sapiens
  DOMAIN (418)..(465): kw TRANSCRIPTASE REVERSE II ORF2 domain identified by eMATRIX, accession number DM01354V, p-value=1.000e-40, raw score of 12.97
  misc_feature (1)...(842): Xaa = X or * as defined in Table 2
MFFETNENEDTSYQNLRDTFKVVFRWKIIALNAHKRKQERSKIDTLTSKLKELEKQQQTNSKASRRHEITNIRAELKEIETQKTLQKINESVNWFFEKIIKIDRLLARLIKKKREKNQIDSIKNDIEDITTDPVETQTTVREYFKHLYANKLENLEEMDKFLDTYILPSLSQEEVEPLNRPITGSEIEAIINSLPTKKSPGPDRFTAKFYQRITNTEKCLKELMEPESQSSRTTXRMQKPQESMRSTGRKGFSDGRXNEXNEXRGEWNQVGKHSAGYYPGELPQTSKAGQHSDSGNTENATKILLEKSNSKTYNCQIHQSXNEGKNVKGSQRERNTNYHQRILQTPLRKXTRKSKEMDKFLDTYTLPRLNEEEVESLNTPITGSEIVAIINSLPTKKSPGPDGFTAELYQRQTESQIMSELPFTIASKRIKYVGIRLIRDVKDLFKENYKPLLSEIKEDTNKWKNIPCSWVGRINIVKMAILPKVIYRFNAIPIKLPMPFFTELEKTTLNFIWNQKRAHIANSILSQKNKAGGITLPDFKLYYKATVTKTAWYWYQNREIDEWNTTEPSEIMPHIYNYLIFDKPEKNKQWEKDSLFNKWCWENWLAICRKLKLDPFLTPYTKINSRWIKDLNVRPKTIKTLEENLGNTIQDIGIGDDFMSKTPKAMATKAKIDRWDLIKLKSFCTAKETTIRVNRQPTKWEKIFATYSSDKGLISRIYNELKQIYKKKTNNPIKKWTKNMNRHFSKEDIYAAKRHMKKCSSSLAIREMQIKTTMTYHLTPVRMAIIKKSGYNRCWRGCGEIGTLLHCWWDCKLVQPLWKSVWRFLRDLELEIPFDPAIPLLV

SEQ ID NO: 50238 - protein, 1241 aa, Homo sapiens; identical to SEQ ID NO: 44966
  DOMAIN (361)..(404): kw TRANSCRIPTASE REVERSE II ORF2 domain identified by eMATRIX, accession number DM01354T, p-value=1.000e-40, raw score of 9.48
  DOMAIN (247)..(483): Reverse transcriptase domain identified by PFam, accession name rvt, E-value=3.5e-44, PFam score of 160.2

SEQ ID NO: 50239 - protein, 341 aa, Homo sapiens
  DOMAIN (110)..(151): kw TRANSCRIPTASE REVERSE II ORF2 domain identified by eMATRIX, accession number DM01354I, p-value=1.000e-40, raw score of 15.55
MGDFNTPLSTLDRSTRQKVNKDTQELNSALHQADLADIYRTLHPKSTEYTFFSAPHHTYSKTDHILGSKALLSKCKRTEIITNYLSDHSAIKLELRIKNLTQNRSTTWKLNNLLLNDYWVHNEMKAEIKMFFETNENKDTTYQNLWDTFKAVCRGKFIALNAHKRQQERSKIDTLKSQLKELEKQEQTHSKASRRINKIDRPLARLIKKKREKNQIDTIKNDKGDITTDPTEIQTTIREYYKHLYANKLENLEEMDKFLDTYTLPRLNQEEVESLNRPITGAEIVAIINSLPTKKSPGPDGFTAKFYQRYKEELVPFLLKLFQSIEKEGILPNSFYEASII

SEQ ID NO: 50240 - protein, 501 aa, Homo sapiens [sequence omitted]

SEQ ID NO: 50241 - protein, 1056 aa, Homo sapiens; identical to SEQ ID NO: 38235
  DOMAIN (554)..(599): kw TRANSCRIPTASE REVERSE II ORF2 domain identified by eMATRIX, accession number DM01354N, p-value=1.000e-40, raw score of 13.17
  DOMAIN (158)..(378): AP endonuclease family 1 domain identified by PFam, accession name AP_endonucleas1, E-value=3.9e-65, PFam score of 229.8

SEQ ID NO: 50242 - protein, 984 aa, Homo sapiens; identical to SEQ ID NO: 39480
  DOMAIN (262)..(303): kw TRANSCRIPTASE REVERSE II ORF2 domain identified by eMATRIX, accession number DM01354I, p-value=1.000e-40, raw score of 15.55
  DOMAIN (465)..(729): Reverse transcriptase domain identified by PFam, accession name rvt, E-value=1.9e-72, PFam score of 254.1

SEQ ID NO: 50243 - protein, 599 aa, Homo sapiens; identical to SEQ ID NO: 40575
  DOMAIN (193)..(236): kw TRANSCRIPTASE REVERSE II ORF2 domain identified by eMATRIX, accession number DM01354T, p-value=1.000e-40, raw score of 9.48
  DOMAIN (81)..(315): Reverse transcriptase domain identified by PFam, accession name rvt, E-value=4e-37, PFam score of 136.8

SEQ ID NO: 50244 - protein, 788 aa, Homo sapiens
  DOMAIN (154)..(195): kw TRANSCRIPTASE REVERSE II ORF2 domain identified by eMATRIX, accession number DM01354I, p-value=1.000e-40, raw score of 15.55
  DOMAIN (384)..(659): Reverse transcriptase domain identified by PFam, accession name rvt, E-value=3.5e-80, PFam score of 279.8
MVKGSIQQEELTNLNMYAPNTGAPRFIKQVLSDLQRDLDSHTLIMGDFNTQLSTLDRSMRQKVNKDTQELNSALHQADLIDIYRTLHPKSTEYTFFSAPHHTYSKIDHIVGSKALLSKCKRTEIITNYISDHSAIKLELRIKNLTQNCSTTWKLNNLLLNDYWVHNEMKAEIKMFFETNENKDTTYQNLWDTFKVVCRGKFIALNAHKRKQERSKTDTLTSQLKELEKQEQTHSKASRRQEITKIRAELKEIETQKTLQKINESRSWFFERINKIDRPLARLIKKKREKNQIDAIKNDKGDITTDPTEIQSTIREYYKHLYTNKLENLEEMDKFLDTYTLPRLNQEEVESLNRPITGAEIVAIINNLPTKKSPGPDGFTAEFYQRKEGILPNSFYEASIILIPKPDRDTTKKENFRPISLMNIDAKILNKILANRIQQHITKLIHHDQVGFIPGMQGWFNIRKSIRVIQHINRTKDKNYMIISIDAEKAFDKIKQCFMLKTLNKLGIDGTYFKIIRAIYDKPTANIILNGQKLEAFPLKTGTREGCPLSPLLFNIVLEVLARAIRQEKEIKGIQLGKEEVKLSLFADDMIVYLENPIVSAQNLLKLISNFSKVSGYKINVQKSQAFLYTNNRQTESQIMSELPFTIASKRIKYLGIQLTRDRKDLFKENYKPLLKEIKEDTNKWKNIPCSWVEKINIVKMAILPKVIYRFNAIPIKLPMTFFTELEKTTLKFIWNQKRARITKSILSQKNKAGGITLPDFKLYYKATVTETASEPSELMLHIYNYLIF

SEQ ID NO: 50245 - protein, 970 aa, Homo sapiens
  DOMAIN (194)..(235): kw TRANSCRIPTASE REVERSE II ORF2 domain identified by eMATRIX, accession number DM01354I, p-value=1.000e-40, raw score of 15.55
  DOMAIN (1)..(180): AP endonuclease family 1 domain identified by PFam, accession name AP_endonucleas1, E-value=7.8e-38, PFam score of 139.1
WRKIYQANGKQKKAGVAILVSDKTDFKPTKIKRDKEGHYIMVKGSIHQEELTILNIYAPNTGAPRFIKQVLSDLQRDLDSHTIIMGDFNTPLSTLDRSMRQKVNKDTQEFNSALHQADLIDIYRTLHPKSTEYTFFSAPYHTYSKIDHIVQSKALLSKCKRSEIITNCLSDHSAIKLDLRIKKLTQNHSTTWKLNNLLLNNYWVHNEMKAEIKMFFETNENKDTTYQNLWDTFKAVCRGIFIALNAHKRKQETSKIDTLTSQLKELEKQEQTHSKASRRQEITKIRAELKEIETQKTLQNINESRSWFFERINKIDRPLARLIKKKREKKQIDTIKNDKGDITTDPTEIQTTIREYYKHLYTNKLKNLEEMDKFLDTYTLPRLNQEEVESLNTPITGSEIVAIINSLPTKKSPGPDGFTAEFYQRYKEELMQKRPFDKIQQPFMLKTLNKLGIDGTYLKIIRAIYDKPTANIILNGQKLEAFPLKTGTRQGCPLSPLLFNIVMEVLARAIRHDKEIKGIQLGKEEVKLSLFADDMIVYLENPIVSAQNLKLISNFSKVSGYKINVQKSQAFLYTNNRQTESQIMSELPFTIASKRIKYLGIQLTRDGKDLFKENYKPLLNEIKEDTNKWKNIPCSWVGRINIMKMAILPKVIYRFNAIPIKLPMTFFTELEKTTFKFIWNQKRAHIAKSILSQKNKAGGITLPDFKLYYKATVTKTAWYWYQNRDIDQWNRTEPSEITPRLKRAADLPAQYLSSAEGQTASSRGSLTPLAPDEETPLSRGQQTPHTGELQLALGGCPSGTNLPEEGTGNNLCCSAASAGDTRQQDLEWSSSELQQTCSRGNPSEGHQHQRSKVDKSMKMRKNQCKKAENSKNQNTSSPPKDQNSLPAREQNWTENWFDEFSEVGFRRWVITNSSELKEHVLSQCKEAKNLEKRLEELLTGIISVEKNINVLMELKSTAQELREACTSINS

SEQ ID NO: 50246 - protein, 1576 aa, Homo sapiens; identical to SEQ ID NO: 38229
  DOMAIN (1385)..(1401): CHYMOTRYPSIN SERINE PROTEASE FAMILY (S1) SIGNATURE domain identified by eMATRIX, accession number PR00722A, p-value=6.087e- 16, raw score of 12.27
  DOMAIN (870)..(1571): Trypsin domain identified by PFam, accession name trypsin, E- value=2.6e-129, PFam score of 409.7

SEQ ID NO: 50247 - protein, 522 aa, Homo sapiens; identical to SEQ ID NO: 40431
  DOMAIN (95)..(142): kw TRANSCRIPTASE REVERSE II ORF2 domain identified by eMATRIX, accession number DM01354V, p-value=1.000e-40, raw score of 12.97

SEQ ID NO: 50248 - protein, 931 aa, Homo sapiens; identical to SEQ ID NO: 37091
  DOMAIN (323)..(364): kw TRANSCRIPTASE REVERSE II ORF2 domain identified by eMATRIX, accession number DM01354I, p-value=1.000e-40, raw score of 15.55
  DOMAIN (548)..(814): Reverse transcriptase domain identified by PFam, accession name rvt, E-value=5.6e-77, PFam score of 269.2

SEQ ID NO: 50249 - protein, 785 aa, Homo sapiens
  DOMAIN (57)..(98): kw TRANSCRIPTASE REVERSE II ORF2 domain identified by eMATRIX, accession number DM01354I, p-value=1.000e-40, raw score of 15.55
  DOMAIN (303)..(573): Reverse transcriptase domain identified by PFam, accession name rvt, E-value=3.5e-14, PFam score of 60.5
  misc_feature (1)...(785): Xaa = X or * as defined in Table 2
XPHHTYSKIDHIVGSKTLLSKCKRTEIITNYLSDHSAIKLELRIKNLTQSRSTTWKLNNLLLNDYWVHNEMKAEIKMFFETNENKDTTYQNLWDAFKAVCRGKFIALNAYKRKQERSKIDTLTSQLKELEKQEQTHSKASRRQEITKIRAELKEIETQKTLQKINESRSWFFERINKIDRPLARLIKNKREKNQIDTIKNDKGDITTNPTEIQTTIREYYKHLYANKLENLEEMDTFLDTYTLPRLNQEEVESLNRPITGSEIVAIINSLPTKKSPGPDGFTAEFYQRYKEELVPFLLKLFQSIEKEGILPNSFYEASIILIPKPGRDTTKKENFRPISLMNIDAKILNKILANRIQQHIKKLIHHDQVGFIPGMQGWFNIHKSINVIQHINRAKDKNHMIISIDEEKAFDKIQQPFMLKTLNKLENKIPRNPTYKGCEGPLQGELQTTAQGNKRGHKQMEEHSMLMGRKNQYHENGHTAQGNYRFNAIPIKLPMTFFTELEKTTLKFIWNQKRARIAKSILSQKNKAGGITLPDFKLYYKATVTKTAWYWYQNRDIDQWNRTEPSEIMPHIYNYLIFDNPEKNKQWGKDSLFNKWCWENWLAICRKLKLDPFLTPYTKINSRWIKDLNVRPKTIKTLEENLGITIQDIGMGKDFMSKTPKAMATKAKIDKWDLIKLKSFCTAKETTIRVNRQPTTWEKIFTTYSSDKGLISRIYNELKQIYKKKTKNPIKKWAKDMNRHFSKEDIYAAKKHMKKCSSSLAIREMQIKTTMRYHLTPVRMAIIKN

SEQ ID NO: 50250 - protein, 968 aa, Homo sapiens; identical to SEQ ID NO: 36619
  DOMAIN (272)..(317): kw TRANSCRIPTASE REVERSE II ORF2 domain identified by eMATRIX, accession number DM01354N, p-value=1.000e-40, raw score of 13.17
  DOMAIN (356)..(634): Reverse transcriptase domain identified by PFam, accession name rvt, E-value=5.8e-38, PFam score of 139.6

SEQ ID NO: 50251 - protein, 1070 aa, Homo sapiens; identical to SEQ ID NO: 36416
  DOMAIN (154)..(195): kw TRANSCRIPTASE REVERSE II ORF2 domain identified by eMATRIX, accession number DM01354I, p-value=1.000e-40, raw score of 15.55
  DOMAIN (400)..(594): Reverse transcriptase domain identified by PFam, accession name rvt, E-value=8.6e-35, PFam score of 129.0

SEQ ID NO: 50252 - protein, 684 aa, Homo sapiens; identical to SEQ ID NO: 36629
  DOMAIN (259)..(304): kw TRANSCRIPTASE REVERSE II ORF2 domain identified by eMATRIX, accession number DM01354N, p-value=1.000e-40, raw score of 13.17
  DOMAIN (346)..(569): Reverse transcriptase domain identified by PFam, accession name rvt, E-value=2.8e-46, PFam score of 167.2

SEQ ID NO: 50253 - protein, 771 aa, Homo sapiens
  DOMAIN (37)..(83): kw TRANSCRIPTASE REVERSE II ORF2 domain identified by eMATRIX, accession number DM01354O, p-value=1.000e-40, raw score of 8.73
  DOMAIN (70)..(345): Reverse transcriptase domain identified by PFam, accession name rvt, E-value=5e-83, PFam score of 289.2
  misc_feature (1)...(771): Xaa = X or * as defined in Table 2
MDKFLDTYTLPRLNQEEVESLNRSITGSEIVAILNSLPTKKSPGPDGFTAEFYQRYKEELVPFLLKLFQSIEKEGILPNSFYEASIILIPKPGRDTSKKENFRPIPLMNIDAKILNKILAKRIQQHIKKLIHHDQVGFIPGMQGWFNIRKSINVIQHTNRAKDKNHMIISIDAEKAFDKIQQLFMLKTLNKLGIDGMYLKIRRAIYDKPTANIILNGQKLEAFPLKTGTRQGCPLSPLLFNIVLEVLARAIRQEKEIKGIQLGKEEVKLSLFADDMIVYLENPIVSAQNLLKLISNFSKVSGYKINVQKSQAFLYTNNRQTESQIMSELPFTLASKRIKYLGIQLTRDVKDLFKENYKPLLNEIKEDTNKWKNIPCSWVGRINIVKMAILPKVIYRLNAIPIKLPMPFFTELEKTTLKFIWNQKRARVAKSILSQKNKAGGITLPDFKLYYKAIVTKTAWYWYQNRDIDQWNRTEPSEITPHINNYLIFDKPDKNKQWGKDSLFNKWCWENGLAICRKLKLDPFLTPYTKINSRWIKDLNVRPKTRKTLEENLGITIQDIGMGKDFMSKTPKAMATKDKIDKWDLIKLKSFCTAKETTIRVNRQPTKWEKIFATYSSDKGLISRIYNELKQIYKKKTNNPIKKWAKDMNRHFSKEDIYAAKKHMKKCSSSLAIREMQIKTTMRYHLTPVRMAIIKKSGNNRLFTVAKTWIQPKCASMIHWMKKVXNIYTMKYNPAIKKEFTSFAAIWMELKATFLSKLMQEQKAKYCMFSL

SEQ ID NO: 50254 - protein, 894 aa, Homo sapiens; identical to SEQ ID NO: 38230
  DOMAIN (272)..(317): kw TRANSCRIPTASE REVERSE II ORF2 domain identified by eMATRIX, accession number DM01354N, p-value=1.000e-40, raw score of 13.17
  DOMAIN (203)..(434): Reverse transcriptase domain identified by PFam, accession name rvt, E-value=5.6e-06, PFam score of 15.2
  misc_feature (1)...(894): Xaa = X or * as defined in Table 2

SEQ ID NO: 50255 - protein, 834 aa, Homo sapiens; identical to SEQ ID NO: 33867
  DOMAIN (308)..(353): kw TRANSCRIPTASE REVERSE II ORF2 domain identified by eMATRIX, accession number DM01354N, p-value=1.000e-40, raw score of 13.17
  DOMAIN (376)..(651): Reverse transcriptase domain identified by PFam, accession name rvt, E-value=2.1e-78, PFam score of 273.9

SEQ ID NO: 50256 - protein, 704 aa, Homo sapiens
  DOMAIN (170)..(217): kw TRANSCRIPTASE REVERSE II ORF2 domain identified by eMATRIX, accession number DM01354V, p-value=1.000e-40, raw score of 12.97
  DOMAIN (1)..(183): Reverse transcriptase domain identified by PFam, accession name rvt, E-value=0.00014, PFam score of -4.6
MVEDEGKASSFFTRKRVRKSEYGTAKHFKSHQISLDWGKICFQLPPVVCRIHLLVVVGWKSPFSCWLFGAEECSQLLKATLLEVLAWAIRQEKEIKGIQLGKEEVQLSLFADDMIVYLENPIVSAQNLLKLISNFSKVSGYKINVQKSQAFLYTNNRQTESQIMSELPLTIASKRIKYLGIQLTRDVKDLFKENYKPLLNEIKDDTKKCMNIPCSWVGRINIVKMAILPKVIYTLNAIPIKLPMTFFTELEKTTLKFIWNQKRACIAKSIISQKKKAGDITLPDFKLYYKATVTRTAWYCYQNRDIGQWNRTEPSEITPHIYNYLIFDKPEKNKQWGKDSLFNKWCWENWLAICRKLKLDPFFTPYTKINSKWIKDLNVRPKTIKTLQENLGITIQDIGMGKDFMSKTPKAMATKAKIDKWDLIKLKSFCTAKETTIRVNRQPTKWEKIFASYSSDKGLISRIYNELKQIYKKKSNNPIKKWAKDMNRHFSKEYIYAAKKHMKKCSSSLAIREMQIKTTMRYHLTPVRMAIIKKSGNSKCWRGCGEIGTLLHCWWDCKLVQPLWKSLWRFLRHLELEIPFDPAIPLLGIYPKDCKSCCYKDTCALGSVQSKLPGGFVYTVRGKQPTQGSVMVDAPPPTKLEHLRSTSDCRAGSENFKSVGLSLLGSVWGSKRFCLAGVPGATGVQNKTPAAISVSAQTAAQFSA

SEQ ID NO: 50257 - protein, 794 aa, Homo sapiens
  DOMAIN (121)..(146): 7 kw REVERSE TRANSCRIPTASE RNA POLYMERASE domain identified by eMATRIX, accession number DM00895E, p-value=3.333e-11, raw score of 15.72
  DOMAIN (92)..(367): Reverse transcriptase domain identified by PFam, accession name rvt, E-value=3.1e-86, PFam score of 299.9
MALSTKREWPCIELDPHIQHTLHFINGNAKVIFRLNQEEVESLNRPITGSEIVAIINSLPTKKSPGPDGFTAEFYQRYKEELVPFLLKLFQSIEKEGILPNSFYEASIILIPKPGRDTTKKENFRPISLMNIDAKILNKILANRIQQHIKKLIHHDQVGFIPGMQGWFNIRKSINVIQHINRAKDKNHMIISIDAEKAFDKIQQPFMLKTLDKLGIDGTYFKIIRAIYDKPKANIILNGQKLEAFPLKTATRQGCPLSPLLFNIVLEVLARAIRQEKEIKGIQLGKEEVKLSLFADDMIVYLENPIVSAQNLLKLISNFSKVSGYKINVQKSQAFLYTNNRQTESQIMSELPFTIASKRIKYLGIQLTRDVKDLFKENYKPLLKEIKEDTNKWKNIPCSWVGRINIVKMAVLPKVIYRFDAIPIKLPMTFFTELEKTTLKFIWNQKRARIAKSILSQKNKAGGITLPDFKLYYKATVTKTAWYWYQNRDIDQWNRTEPSEIMPHIYNYLIFDKPEKNKQWGKDSLFNKWCWENWLAICRKLKLDPFLTPYTKINSRWIKDLNVRPKTIKTLEENLGITIQDIGVGKDFMSKTPKVMATKAKIDKWDLIKLKSFCTAKETTIRVNRQPTTWEKIFATYSSDKGLISRIYNELKQIYKKKTNNPIKKWAKDMNRHFSKEDIYAAKKHMKKCSSSLAIREMQIKTTMRYHLTPVRMAIIQKSGNNRDNTKEALLCNNLVAEVLEAKQAQKLQGKAAVLSLSKIYAITETNAETPNRKMKIKLKRPMTKLHPSIQMLV

SEQ ID NO: 50258 - protein, 914 aa, Homo sapiens; identical to SEQ ID NO: 44890
  DOMAIN (147)..(193): kw TRANSCRIPTASE REVERSE II ORF2 domain identified by eMATRIX, accession number DM01354O, p-value=1.000e-40, raw score of 8.73
  DOMAIN (180)..(455): Reverse transcriptase domain identified by PFam, accession name rvt, E-value=5.4e-85, PFam score of 295.8

SEQ ID NO: 50259 - protein, 750 aa, Homo sapiens; identical to SEQ ID NO: 39494
  DOMAIN (80)..(135): kw TRANSCRIPTASE REVERSE II ORF2 domain identified by eMATRIX, accession number DM01354Q, p-value=1.000e-40, raw score of 9.23
  DOMAIN (37)..(308): Reverse transcriptase domain identified by PFam, accession name rvt, E-value=3.1e-70, PFam score of 246.7

SEQ ID NO: 50260 - protein, 994 aa, Homo sapiens; identical to SEQ ID NO: 37827
  DOMAIN (87)..(133): kw TRANSCRIPTASE REVERSE II ORF2 domain identified by eMATRIX, accession number DM01354O, p-value=1.000e-40, raw score of 8.73
  DOMAIN (120)..(395): Reverse transcriptase domain identified by PFam, accession name rvt, E-value=1.4e-88, PFam score of 307.7

SEQ ID NO: 50261 - protein, 1597 aa, Homo sapiens; identical to SEQ ID NO: 34348
  DOMAIN (272)..(317): kw TRANSCRIPTASE REVERSE II ORF2 domain identified by eMATRIX, accession number DM01354N, p-value=1.000e-40, raw score of 13.17
  DOMAIN (1057)..(1423): Voltage gated chloride channels domain identified by PFam, accession name voltage_CLC, E-value=1.1e-169, PFam score of 576.2

SEQ ID NO: 50262 - protein, 833 aa, Homo sapiens
  DOMAIN (98)..(144): kw TRANSCRIPTASE REVERSE II ORF2 domain identified by eMATRIX, accession number DM01354O, p-value=1.000e-40, raw score of 8.73
  DOMAIN (133)..(406): Reverse transcriptase domain identified by PFam, accession name rvt, E-value=4.6e-83, PFam score of 289.4
MLNIGPHSLLACRVSAERSTVSLMVFPLRVTRPFSLAALNIFSFISTLVNLTIMCLENLEEMDTFLDTYTLPRLNQEEVESLNRPITGPEIVAIINSLPTKKSPGPDGFTAEFYQRYKEELVPFLLKLFQSIEKDGILPNSFYKASIILIPKPGRDTTKKENFRPISLMNIDAKILNKILANRIQQHIKKLIHHDQVGFIPGMQGWFNIRKSINVIQHINRAKDKNHVIIPIDAEKAFDKIQQPFMLKTLNKLGIDGMYFKIIRAIYDKPTANIILNGQKLEAFPLKTGTRQGCPLSPLLFNIVLEVLARAIRQEKEIKGIQLGKEEVKLSLFADDMIVYLENPIVSAQNLLKLISNFSKVSGYKINVQKSQAFLYTNNRQTESQIMSELPFTIASKSIKYLGIQLTRDVKDLFKENYKPLLKEIKEDTNKWKNIPCSWVGRINIVKMAILPKVIYRFNAIPIKLPMTFFTELEKTTLKFIWNQKRARIAKSILSQKNKAGGITLPDFKLYYRATVTKTAWYWYQNRDIDQWNRTEPSEITPHTYNYLIFDKPEKNKQWGKDSLFNKWCWESWLAICRKLKLDPFLTPYRKINSRWIKALNVRPKTIKTLEENLGITIQDIGMGKDFMSKTPKAMATKAKIDKWDLIKLKSFCTAKETTIRVNRQPKKWEKIFTTYSSDKGLISRIYNELKQIYKKKTNNPIKKWAKDMNRHFSKEDIYAAKKHMKKCSSSLATREMQIKTTMRYHLTPVRMAIIKKSGNNSQRGFYDSIKSPTKESYAAIKRNEIMSFAGYGWSWTLLSLATNTGTENQTLHIFTYKWELNNESTWIHEGMG

SEQ ID NO: 50263 - protein, 1086 aa, Homo sapiens
  DOMAIN (354)..(379): 7 kw REVERSE TRANSCRIPTASE RNA POLYMERASE domain identified by eMATRIX, accession number DM00895E, p-value=3.667e-11, raw score of 15.72
  DOMAIN (315)..(600): Reverse transcriptase domain identified by PFam, accession name rvt, E-value=2.8e-64, PFam score of 227.0
MWDVQEGQRPLCSAGQGIVGERGDEIREEAAVQSGDEGLWSMVRSVGLKPLDGTPHHTYSKIDHIVGSKTLLSKYKRTEIITDCLSDHSAIKLELRIKKLTQNRSTTWKLNNLLLNNYWVHNEMKAEIKMFFETNENKDTKNQNLWDTFKAVCRGKFIALNAHKRKQERSKIDTLTSQSKEVEKQEHTHSKASRRQEITKIRAQLKEIETQKTLQKINESRSWFFEQINKIDRLLARLIKKKREKNQIDTIKNDKGDITTDPTEIQTTIREYYKHLYANKLENLEEMDKFLDTYTLPRLNQEEVESLNRPITGSEIEAIINSLPTKKSPGPDGFIAEFYQRYKEELPGRDTTKKENFRPISLMNIDAKILSKILANRIQQHIKKLIHHDQVGFIHGMQGWFNIRKSINVIQHINRTKDKNHMIISIDAEKAFEKIQQPFMLKILNKLGIDGTYLKIIRAIYDKPTANIILNGQKLEAFPLKTGTRQGCPLSPLLFNIVWEVLTRAVRQEKGIKGIQLGIEEVKLSLFADDMIVYLENPIISAQNLLKLISNFSKVSRYKINVQKSQAFLYTNNRQTESQIMSELPFTIASKRIKYLGIQLTRDVKELFKENYKPLLNEIKEDTNKWKNIPCSWVGRINIVKMAILPKVIYRFNAIPIKLPMTSFTELEKTTLNFLWNHKRAHTAKSILSQKNKTGGIMLPDFKLYYKARVTKTAWYWYQNRDVDQWNRTEPSEIMLHIYNYLIFDKPEKNKQWGKDSLFNKWCWENWLAICRKLKLDPFLTPYTKINSRWIKDLNVRPKTIKTLEENLGNTIQDIGMGKDFMSKTPKAMATKTKIDKWDLIQLKSFFCTAKETTIRVNRQPTEWEKIFATYSSDKGLISRIYNELKQIYKKKTNNPIKKWTNDMNRHFSKEDIYAAKKHMKKCSSLPAIREMQIKTTMRYHLTPVRIAIIKKSGNNSKVDDIHAICSLLKDFLRNFKEPLLTFRLNKAFMEAAEITDEDNSISAMYQAVGELPQANRDTLVFLMIHLQRVAQSPYTKMNVANLAEVFGSTIVAHAVPNPEPVTMLQDIKCQPKVVERLPSLPLEYW

SEQ ID NO: 50264 - protein, 1218 aa, Homo sapiens; identical to SEQ ID NO: 36413
  DOMAIN (56)..(111): kw TRANSCRIPTASE REVERSE II ORF2 domain identified by eMATRIX, accession number DM01354Q, p-value=1.000e-40, raw score of 9.23
  DOMAIN (1)..(284): Reverse transcriptase domain identified by PFam, accession name rvt, E-value=8.2e-52, PFam score of 185.6

SEQ ID NO: 50265 - protein, 797 aa, Homo sapiens
  DOMAIN (25)..(70): kw TRANSCRIPTASE REVERSE II ORF2 domain identified by eMATRIX, accession number DM01354N, p-value=1.000e-40, raw score of 13.17
  DOMAIN (40)..(267): Reverse transcriptase domain identified by PFam, accession name rvt, E-value=3.2e-39, PFam score of 143.7
MDTIKNDKGDITTDPTEIQTTIREYYKHLYANKLENLEEMDKFLDTYTLPRLNQEEVESLNRPVRGSEIEAIINSLPTEKSPGPDGFTAKFYQRCRKAFDKIQQPFMLKTLNKLGIDGTYFKMIRAIYDKPTANIILNGQKLEAFPLKTGTRQGCPLSPLLFNIVLEVLARAIRQEKEIKGIQLGKEEVKLSLFADDMIVYLENPIVSAQNLLKLISNFSKVSGYKINVQKSQAFLYTNNRQTESQIMSELPFTIASKRIKYLGIQLTRDVKDLFKENYKPLLKEIKEDTNKWKNIPCSWVGRINIVKMAILPKVIYRFNAIPIKLPMTFFPELEKTTLKFIWNQKRALIAKSILSQKNKARSITLPDFELYYKATVTKTAWYWYQNRDIDQWNRTEPSEIMPHIYNYLIFDKPHKNKQWGKDSLFNKWCWEKWLTICRKLKLDPFLTPYTKINSRWIKDLHVRAKTIKTLEEKLGNTIQDIGMGKDFMSKPPKATAAKAKIDKWDLIKLKNFCTAKETTIRVNRQPTKWEKIFTTYSSDKGLISRIYNELQQIYKKKTNNPIKKWAKDMNRHFSKEDIYAAKKHMKKCSPSLAIREMQIKTTMRYHLTPVRMAIIKKSGNNRRHLAVSGDISGCHNLGRKVAGIEWVEGGDAAKHPARHRIIARNKELSQNANHAKLEKPCMRWWQELQGKQSEKGQRESQGQGGGGEELFREELTRKMTSEQKPAKGAAGSCCRYLQEEHHRTGNDKCEGPEGGTCWASSGKAGDQCGRGRVSKRRRSRNENLTGPRCVERQLVL

SEQ ID NO: 50266 - protein, 278 aa, Homo sapiens
  misc_feature (1)...(278): Xaa = X or * as defined in Table 2
LWICEVMVKQRSRILKICLQKQWQKTLAMWLKPCMGTFLLQLCXLDIAWVRAIAVHTASSNLVPSLLGLCMIDVVEGTAMDALNSMQNFLRGRPKTFKSLENAIEWSVKSGQIRNLESARVSMVGQVKQCEGITSPEGSKSIVEGIIEEEEEDEEGSESISKRKKEDDMETKKDHPYTWRIELAKTEKYWDGWFRGLSNLFLSCPIPKLLLLAGVDRLDKDLTIGQMQGKFQMQVLPQCGHAVHEDAPDKVAEAVATFLIRHRFAEPIGGFQCVFPGC

SEQ ID NO: 50267 - protein, 953 aa, Homo sapiens
  DOMAIN (233)..(279): kw TRANSCRIPTASE REVERSE II ORF2 domain identified by eMATRIX, accession number DM01354O, p-value=1.000e-40, raw score of 8.73
  DOMAIN (267)..(541): Reverse transcriptase domain identified by PFam, accession name rvt, E-value=2.6e-73, PFam score of 257.0
MADMLTWESCLEESLQEESPLVTHCGPSCCISGQSPPSSARPSSVSSAISVLMLPQNRKLPPAWTSPGIFPTDLVVYSMSLPHALARYNCDVCKSMLPPRLYAPEEKARTSPLCGTWYSPSLPLCGAWCKKNEKKRERERERKRQREDILSGASSYKDTIHIQLRPPPYDVLQQIQTTIREYFKHLYANKLENLEEMDKLLDTYTLPRLNQEEVESLNRLITGSEIVAIINSLPTKKSPRPDGFTAEFYQRYKEELVPFLLKLFQSIEKGGLLPNSFYEASIILMPKLGRDTTKKENFRPISLMNIDAKILNKILANQIQQHIKKLIQHDQVGFIPGMQGWFNICKSINVIQHINRTKDKNHMTISIDAGKAFDKIQQLFMLKTLNKLGIDGTYLKIIRAIYDKPTANIILNGEKLEAFPLKTGTRQGCPLSPLLFNIVLEVLARAIRQEKEIKGIRLRKEEVKLSLFADDMIVYLENPIISAQNLLKLISNFSKISGYKINVQKSQAFLYTNNRQTESQIMSELLFTIASKRIKYLRIQLTKDVKDLFKKNYKPLLNEIKEDTKKWKNIPCSWVGRINIVKMAIRPKVIYRFNAIPIKLPMTFFTELEKTTFKFIWNQKRARIAKSILSQKNKAGGITLPDFKLYYKATVTKTAWYWYQNKDIDQWNRTEPSEIMPHIYNYLIFDKPDKNKQWGKDSLFNKWGWENWLAICRKLKLDPFLTPYTKINSRWIKDLNVRPKTIKTLEKNLGITIQDIGMGKDFMSKTPKAMATKAKIDKWDLIKLKSFCTAKETTIRVNRQPTKWEKIFATYSSDKGLISRIYNELKQIYKKKTNNPIKKWVKDMNRHFSKEDICAAKKHMKKCSSSLAIREMQIKTTMRYHLTPVRMAIIKKSGNNRRTATLSLLPAIRHEREAFHQREEEKEGGRILLLQNRVILCSCSLCPHLSPASKPKH

SEQ ID NO: 50268 - protein, 985 aa, Homo sapiens; identical to SEQ ID NO: 40444
  DOMAIN (81)..(122): kw TRANSCRIPTASE REVERSE II ORF2 domain identified by eMATRIX, accession number DM01354I, p-value=1.000e-40, raw score of 15.55
  DOMAIN (327)..(577): Reverse transcriptase domain identified by PFam, accession name rvt, E-value=3.3e-77, PFam score of 269.9

SEQ ID NO: 50269 - protein, 1119 aa, Homo sapiens
  DOMAIN (454)..(499): kw TRANSCRIPTASE REVERSE II ORF2 domain identified by eMATRIX, accession number DM01354N, p-value=1.000e-40, raw score of 13.17
  DOMAIN (53)..(278): AP endonuclease family 1 domain identified by PFam, accession name AP_endonucleas1, E-value=1.5e-71, PFam score of 251.1
MNNSIKEKVKLSLTKWEMQTKPNNNTVDLKDAQEVNLTSTDYRKQHVMLPTEINSDDSLLKIGVIRLANWIKSQDPSVCCNQETHLTCRDTHRLKIKGWRKIYQANGKQKKAGVAILVSDKTDFKPTKIKRDKEGHYIMVKGSIQQEELTILNTYAPNTGAPRFIKQVLSDLQRDLDSYTLIMGDFNTPLSTLDRSTRQKVNKDTQELNSALHQVDLIDIYRTLHPKSTEYTFFSAPHHTYSKIDHILGSKALLSKCKRTEIITNYLSDHSAIKLELRIKNLIQKRSTTWKLNKLLLNDYWVHNELKAEIKMFFETNENKDTTYQNLWDAFKAVCRGKFIALNAHKRKQERSKIDTLTLQLKALEKQEQTHSKASRRQEITKIRAELKEIETQKTLQKINESRSWFFERINKIDKPLARLIKKKREKNQIDTIKNDRGDITTDPTEIQTTIREYYKHLYANKLENLEEMDKFLDTYTLPRLNQEEVESLNRPITGSEIVAIINSLPTKKSPGPDGFTAEFYQRYKQELHINRTKDKNHMIISIDAEKAFDKIQQRFMLKTLNKLGIDGAYFKIIRPIYDKPTANIILNGQKLEAFPLKTGTRQGCPLSPLLFNIVLEVLAKAIRQEKEIKGIQLGKEEVKLSLFADDMIVYLENPIVSAQNLLKLISNFSKVSGYKINVQNSQAFLYTNNRQTESQIMSELPFTVASKRIKYLGIQLTRDVKDLFKENYKPLLNEIKEDTNKWKNVPCSWVGRINIVKMAILPKVIYRFNAIPIKLPMTFFTELGKTTLKFIWNRKRAHIAKSILRQKNKAGGITLPDFKLYYKATVTKTAWYWYQNTDIDQWNRTEPSEITLHIYNYLIFDKPEKNKQWGKDSLFNKWCWENWLAICRKLKLDPFLTPYTKINSRWIKDLNFRPKTIKTLEENLGITIQDIGMGKDFISKTPKAMATKAKIDKWDLIKLKSFCTAKETTIRVNRQPTTWEKIFTTYSSDKGLISRIYNELKQIYKKKTNNPIKKWVKDMNRHFSKEDIYAAKKHMIKCSASLAIREMQIKTTMRYHLTPVRMAIIKKSGNNSVLKREGQRIDISTVSFPICLSVVHSLKNRYSLYNITEAALANVPRE

SEQ ID NO: 50270 - protein, 1042 aa, Homo sapiens; identical to SEQ ID NO: 40480
  DOMAIN (162)..(205): kw TRANSCRIPTASE REVERSE II ORF2 domain identified by eMATRIX, accession number DM01354T, p-value=1.000e-40, raw score of 9.48
  DOMAIN (48)..(284): Reverse transcriptase domain identified by PFam, accession name rvt, E-value=3.5e-44, PFam score of 160.2

SEQ ID NO: 50271 - protein, 797 aa, Homo sapiens
  DOMAIN (69)..(115): kw TRANSCRIPTASE REVERSE II ORF2 domain identified by eMATRIX, accession number DM01354O, p-value=1.000e-40, raw score of 8.73
  DOMAIN (104)..(377): Reverse transcriptase domain identified by PFam, accession name rvt, E-value=5.9e-86, PFam score of 299.0
MTLEGRWQQSQRSSTKQRDGTSFPMVEPTKTEEPFMSSLPPHPNQAAEWQSGRPRPKTGAEIVAITNSLPTKKSPGPDGFTAEFYQRYKEELVPFLLKLFQSVEKEGILPNSFYEASIILLPKPGRDKTKKENFRPISLMNIDAKILNKILANRIQQHIKKLIHHDQVGFVPGMQGWFNIRKSINAIQHINRTKDKNHMIISIDAEKAFDKIQQPFMLKTLNKLGIDGKYLKIIRAFYDKPTANIILNGQKLEAFPLKTGTRQGCPLSPLLFNIVLEVLDRAIRQEKEIKGIQLGKEEVKLSLFADDMIVYLENPIVSAQNLLKLISNFSKVSGYKINVQKSQAFLHTNNRQTESQIMSELPFTIASKRIKYLGIQITRDVKDLFKENYKPLLKEIKEDTNKWKNIPCSWVGRINIVKIAILPKIIYRLNAIPIKLLMTFFTELEKTTLKFIWNQKRARIAKSILSQKNKAGGITLPDFKLYYKPTVTKTAWYWHQNRAIEQWNRTEPSEITTHIYNYLTFDKPEKNKQWGKDSLFNKWCWENWLAICRKLKLDPFLTPYTKISSKWIKDLNVRPKTIKTQEENLGITIQDIGMGKDFMSKTQKAMATKAKIDKGDLIKLKSFCTAKETSSSVNRQPTKWEKIFATYSSDKGLISRIYNELKQIHKKKTNNPIKKWAKDMNRHFSKEDIYAAKKHMKNCSPSLAIREMQIKTTMRYHLTPLRMAIIKKSGNNSSLNNVMKGNDELGDSVSRFQKQTLSLKSAKIALCESLISCRERAKIVEKQTQALIMRVADLKQK

SEQ ID NO: 50272 - protein, 1130 aa, Homo sapiens
  DOMAIN (409)..(454): kw TRANSCRIPTASE REVERSE II ORF2 domain identified by eMATRIX, accession number DM01354N, p-value=1.000e-40, raw score of 13.17
  DOMAIN (5)..(238): AP endonuclease family 1 domain identified by PFam, accession name AP_endonucleas1, E-value=1.9e-76, PFam score of 267.4
  misc_feature (1)...(1130): Xaa = X or * as defined in Table 2
SNSHITILTLNVNGLNAPIKRHRLANWIKSQDPSVSCIQETHLTCRDTHRLKIKGWRKIYQANGKQKKSTVAILVSDKTDFKPTKIKRDKEGHYIMVKGXIQXEELTILNIYAPNTGAPRFIKQVLRDLQRDLDSHPIIMGDFNTPLSTLDRSMRQKVNKDIQDLNSALHQADLTDIYRTLHPKSTEYTFFSPPHHTYSKTDHIVGSKALVSKCKRTEIITNCLSDHSAIKLELRIKKLTQNRSTTWKLNNLLLNDYWVHNKMKAEINTLFETNENKDTTYQNLWDTFKAVCRGKFIALNAHKRKQERSKIDTLTSQLKELEKQEQTHSKASRRQEITKIRAKLKEIETQKILQKINESRSWFFEKINKIDRPLARPIKKKREKNQIDAIKNDKGDITTDPTEIQTTIREYYKHLYANKLENLEEMDKFLNTYTLPRLNQEEVESLNKPITGSEIEAIINSLPIKKSPGPDGFIAKFHQRYKEELEASIILIPKPGRDTTKKENFRPIPLMNIDAKILNKILANRIQQHIKKLIHHDQVGFIPGMQGSFNICKSINVIQDINRTNDKNHMIISIDAEKAFDKIQQPFILKTLNKLGIDGTYLKIIRAIYDKPTANIILNGQKLEAFPLKTGTRQGCPLSPLLFNIVLEVLARAIRQEKEIKGIQLGQEEVKLSLFADDMIVYRENPIVSTQNLHKLISNFSKVSGYKINVQKSQAFLYTNNRQTESQIMSELPFTIASKRIKYLGIQLTRDVKDLFKENYKPLLKEIKEDTNKWKNIPCSWVGRINIVKMAILPKVIYRFNAIPIKLPMTFFTELEKTTLKFIWNQKRARIAKSILSQRNKAGGITLPDFKLYYKATVTKTAWYWYQNRDIDQWNRTEPSEIMPHIYNHLIFDKPDKNKKWGNDSLFNKWCWENWLAICRRKLKLDPFLTPYTKINSRWIKDLNVRPKTIKTLEENLGNTIQDIGMGKDFMSTTPKAMATKAKIDKWDLIKLKSFCTAKETTITVNRQPTEWEKIFTIYPSDKGLISRIYKELKQIYKKRTNNPINKWVKDMNRHFSKEDIYTAKRHMKKCSSSLAIREMQIKTTLRYHLIPVRMAIIKKSGNNRNIRLCSYSGSHSRAWFLPPAGRHIQ

SEQ ID NO: 50273 - protein, 576 aa, Homo sapiens
  DOMAIN (163)..(209): kw TRANSCRIPTASE REVERSE II ORF2 domain identified by eMATRIX, accession number DM01354O, p-value=1.000e-40, raw score of 8.73
  DOMAIN (49)..(321): Reverse transcriptase domain identified by PFam, accession name rvt, E-value=1.9e-05, PFam score of 7.6
MPTRESRKVSKIDTLTSQLKELEKQERANSKASRRQEITKIRAELKEIETQKTLQKTNESRSWFFERINKIDRPLARLIKKKREKNQIQSIKNDKGDITTNATEIQTTIREYYKHLYAIKLENLEEMDKFPYTNTLPRLNEEEIESLNRTITGSEIEAIIKSLPTKKSPGPDGFTAKFYQRYKEELVPFLLKLFQSIEKEGILPNSFYEASIILIPKPVLEVLARAIRQEKEIKGIHLGKEEVKLSLFADDMIVHLENPIFSAQNLLKLISNFSKVSGYKINVQKSQAFLYTTNKQTESQIMSELPFTIASKRIKYLGIQLTRDVKDLFKENYKPLLNEIKKDTNKWKNIPCSWIGRINIVKMAILPKVIYRFNAIPIKLPMTFFTELEKTTLKFIWNQKRAHIAKTLLSKKNKAGGIMLPDFKLYYKATVTKTAWCWYQNRDIDQWNRTEPSEIIPHIYNNLIFDKPDKKKKWGKDSQFNKWCWENWLAICRKLKRDPFLTPYTKINSRWISNLNVRPKTIKILEENLGNTIQDIGIGKDFMSKTLKAMATKAKIDKWDLIKLKSFCTAKETTIR

SEQ ID NO: 50274 - protein, 1771 aa, Homo sapiens
  DOMAIN (294)..(339): kw TRANSCRIPTASE REVERSE II ORF2 domain identified by eMATRIX, accession number DM01354N, p-value=1.000e-40, raw score of 13.17
  DOMAIN (309)..(1216): Reverse transcriptase domain identified by PFam, accession name rvt, E-value=1.7e-88, PFam score of 307.4
  misc_feature (1)...(1771): Xaa = X or * as defined in Table 2
MVKGSIHQEELTILNIYAPNTGAPRFIKQVLSDLQRDLDFHTLIMGDFNTPLSTMDRSTRQKVNKDIQELNSALHQADLIDIYRTLHPKSTEYTFYSAPHHTYSKIDHILGSKALPSKCKRTDIITNYLSDHSAIKLELRIKNLTQNHSTTWKLNNLLLNDYWVHNEMKAEIKMFFETNENKDTTYENLWDAFKAVCRGKFIALNAHKRKQERSKIDTLTSQLKELEKQEQTHSKASRRQEITKIRAEQINKIDRPLARIIKKKREKNQIDTIKNDKGDVTTDPTGIQTTIREFYKNLYANKLENLEEMDKFLDTYTLPRLNQEEVESLNRPITGSEIVAIINSLPTKKSPGPDEFTAEFCQRYKAELHINRAKEKNHTIISIDAEKAFDKIQQPFMLKTLNKLGIDGTHFKIIRAIYDKPTANIILNGQKLEAFPLKTGTRQGCPLSPLLFNIVLEVLARAIRQEKEIKGIQLGKEEVKLSLFADDMIVYLGNPTVSAQNLLKLISNFSKVSGYKINVQKSQAFLHTNNRQTESQIMSELPFTIASKRIKYLGIQLTRDVKDLFKENYKPLLKEIKEDTNKWKNIPCSWVGRINIVKIGHNAQGNLQIQCHPHQATNAFLHRIGKNYFKVHMEPKKSPHRQVNPKPKEQSWRHHTTXLQTILQGYSNQNSMVLVPKQRYRPMEQNRALRNNAAYLQLSDLXQTXERQAMGKGFPFNKRCWENWLAICRKLKLDPFLTPYTKINSRWIKDLKVRPKTIKTLQENLGFTIQDIGMGKDFMSKTPTAMGTKDKIDKWDLIKLKSFCTAKETTIRVNRQPTKWEKIFTTYSSDNGLISRIYNELKQIYKKKTNNPIKQWAKDMNRHFSIEDIYAAKKHMKKCSSSLAIREMQIKTTMRYHLTPVRMAIIKKSGNNRNHLDFKHIRILGICYLARRFISHDYIWFQETENLKNYRLNKQQVFLIVSLLALKVVQICKYLRGPAYGTVSRPQLLKISIYRINSIEKTLNDLMELKTMVREIRDACTSFSSQFNQVEERNQRQIVSVDEEKAFDKIQQRFMLKTLNKLGIDGTYLKIIRAIYDKPTASIILNGQKLEAFPLKTGTRQGCPLSPLLFNIVLEVLARAIRQEKEIKSIQLGKEEVKLSLFADDMIVYLENPTVSAQNLLKLMSNFSKVSGYKINVQKSQAFLYTNNRQTESQIMSGLPFTITSKRITYLGIQLTRDVKDLFKENYKPLLKEIKEDTNKWKNIPCSWVGRINIVKMAILPKVIYRFNTIPIKLPMTFLTELEKTTLKFIWNQKRAHIAKSILSQKNKAGGIMLPDFKLYYKATVTKTAWYWYQNRDIDQWNRTEPSEIMPHIYYNYLIFDKPEKNKQWGKDTLFNKWCWENWLAICRKLKLDPFLTPYTKINSRWIKDLNVRPKTIKTLEENLGNTIQDIGMGKDFMSKTPEAMATKDKIDKWDLIQLKSFCTAKETTIRVNRQPTEWEEIFATYSSDKGLISRIYNELKQIYKKKTNNPIKKWAKDMNRHFSEEDIYAAKKHMKKCSSSLAIREMQIKTTMRYHLTPVRMVIIKKSGNNRCWRGCGEIGTLLHCWWDCKLVQPLWKSVWQFLRDLELEIPFDPAIPLLGIYPEDYKPCCYKDTCTRMFIAALFTIAKTWNQPKCPTMIDGIKKMWHIYTMEYYAAIKKDEFMSFVGTWMKLETIILSKLSQGQKTKHRMFSLIVRTLSCRSVGVYSKSTPDPVCLSISSSGCRTADISVSQMLLPDCSSGSFVSEEYPK

SEQ ID NO: 50275 - protein, 903 aa, Homo sapiens
  DOMAIN (194)..(235): kw TRANSCRIPTASE REVERSE II ORF2 domain identified by eMATRIX, accession number DM01354I, p-value=1.000e-40, raw score of 15.55
  DOMAIN (442)..(668): Reverse transcriptase domain identified by PFam, accession name rvt, E-value=1.5e-46, PFam score of 168.1
  misc_feature (1)...(903): Xaa = X or * as defined in Table 2
WRKIYQANGKQKKAGVAILVSDKTDFKPTKIKRDKEGHYIMVKGSIQQEELTILNIYAPNTGAPTFIQQVLSDLQRDLDSHTLIIGDFNTPLSTSDRSTRQKVNKDTQELNSALHQADLIDIYRTLHPKSTEYTFFSAPHHTYSKIDHILGSKALLSKCKRTEIITNYLSDHSAIKLELMIKNLTQNHSTIWKLNNLLLNDYWVHKEMKAEIKMFFETNENKDTTYQNLWDTFKAVCRGKFIALNAHKRKQERSKIDTLTSQLKELEKQEQTLSKASRRQEITKIRAELKEIETQKTLQKINESRSRFFERINKIDRXTLARVIKKKGEKNQIDTIKNDKGDITTDPTEIQTTIRESYKHLYANKLENLEEMDKFLDTYTLPRLNQEEVESLNRPITGSEIVAIVNSLPTKKSPGPDGFTAEFYQRYKEELVPFLLKLLQSIEKEGILPHSFYEASIILIPKPGRDTTKKENFRPISLMNIDAKILNKILANQIQQHIKKLIHHDQVGFIPGMQGWFNTCKSINVIQHINRTKDKNHMIISIDAEKAFDKIQQPFMLKTLNKLVLEVLARAIRQEKEIKGIQLGKEEVKLSLFADDMIVDLENPIVSAQNLLKLISNFSKVSGYKINVQKSQAFLYNNNRQTESQIMSELAFTIASKRIKYLGIQLTRDVKDLFNENYKPLLNEIQEDTNKWKNIPCSWVGRINIVKMAILPKVIYRFNAIPIKLPMTFFTELEKTTLKFIWKQKRARMAKSILSQKNKAGGITLPDFKLYYKATVTKTAWYWYQNRDIDQWNRTEPSEIMLHIYNYLIFDKPEKTKQWGKDSLFNKWCWENWLAIWRKLKLDPFLTPYTKINSRWIKDLNVRPKTIKTLEENLGISIQDIGMGKDFMSKTPKAMARKAKIDK

SEQ ID NO: 50276 - protein, 1486 aa, Homo sapiens
  DOMAIN (222)..(277): kw TRANSCRIPTASE REVERSE II ORF2 domain identified by eMATRIX, accession number DM01354Q, p-value=1.000e-40, raw score of 9.23
  DOMAIN (175)..(1092): Reverse transcriptase domain identified by PFam, accession name rvt, E-value=4.9e-166, PFam score of 565.0
  misc_feature (1)...(1486): Xaa = X or * as defined in Table 2
MVASRSSRVGVFYGGQNSVDGVSRRSDGSLNELCLYRPPTGAYLAYDTLDVLPSGQFTVNTPPIDVNGKSLLALLWEHTSLLTSMGGGRWAMQPLGQLGQLEHLGDRRDQVLDRSGRSRRLDAAQHLRHRPDRRPQGMVGVLTNQKEPRTRWIHSRILPEVQGGTGTVPSETIPIDRKEGILPNLFDEASIILIPKRGRDTTKKENFRPISLMNIDAKILNKILANRNQQHIKKLIHHDQVGFIPGMQGWFNICKSINVIQHINRTKDKNHMIISIDAEKAFDKIQQPFMLKTLNKLGIDGTYLKIIRAIYDKPTANIILNGQKLEAFPLKTGTRQGCPLSPLLFNIVLEVLARAIRQEKEIKGIQLGKEEVKLSLFADDMIVYLENPIVSAQNLLKLISNFSKVSAYKINVQKSQAFLYTNNRQTESQIMSVFPFTIASKRIKYLGIQLARNAKDLFKENYKPLLNEIKEDTKKWKNIPCSWVGRINIVKMAILPKVIYRFNAIPIKLPMTFFTELEKTTLKFIWNQKRARIAKSILSQKNKAGGITLPDFKLHYKITVTKTAWYWYQNRDIDQWNRTEPSEITPHIYNYLIFDKPEKNKQWGKDSLFNKWCWENWLAICRKLKLDPFLTPYTKIHPRWIKDLNVRPKTIKTLEENLGNTIQDIGMGKDFMSKTPKAMAAKAKIDKWDLIQLKSFCTAKETTIRVNRQPTKWEKIFATYSSDKGLISRIYKELKQIYKKKKTNNPIKKWAKDMNRHFSKEDTYAAKKHMKKCSASLAIREMQIKTTYHAGPDGFTAEFYQRYKEELVPFLLKLFQSIEKEGILPNSFYEASIILIPKPGRDTTKKENFRPISLMNIDAKILNKILAKRIQQHIKKLIHHDQVGFIPGMQGWFNICKSINVIQHINRTKDKNHMIISIDAEKAFDKIQQLFMLKTLNKLGIDGTYLKIIRAIYDKPTANIILNGQKLEAFPLKTGTRQGCPLSPLLFNIVWEVLARAMRQEKEIKGIQLGKEEVKLSLFADDMIVYLENPIVSAQNLLKLISNFSKVSGYKINVQKSQAFLYTNNRQTESQIMSELPFTTASKRIKYLGIQLTRDEKDLFKENYKPLLNEIKEDTKKWKNIPCSWVGRINIVKMAILPKVIYRFNAIPIKLPMTFFTELEKTTLKFIWYQKRARITKSILSQRNKAGDITLPDFKLYYKATVNKTAWYWHQNRHIDQWNRTKPSEITLHIYNYLFFDNPDKNKKWGKDSLFNKWCWENWLAICRKLKLDPFLTPYTKINSRWIKDLNIRPKTIKTLEENLGITIQDIGMGKYFMTKTPKAMATKAKIDKWDLIKLKSFCTGKETTIRVNRQPTKWEKIFATYSSDKGLISRIYNELKQIYKKKTNNPIKKWAKDMNRHFSKEDIYAAKKHMKKCSPSLAIREMQIKTTMRYHLTPTRLIVIGIEECLRGKEKLETLYYWNSDTDHQVXWLGWPXWKSDHKKEQPSF

SEQ ID NO: 50277 - protein, 1022 aa, Homo sapiens
  DOMAIN (10)..(65): kw TRANSCRIPTASE REVERSE II ORF2 domain identified by eMATRIX, accession number DM01354Q, p-value=1.000e-40, raw score of 9.23
  DOMAIN (348)..(631): Reverse transcriptase domain identified by PFam, accession name rvt, E-value=2e-39, PFam score of 144.4
  misc_feature (1)...(1022): Xaa = X or * as defined in Table 2
MNIDAKFLNKILAKRIQQHIKKLIHHDQVGFIPGMQGWFNIRKSINVIQHINRAKDKNHMIISIDAEKAFDKIQQPFMLKTLNKLELEETTVKFIWNQKRAHIAKSILSQKNKAGGITLRDFKLYYKATVTKTAWYWYQNRDIDQWNRTEPSEITLHIYNYLIFDKPEKNKQWGTDSLFNKWCWENWLAICRKLKLDPFLTPYTKINSRWIKDLNVRPKTIKTLEENLGITIQDIGMGKDFMSKTPKAMATKAKIDKWDLIKLKSFCTAKETTIRVNRQPTKWEKIFTTYSSDKGLISRIYNELKQIYKKKTNNPIKKWAKDMNRHFSEEDIYAAKKHMKKCSSSLAIREMQIKTTMRYHLTPVRMAIIKKSGNNRWDTTVMGCLSCPKPEADHMRAVASSWIQREVMEGLSDVASFATKLKNTLIQYHSIEEDKWRVAKKTHVNRTNDKNHVIISIDAEKASGKIQQPFMLKTLNKLGIDRTYLKIIRAIYDKPTDNIILNGQKLEAFPLKPGTRQGCPLSPLLFNIVLEVLARVIRQEKEIKGVQLGKEEVKLSLFADDMIVYLENPIVSPQNLLKLIGNFSKVSGYKINVQKSQAFLYTNKRQTESQIMSELPFTIASKRIKYLGIQLTRDVKDLFKENYKPLLKEIKEDTNKWKNIPCSWVGRINIMKMAILPKVIYRFNAIPIKLPMTFFTELDKTTLKFIWNQKRAHNSKSILSQKNKAGGITLPDFKLYYKATVTKTVWYWYQNRDIDQWNRTEPSEIMLLIYNYLIFDKPDKNKKWGKDSLFNKWCWENWLAICRKLKLDPFLTSYAKINSRWIKDLNVRPKTIKTLEENLGNTIQDIGMGKDFMSKTRKAMATKAKIDKWNLIKLKSFFTAKETTIRVNRQPTEWENIFAIYSSDKGLISRIYNELKQIYKKKTNNPIKKWEKDMNRHFSKEDIYAAKRHMKKCPSSLTIREMQIKTTMRYHLTPVRMAIIKKSGNNRCWRGCGETGTLSHCWWDCKLINHCGIFERLRTEDX

SEQ ID NO: 50278 - protein, 888 aa, Homo sapiens
  DOMAIN (316)..(361): kw TRANSCRIPTASE REVERSE II ORF2 domain identified by eMATRIX, accession number DM01354N, p-value=1.000e-40, raw score of 13.17
  DOMAIN (1)..(140): AP endonuclease family 1 domain identified by PFam, accession name AP_endonucleas1, E-value=2.5e-08, PFam score of 10.5
  misc_feature (1)...(888): Xaa = X or * as defined in Table 2
MVKGSIQQEELTILNIYAPNTGAPRFIKQVLSDLQRDLDSHTLIMGDFNTPLSTLDRSTRQKVNKDTQELNSALHQADLIDINRTLHPKSTEYTFFSAPHHTYSKIDHIVGSKALLSKCKRTEIITNYLSDHSAIKLELRIKNLTQSRSTPWKLNNLLLNDYWVHNEMKAEIKMFFETNKNKDTTYQNLWDAFKAVCRGKFIALNAYKRKQERSKIDTLTSQLKELEKQEQTHSKASRRQEITKIRAELKEIETQKTLQKINESRSWFFERINKIDRPLARLIKKKREKNQIDTIKNDKGDITTDPTEIQTTIREYYKHLYANKLENLEEMDTFLDTYTLPRLNQEEVESLNRPITGSEIVAIINSLPTKKSPGPDGFTAEFYPESYLXQTHSQYHTEWAKTGSIPFENWHKTGMPSLTAPIQHSVGSSGQGNQAGEGNKGYSIRKRGSQIVPVCRXHDCLSRKPHRLSPKSPXADKQLQQSLRIQNQCTKITSILIHQKQTNREPTHEXTPIHNCFKENKIPRNPTYKGCEGPLQGELQTTAQRNKRGHKQMEEHSMLMGRKNQYRENGHTAQGNLQIQCHPLQATNDFLHRIGKNYFKVHMEPKKSPHRQVNPKPKEQSWRHHTTXLQTILQGYSNQNSMVLVPKQRYRSMEQNRALRNNAAYLHYSDLXQTXEKQAWGKGIPIYKMALGKLASPMXEAETGSLPYTLYKNXFKLDXRLKRXTXTHKNPRRKPRHYHSGHRHGQGFHVXNTKSNGNKSQHXQMGSNXTKELLHSKRNYHQSEKATYKMGENFRNLLIXQRANIQNLQXTQTDLQEKNKQPHQKVGKGYEQTLLKRRHLCSQKTHEKMLIITGHQRNANQNHNEIPSHTSXNGNHXKVRKQQERQNS

SEQ ID NO: 50279 - protein, 1052 aa, Homo sapiens
  DOMAIN (110)..(151): kw TRANSCRIPTASE REVERSE II ORF2 domain identified by eMATRIX, accession number DM01354I, p-value=1.000e-40, raw score of 15.55
  DOMAIN (358)..(541): Reverse transcriptase domain identified by PFam, accession name rvt, E-value=2.7e-20, PFam score of 80.8
MGDFNTPLSTLDRSSRQKVNKDTQELNSTLHHADLIDIYRTLHPKSTEYTFFSAPHHTYSKIDHVVGSKALLSKCKRTEIITNCLSDHSAIKPELRIKKLTQNRSTTWKLNNLLLNDYWVHNKMKAEIKMFFETNENKDTTYQNLWDTFKAVSRGKFIALNAHKRKQKRCKIDTLASQLKEVEKQEQTHSKASRRQEITKIRAELKEIETQKTLQKISESWSWFFEKINKIDRPQARLIKKKREKNQIDTIKNDKGDITTDPTEIQITIREYYKHLYANKLENLEEMDKFLDTYTLPRLNQEEVESVNRPITGSEIEAITNSLPTKKSPGPDGFTAKFYQRYKEELVPFLLKLFQSIEKEGILLDSFYEASIILIPKPGRDTTKKENFRPISLMNIDVKILNKILADQIQQHIKKLIIHHDQVGFIPGMQGWFNILLEVLARAIRQEKEIKGIQLGKEKVKLSLFADDMIVYLENPIVSAPNLLKLISKFSKVSGYKINVQKSQAFLYTNNRQTESQIMSELPFTTASKRIKYLGIQLTRDVKDLFKENYKPLLNEIKEDTKKWKNIPCSWVGRINIVKMAILPKVIYRFNAIPIKLPMTFFTELEKTTLKFIWNQKRARLAKSILSQKNKAGGITLPDFKLYYKATVTKTAWYRYQNRDIDQWNRTEPSELMPHIYNYLIFDKPEKNKQWGKDSLFKNWCWENWLAICRKLKLDPFLTPYTKINSRWIKDLNVRPKTIKTLEENLGITIQDIGIGKDFMSKTPKAMAAKAKIDKWDLIKLKSFCTAKETTIRVNRQPTKWEKSFAIYSSDKGLISRIYNEHKQIYKKKTNNPIKKWAKDMNRCFSKEDIYAANRHMKKCSSSLAIREMQIKTTMRYHLTAVRMAIIKTSGNNRCWRGCGEIGTLLHCWWDCKLVHPLWKSVWRFLRDLELEIPFDPAILLLGIYPKDYKSCCYKDTCTHEKAEIQKSKGIRDYGEIGTRTEDMDSQFRPLSVVRAQIIPFEFPWEGIPLGGPFPRHSCSYPVGLALLYHSSSAAGPVRGHLSLQWNSRMTS

SEQ ID NO: 50280 - protein, 1254 aa, Homo sapiens
  DOMAIN (228)..(269): kw TRANSCRIPTASE REVERSE II ORF2 domain identified by eMATRIX, accession number DM01354I, p-value=1.000e-40, raw score of 15.55
  DOMAIN (457)..(727): Reverse transcriptase domain identified by PFam, accession name rvt, E-value=9.6e-74, PFam score of 258.4
HRLANWIKSQDPSVCCIQEAYLTCRDTHRLKIKGWRKIYQANGKQKKAGVAILVSDKTDFKPTKIKRDKEGLYIMVKGSIPREELTILNIYAPNPEAPRFTKQVLSDLQRDVDSHTIILGDFNTPLSALDRSMRQKVNKDTQELNSALHQADLIDIYRTLHPKSTEYTFFSAPHHTYSKIDHRVGSKALLSKCKRSEIITNCLSDHSAIKLELRIKKLTQNCSTTWKLNNLLLNDYWVHNEMKAEIKMFFETNENKDTTYHNLWDTFKAVCRGKFIALNAHKRKQERSKIDTLTSQLKELEKQEQTHSKASRRQEITKIRAELKEIETQKTLQKINESRSWFFKKINKIDRPLARLIKKKREKNQLDSIKNDKGDITTYPTEIQTTIREYYKHLYTNKLENLEKMDKFLDTYTLPRLNQEEVESLNRPITGSEIVALINSLPTKKSPGPDGFTAEFYQRYKEELIILIPKPGRDTTKKENFRPISLMNIDAKILNKILANRIQQHIKKLIHHDQVGFIPGMQGWLNICKSINVIQHINRAKDKNHMIISIDAEKAFDKIQQRFRLKTLNKLGIDGTYFKIIRAIYDKPTANIILNGQKLKAFPLKTGTRQGCPLSPLLFNIVLEALARAIRQEKEIKGIQLGKEEVKLSLFADDMIVCLENPIVSAQNLLKLISNFSKVSGYKINVQKSQAFLYTNNRQTESQIMSELPFTIASKRIKYLGIQLTRDVNDLFKENYKPLLKEIKEDTNKWKNIPCSWVGRINIMKMAIMPKVIYRFNAIPIKLPMTFFTELEKTTLKFIWNQKRARITKSILSQKNKAGGITLPDFKLYYKATVTKTAWYWYQNRDIDQWNRTEPSEITPHIYNYLIFDKPEKNKQWGKDSLFNKWCWENWLAIWRKLKLDPFLTPYAKINSRWIKDLNVRPKTIKTLEENLGNTIQDIGMGKDFMSKTPKAMATKDKIDKWDLIKLKSFCTAKETTIRVNRQPTKWEKIFATYSSDKGLISRIYNELKQIYKKKTNNPIKKWAKDMNRHFSKEDIYAAKKHMKKCSSSLAIREMQIKTTMRYHLTPVRMAIIKKTGNNRCWRGCGEIGTLLHCWWDCKLVQPLWKSVWRFLRDLELEIPFDPAIPLLGIYPNDYKSCCYKDTCTPGHPRKQPTLGSIPQKSQDHCAEVLKDILFLAGTGGAQALLASFSLSQDVEFPAPSAVILENYKQKTEMSTTYWQSLTGPAGKQENCSQSQPQDPKYTVWMWGFRSKKQ

SEQ ID NO: 50281 - protein, 2104 aa, Homo sapiens
  DOMAIN (1409)..(1434): 7 kw REVERSE TRANSCRIPTASE RNA POLYMERASE domain identified by eMATRIX, accession number DM00895E, p-value=3.333e-11, raw score of 15.72
  DOMAIN (611)..(1990): Reverse transcriptase domain identified by PFam, accession name rvt, E-value=1.6e-199, PFam score of 676.2
KLYVCITRITNAEKYLKELMELKAKAQELCEECRSLRSRHDQLEERVSVMEDQMNEMKQEEKFREKRRKRNEQSLQEIWDYVKRPNLRLIGVPESDGENGTKLENTLQDIIQKNFPNLARQANIYIQEIQEIQRTPQRYSPRRATPRHIIVRFTKVDMKEKMLRAVREKGFKPTKIRRDKEGHYIMVKGSIQQEELTILNIYAPNTGGPRFIKQVLSDLQRDLDSHTIIMGDFNTPLSTLDRSMRQKINKDIQELNSALHQVDLIDIYRTLQPKSTEYTFFSAPHHTYSQNWTTIVGSKALLSKCKRTEIITNYLSDHSAIKLKLRIKNLTQNHSTTWKLNNLLLNDYWVHNEMKAEIKKMFFETNENKDTTYQNFWDAFKAVCRGKFIAKNAHKRKQGRSKIDTLTSQLKELEKQEQTHSKASRRQEITKIRAELKEIETQKNLLQPFKKINESRSWFFERINKIDRPLARLIKKKREKNQIDAIKNDKGDITTTDPTEIQTTIREYYKHLYANKLENLEGMDKFLDTYTLPRLNQEEVESLNRPITGAEIVAIINSLPTKKESPGPDGFTAEFYQRYKEELVPFLLKLFQLIEKEGILPNSFYEASIILIPKPGRDTTKQKKNFRPISLMNIDAKILNKILANRIQQHIQKLIHHDQEGFIPGMQGWFNIHKSINVIQHINRTKDKNHMIISIDAEKAFDKIQQPFMLKTLNKLGIDGTYFKIIRAIYDKPTANIILNGQKLEAFPLKTGTRQGCPLSPHTTINIVLLPHSVLARAIRQEKEIKGIQLGKEEVKLSLFADDMIVYLENPIVSAQNLFKLISNFSKVSGYKINVQKSQAFLYTNNRQTESQIMSELPFTIASKRIKYLGIQLTRDVKELFKENYKPLLKEIKEDTNKWKNIPCSWVGGRINLVKMAILPKVIYRFNAIPPSRLPMTFFTELEKNYLLKVIWNQKRARIAKAILSQKNKAGGITLPDFKLYYKATVTKTAWHWYQNSMYWYQNRDIDQWNRTEPLRNKAHIPYNYLIFDKPLLEKNKQWGKDSLFNKWCWENWLAICRKLKLDPFLTPYTKINSRWIKDLNVRPKTIKTLEENLGITIQDIGMGKDFMSNKTPKAMATKSKIDKWDLIKLKSFCTAKETTTIRVNRQPTEWEKIFAIYSFDKGLISRIYKELKQIYKKKTKNNPIKKWAKDMNRHFSKEDIYAAKKHMKKCSSSLAIREMQIKTTMRYHLTPVRMAIIKKSGNNRSWYFEKINKIDRLLARLIKKKREKNQIDAIKNDKGDITTDPTEIQTTTREYYKHLYANKLENLEEMDKFLDTYNLPRLKQEEVESLNRPIRGSEIVAIINSLPTKKSPGPDGFTAEFYHRYKEELVPLLLKLFQSIEKEVILPNSFYEASIILIPKPDRDTAKKENFRPISLMNIDAKILNKILANRIQQHIKKLIHHDQVGFIPGMQGWFNIRKSVNVIQHINRTKDKNHMIISIDAEKSFDKIQQHFMLKTLNKLGIDGSYLKIIRATYDKPTANIILNGQKLEAFPLKTGTRHGCPLSPLLFNIVLEVLARAIRQEKEIKGIQLGKEEVKLSLFIDDMIVYLENPIISAQNLLKLISNFSKVSGYKINAQKSQAFLYTNNRQTESQIMSELPFTIASKRIKYLGIQLTMDVKDFFKENYKPMLNEIKEDTNKWKNIPCSWVGRINIVKMAILPKIHSRVTVLLRSDTVLHIVKLAVKIPTIVLLLEGSPRALRKHRQKPGSGSSRPRVRPSAVLASGLSQCSHSGGGNRGAYVTPPQALAEKAFDKIQQPFMLKTLNKLGIDGTYLKIIRAIYDKPTANIILNGQKLEAFPLKTGTRQGCPLSPLLFNIALEVLARAIRQEKEIKGIQFGKEEVKLSLFADDMIVYLENPIVSAQILLKLISNFSKVSGYKINVQKPQAFLHTNNRQTENQIMSELPFTIASKRIKYLGIQLTRDVKDLFKENYKPLLKEIKEDTNKWKNIPCSWVGRINIVKMAILPKVIYRFNAIPSKLPMTFFTELEKNTLKFIWNQKRARIAKSILSQKNKAGGITLPDFKLYYKATVTKTAWYWYQKQRYRSMEQNKALRNNAAYLQLSDP

SEQ ID NO: 50282 - protein, 1420 aa, Homo sapiens
  DOMAIN (527)..(552): 7 kw REVERSE TRANSCRIPTASE RNA POLYMERASE domain identified by eMATRIX, accession number DM00895E, p-value=3.897e-10, raw score of 15.72
  DOMAIN (7)..(247): AP endonuclease family 1 domain identified by PFam, accession name AP_endonucleas1, E-value=5.4e-71, PFam score of 249.3
  misc_feature (1)...(1420): Xaa = X or * as defined in Table 2
QDSNSHITILTLNINGLNAPIXRHDRNCNWIKSQDPSVCCIQETHLTCRDTHRLKIKGWRKIYQANGKQKKKAGVAILVSDKTDFNPTKIKRDKEGHYIMVKGSIQQEELTILNIYAPNTGAPRFIKQVLSDLQRDLDSHTLIMGDFNTPLSTLDRSRRQKVNKDTQELNSALHQADLIDIYRTLHPKSTEYTFFSAPHHTYSKIDHIVGSKALLSKCKRTGIITNYLSDHSAIKLELRIKNLTQSRSTTWKLNNLLLNDYWVYNEMKAEIKMFFETNENKDTTYQNLWDAFKAVCRGKFIALYAHWRKQERSKIDTLTSQLKELEKQEQTHSKASRRQEITKIRAELKEIETKKTLQKINESRSWFFERIKKTDRPLARLIKKKREKNQIDTIKNDKGDITTDLTEIQTTIREYYKHLYANKLENLEEMDKFLDTYTLPRLNQEEVESLNRPITGAEIVAIINSLPTMHSPGPDGFTAEFYQRYKEELVPFLLRLFQSIEGRGILPNSFYEASIILIPKPGRDTTKKENFRPISLMNIDAKIRNKILANRIQQHIKKLIHHDQVSFIPGMQGSFNIHKSINVIQHINRAKDKNHMVIFNRMQEKGLLTKIQQRFMLKTFNKFAIDGTYYFKIIRAIHDKPTANIILNGQKLEAFPLKTGTRQGCPLSPLPLLFNIVLEVLARAIRQEKEIKGIQLGKEEVKLSLFSDDMIVYLENPIVSAQNLLKLISNFSKVSGYKINVQKSQAFLYTNNRQTESQIMGELPFTIASKRIKYLGIQLTRDVKDLFKENYKLPLIKEIREDTNKWKNIPCSWIGRISIMKMAILPKVIYRFNAIPIKLPMTFFTELEKTTLKFIWNQKRSRIAKSILSQKNRAGGITLSDFKLYYKATVTKTAWYWYQNRDIDQWNRTEPSEIMPLIYNYLIFDKPDKNKQWGKDSLFNKWCWENWLAICRKLKLDPFLTPYTKINSRWIKDLNVRPKTIKTLEENLGNTIQDIGMGKDFMSKTPKANGQQKTKIDKWDLIXTKELLHICTAKETTIRVNRQPTKWKKIFTTYSSDKGLISRIYNELKQIYKKKTNNPIKKWTKDMNRHFSKEDIYAAKKHMKKCSTSLAIRVMQIKTTMRYHLTPVRMAIIKKSGSNRSQLQNIVQRTCSESNIKRRAGIEKGIQWAKDANCSQESPVRPSQQVGAPLGRSFQRKDQAAIFAVLQPLLVIPRQTRSGVDLQHIPAGLQQRGLTVRRKTNKQKGIASTSTKATSTQKPHPKVTNIKDQSIGSSGQGNQARETKRIQIGSQEVKLSLLEDDMIVHLENPIISAKNLLQLISNFTKVSGYKINVQKSQAFPYTNKTQIENQIMSELPFTIATKRIKYLGIKLTRDVKDLFKNNYKPLFKEIREDTNKWKNIPWMDRKNQYRENGHTAQSNL

SEQ ID NO: 50283 - protein, 58 aa, Homo sapiens
EKLRKFRFRKETDNAAIIMKVDKDRQMVVLEEEFQVFEIRTTDDLTEAWLQEKLSFFR

SEQ ID NO: 50284 - protein, 46 aa, Homo sapiens
  misc_feature (1)...(46): Xaa = X or * as defined in Table 2
MKVDKDRQMXVLEEEFQNISPEELKMELPERQPRLQRXTTDDVCRE

SEQ ID NO: 50285 - protein, 126 aa, Homo sapiens
  DOMAIN (17)..(123): Cofilin/tropomyosin-type actin-binding pr domain identified by PFam, accession name cofilin_ADF, E-value=4.3e-12, PFam score of 53.6
VDRTIMSDSLVVCEVDPELTEKLRKFRFRKETDNAAIIMKVDKDRQMVVLEEEFQFVVYSYKYVHDDGRVSYPLCFIFSSPVGCKPEQQMMYAGSKTRLVQTAELTKVQTGMWLQSVRERWCGSWV

SEQ ID NO: 50286 - protein, 178 aa, Homo sapiens
  misc_feature (1)...(178): Xaa = X or * as defined in Table 2
KTAELRKEEACGQNNHALPGSLRQSDSLVVCEVDPELTEKLRKFRFRKETDNAAIIMKVDKDRGQMVVLEEEFQNISPQRELKMGFPRRDKPRFVVYSYKYVHDDGRVSYPLCFIFPPRPVGCKPEQQMMYAGSKNRLVQTAELTKGVPKSRTTXLTSLRPWLQEKLSFLSLISGAGD

SEQ ID NO: 50287 - protein, 185 aa, Homo sapiens
WLDLTWKESSADSQLFLEKMDHSHHMGMSYMDSNSTMQPSHHHPTTSASHSHGGGDSSMMMMPMTFYFGFKNVELLFSGLVINTAGEMAGAFVAVFLLAMFYEGLKIARESLLRKSQVSIRYNSMPVPGQNGTILYGRTHKTVGQQMLSFPHLLQTVLHIIQVVISYFLMLIFMTYNGYLCIAVA

SEQ ID NO: 50288 - protein, 282 aa, Homo sapiens
  misc_feature (1)...(282): Xaa = X or * as defined in Table 2
MSQKMENLIGNAHISAYEIIKEFQKEQHQAGLPGTTVPCSCQVYKCSKRPERVAREGPSEDLEPLPQTVRKCGQGCTLHGAGGSQGQVGARPFGIGGVEALWFLASPSYWAPLIPQCQLGKLLVVRLVQLQARRELAPMLAPGAACPMVATACLTVQWPDPMLTHTPLTIPHLTCSLLGGNVELLFSSLVINTAGEMAGAFVAVIILAVFYEGLIAQESLLXPNGTILMXTHKTVGQQMLSFPHLLQTVLHIIQVVISYLLMLIFMTYNGSSELLFRGERPR

SEQ ID NO: 50289 - protein, 58 aa, Homo sapiens
  DOMAIN (7)..(58): Neuromodulin (GAP-43) proteins domain identified by eMATRIX, accession number BL00412D, p-value=7.648e-11, raw score of 16.54
DIAAYRAKGKPDAAKKGVVKAEKSKKKKEEEEDEEDEEDEEEEEDEEDEDEEEDDDDE

SEQ ID NO: 50290 - protein, 45 aa, Homo sapiens
LNMGKGDPKKPRGKMSSYAFFVQTCREEHKKKHPDASVNFSEFSK

SEQ ID NO: 50291 - protein, 233 aa, Homo sapiens
  DOMAIN (163)..(184): HIGH MOBILITY GROUP (HMG1/HMG2) PROTEIN SIGNATURE domain identified by eMATRIX, accession number PR00886E, p-value=1.672e- 12, raw score of 8.85
  misc_feature (1)...(233): Xaa = X or * as defined in Table 2
TWGKGDILRRPRRKMSSYSHFFVQTCRGGHKKKHPRLLQVNFSEFSKEVLQRGWRPMSCLKRKGKILKIWAKAGQGPFLERELKTLYPLPKGEDQKKKFKDPNCTPRGPPSAFFPLLALEYPPQKSKGEHPWPVPLVDVAEENWETMWELTLLQMDKQPYEKKAAKLKEKYEKDIACISSLKGKPDAAKKRELSRPEKSKKKKEEEEDEEDEEDEEEEEDEXDEEDEEEEEDE

SEQ ID NO: 50292 - protein, 137 aa, Homo sapiens
GAMRGDRGRGRGGRFGSRGGPGGGFRPFVPHIPFDFYLCEMAFPRVKPAPDETSFSEALLKRNQDLAPNSAEQASILSLVTKINNGNEKLVGSPGTLKAHIEKFTRGIPYKRGTVSRGHNVADLGGKLKILPPLEAV

SEQ ID NO: 50293 - protein, 452 aa, Homo sapiens
  misc_feature (1)...(452): Xaa = X or * as defined in Table 2
GAMRGDRGRGRGGRFGSRGGPGGGFKPFVPHIPSDFYLCEMAFPRVKPAPDETSFSXGLAXRRNQDLAPNSAEQASILSLVTKINNVIDNLTCGSQGHFEVAKLEEVRQVGDPIKRGTMTTGHNVAXLWVVIPQEFWQRLEAVACPGGNKVVESLRSHQDPSESFKPCLTNETGFEISSSDATVKILITTVPPNLRKLDPELHLDIKVLQSALAAIRHARWFEENASQSTVKVLIRLLKDLRIRFPGFEPLTPWILDLLGHYAVMNNPTRQPLGLKRWHNRALAWQISGLAGTVSCQGSVGYSIDPCESWQLXELHTVMTLEQQDMVCYTAQTFVRILPHGGFRKILGQEVDASYLASEISTWDGVIVTPFRKRLYEKPPEKKEGEEEEENTEEPTSRRGRRKHGNSGVTIPLPLLFPNPRGKTGALSCPAYWALHGDRHFPWDREDSRKKS

SEQ ID NO: 50294 - protein, 42 aa, Homo sapiens
QIEKDQPETPGSQEQIRKGLASAGLPAPSLSNTSFSLALSLK

SEQ ID NO: 50295 - protein, 260 aa, Homo sapiens
  misc_feature (1)...(260): Xaa = X or * as defined in Table 2
APRNYLPQRATASVRRQQISFSNEHTPHQSLHEIPNVRQRHSGLMKLNTMGAMTTSTTSAVANHXPSNKRTPLVSVMQSASPEQRQAVRERMQTNPKIQQRREAARERIQSASPEQRQAVREKMQTNPQNQQRRDAARERIQSASPEQRQVFKEKVQQRPLNQQQRDNARQRVQSASPEQRQVFREKVQESRPQRLNDSNHTVRLNNEQRSAVCERLSERGARRLESLYGRHMQANPEPPKKNNDKSKKISRKPLAAKNR

SEQ ID NO: 50296 - protein, 753 aa, Homo sapiens
  DOMAIN (198)..(599): N2,N2-dimethylguanosine tRNA methyltransfera domain identified by PFam, accession name TRM, E-value=7.2e-235, PFam score of 793.7
MSPDIPQVSPEVGLYPVANHSSIVVPTCHSLSEEDTEAQRNHELDTVKALREDAQVLKIPNQSPKDTLVTALQLAQKGTKAAAIRLGAKVGQKQSRQAKSSPALVVPGLLSFPRARFFEWQSPGLPNTAAMENGTGPYGEERPREVQETTVTEGAAKIAFPSANEVFYNPVQEFNRDLTCAVITEFARIQLGAKGIQIKVPGEKDTQKVVVDLSEQEEEKVELKESENLASGDQPRTAAVGEICEEGLHVLEGLAASGLRSIRFALEVPGLRSVVANDASTRAVDLIRRNVQLNDVAHLVQPSQADARMLMYQHQRVSERFDVIDLDPYGSPATFLDAAVQAVSEGGLLCVTCTDMAVLAGNSGETCYSKYGAMALKSRACHEMALRIVLHSLDLRANCYQRFVVPLLSISADFYVRVFVRVFTGQAKVKASASKQALVFQCVGCGAFHLQRLGKASGVPSGRAKFSAACGPPVTPECEHCGQRHQLGGPMWAEPIHDLDFVGRVLEAVSANPGRFHTSERIRGVLSVITEELPDVPLYYTLDQLSSTIHCNTPSLLQLRSALLHADFRVSLSHACKNAVKTDAPASALWDIMRCWEKECPVKRERLSETSPAFRILSVEPRLQANFTIREDANPSSRQRGLKRFQANPEANWGPRPRSRPGGKAADEAMEERRRLLQNKRKEPPEDVAQRAARLKTFPCKRFKEGTCQRGDQCCYSHSPPTPRVSADAAPDCPETSNQTPPGPGAAAGSGID

SEQ ID NO: 50297 - protein, 257 aa, Homo sapiens
  DOMAIN (204)..(232): Zinc finger C-x8-C-x5-C-x3-H type domain identified by PFam, accession name zf-CCCH, E-value=0.00028, PFam score of 20.9
  misc_feature (1)...(257): Xaa = X or * as defined in Table 2
PLRRWACNHKLRQNAHQLSSTIHCNTPSLLQLRSALLHADFRVSLSHACKNAVKTDAPASALWDIMRCWEKECPVKRERLSETSPAFRILSVEPRLQANFTIREDANPSSRQRGLKRFQANPEANWGPRPRARPGVSGGKVGVGLSQGKKGXRADGVPPTPSPSHRGKAADEAMEERRRLLQNKRKEPPEDVAQRAARLKTFPCKRFKEGTCQRGDQCCYSHSPPTPRVSADAAPDCPETSNQTPPGPGAAAGPGID

SEQ ID NO: 50298 - protein, 263 aa, Homo sapiens
  misc_feature (1)...(263): Xaa = X or * as defined in Table 2
MGPSSIHHSSQHATAPQILPKVRAGPRSSGCRISECRREEKPPKGRRGLKDATRPGVNWGPDGGVQSGAGAQPWSLTPLPPGSVSPAGRAQRRSMRAAAAQERSPGRRRLGKEPLIRESWTRSAPWRCLSQDAGRAGSQVCGSSPQTRGAAAEKVAVTGAKSCSGRGKKAAAARAKSRGGGGRKTQKAAAAKSRGCAGQRSPKSRGSRGXIPRGRGQKAAVAGAESNGGGGKKSRRRRHKAAKTRSSGGKNPWRQKAASAGAK

SEQ ID NO: 50299 - protein, 83 aa, Homo sapiens
MERIQYLFSGKSKPPKAPWFFSVCLAPSALYTRLPASKRGGGEQLGSSSEKFAQRERCQEAGIVAYREVGSSLTHTSWEMKEN

SEQ ID NO: 50300 - protein, 159 aa, Homo sapiens
  DOMAIN (69)..(84): WILM'S TUMOUR PROTEIN SIGNATURE domain identified by eMATRIX, accession number PR00049D, p-value=7.500e-10, raw score of 0.00
  misc_feature (1)...(159): Xaa = X or * as defined in Table 2
ANFSLEDPSCSPPPRLLAGSFVDSPQSLSCMRSKNPLLGSGSGPLSPTYILXATTPHFLLPQPLITTSPSSPSPPSPPLPPPPPSFSSSYSSSSFFENRVPLCCPCFGSAIRKPSPSVSTKARPQGETGRSLALLFLPQRPSSSLHRSDTLYRDCVHRI

SEQ ID NO: 50301 - protein, 103 aa, Homo sapiens
KIKLFNSLHLIGLFAVNKLATQGRAPCPGSGRSGCLRQRQGRHSCPVPQGMEGKGEGSILWYPPPLPRAQKPLPGSKGQGQGRLGSQMGGGGHPYLPPHSGTD

SEQ ID NO: 50302 - protein, 494 aa, Homo sapiens
MAQPNGHATSLFRAGASEENGLPHTSARTQLPQSMKIMHEIMYKLEVLYVLCVLLMGRQRNQVHRMIAEFKLIPGLNNLFDKLIWRKHSASALVLHGHNQNCDCSPPPQELSMEVVGPLLPLESMDFSTYCPSKARVDSVAIPRGRQELQTGKADCLLSSWRILPSTRRNKYLLLNNQELNELSAISLKANIPEVEAVLNTDRSLVCDGKRGLLTRLLQVMKKEPAESSFRFWQARAVESFLRGTTSYADQMFLLKRGLLEHILYCIVDSECKSRDVLQSYFDLLGELMKFNVDAFKRFNKYINTDAKVFLKQINSSLVDSNMLVRCVTLSLDRFENQVDMKVAEVLSECRLLAYISQVPTQMSFLFRLINIIHVQTLTQENVSCLNTSLVILMLARRKERLPLYLRLLQRMEHSKKYPGFLLNNFHNLLRFWQQHYLHKDKDSTCLENSSCISFSYWKETVSILLNPDRQSPSALVSYIEEPYMDIDRDFTEE

SEQ ID NO: 50303 - protein, 817 aa, Homo sapiens
  DOMAIN (76)..(105): MYOSIN HEAVY CHAIN SIGNATURE domain identified by eMATRIX, accession number PR00193D, p-value=3.647e-35, raw score of 14.36
  DOMAIN (1)..(146): Myosin head (motor domain) domain identified by PFam, accession name myosin_head, E-value=2.8e-100, PFam score of 346.6
ADKAAYLMGVSSGDLLKGLLHPRVRVGNEYVTKGQSVEQVVFAVGALAKATYDRLFRWLVSRINQTLDTKLPRQFFIGVLDIAGFEIFEFNSFEQLCINFTNEKLQQFFNQHMFVLEQEEYKREGIDWVFIDFGLDLQPCIDLIEKEERLKPSRKKITKKHTKKRTASLILHAMICCRSLNSSKTKNTKCLNSINQRLKIWSLQKDLMCGTAGRCKTLHGTSQLNTTAIHVVLALAGSPKDADDTSIYMFYQKHILYCIVDSECKSRDVLQSYFDLLGELMKFNVDAFKRFNKYINTDAKVFLKQINSSLVDSNMLVRCVTLSLDRFENQVDMKAALLSIPGFVERLCKLATRKVSESTGTASFLQELEEWYTWLDNALVLDALMRVANEESEHNQVFWFEQHGLVSGAEKAPGTTIDQAPRIYRWSDLTRTQAQWQSAMTWSMSAFTETFLTERDKQSKWSGIPQLLLKLHTTSHLHSDFVECQNILKPLLVIPRQTGSGVDLQQTLTDLQLRVLTVRRKTNKQKGHPHQNPICMSPSSKTKEAKNLDKRLDEWLTRINSIEKTLNDLMELNTMARKLRDACTSFSSQFDQVEERVSVIEDQMNEMKREEKFREKRIKRNKQSLQEIWDCVKRPNLRLIGVPESDGENGTKLENTLQDIIQENFPNLARQVNIQIQEIQRTPQRYSSRRGTPRHIIVRFTKVEIKEKILRAAREKGRVTHKGKPIRLTAVLLAETLQARREWGPIFNILKEKNFQPRVSYPAKLSFISEGEVKSFTDKQMLRDFVTTRPALQELLKEALNMERNNRYQLLQKHAKL

SEQ ID NO: 50304 - protein, 479 aa, Homo sapiens
ASEENGLPHTSARTQLPQSMKIMHEIMYKLEVLYVLCVLLMGRQRNQVHRMIAEFKLIPGLNNLFDKLIWRKHSASALVLHGHNQNCDCSPPPQELSMEVVGPLLPLESMDFSTYCPSKARVDSVAIPRGRQELQTGKADCLLSSWRILPSTRRNKYLLLNNQELNELSAISLKANIPEVEAVLNTDRSLVCDGKRGLLTRLLQVMKKEPAESSFRFWQARAVESFLRGTTSYADQMFLLKRGLLEHILYCIVDSECKSRDVLQSYFDLLGELMKFNVDAFKRFNKYINTDAKVFLKQINSSLVDSNMLVRCVTLSLDRFENQVDMKVAEVLSECRLLAYISQVPTQMSFLFRLINIIHVQTLTQENVSCLNTSLVILMLARRKERLPLYLRLLQRMEHSKKYPGFLLNNFHNLLRFWQQHYLHKDKDSTCLENSSCISFSYWKETVSILLNPDRQSPSALVSYIEEPYMDIDRDFTEE

SEQ ID NO: 50305 - protein, 767 aa, Homo sapiens
  DOMAIN (29)..(59): Flocculin repeat proteins domain identified by eMATRIX, accession number PF00624I, p-value=3.622e-09, raw score of 9.10
  misc_feature (1)...(767): Xaa = X or * as defined in Table 2
MAEGKGEAGTFFTGQQDRLLFVFFIITIVVGLFRCSVFSSSSSSSSLSSSSSSSSSSSLSSSFLHLFFIFIFVFFVFIFFVFIFVFVFAFFFIFFVFVVFFVFFFFVLLVEILMRPTISIRGQKLKISDEMSKDCLSILYNTCVCTEGVTKRLAEKNDFVIFLFTLMTSKKTFLQTATLIEDILGVKKEMIRLDEVPNLSSLVSNFDQQQLANFCRILAVTISEMDTGNDDKHTLLAKNAQQKKSLSLGPSAAEINQAALLSIPGFVERLCKLATRKVSESTGTASFLQELEEWYTWLDNALVLDALMRVANEESEHNQASIVFPPPGASEENGLAHTSARTQLPQSMKIMHEIMYKLEVLYVLCVLLMGRQRNQVHRMIAEFKLIPGLNNLFDKLIWRKHSASALVLHGHNHYCDCSPDITLKIQFLRLLQSFSDHHENKYLLLNNQELNELSAISLKANIPEVEAVLNTDRSLVCDGKRGLLTRLLQVMKKEPAESSFRFWQARAVEEFPSRGTTSYADQMFLLKRGLLEHILYCIVDSECKSRDVLQSYFDLLGELMKFNVDAFKRFNKYINTDAKFQVFLKQINSSLVDSNMLVRCVTLSLDRFENQVDMKVAEVLSECRLLAYISQVPTQMSFLFRLINIIHVQTLTQENVSCLNTSLVILMLARRKERLPLYLRLLQRMEHSKKYPGLLLNNFHNLLCFWQQHYLHKDKDSPCLXNTSCMSFSYWKETVSILLNPDRQSPSALVSYIEEPYMDIDRDFTEE

SEQ ID NO: 50306 - protein, 593 aa, Homo sapiens
  DOMAIN (568)..(590): ERM FAMILY SIGNATURE domain identified by eMATRIX, accession number PR00661H, p-value=2.688e-28, raw score of 11.24
  DOMAIN (234)..(593): Ezrin/radixin/moesin family domain identified by PFam, accession name ERM, E-value=1.4e-209, PFam score of 709.7
  misc_feature (1)...(593): Xaa = X or * as defined in Table 2
TSPTPLPLPATMPKTISVRVTTMDAELEFAIQPNTTGKQLFDQVVKTIWLEGKFGFFGLQNQDTKGFSTWLKLNRKVDXPRNVRKESPLLFKFRAKFYPEDVSEELIQDITQRLFFLQVKEGILNDDIYCPPETAVLLASYAVQSKYGDFNKEVHKSGYLAGDKLLPQRVLEQHKLNRDQWEERIQVWHEEHRGMLRGEDAVLEISERLLQDLEMYGVNYFSIKNKKGSELWLGVDALGLNIYEQNDRLTPKIGFPWSEIRNISFNDKKFVIKPIDKKAPDFVFYAPRLRINKRILALCMGNHELYMRRRKPDTIEVQQMKAQAREEKHQKQMERAMLENERKKREMAEKEKEKIEREKEELMERLKQIEEQTKKAQQELEEQTPRAPGTLSQERKRAQSEAEKLAKERQEAEEAKEALLQASRDQKKTQEQLALEMAELTARISQLEMARQKKESEAVEWQQKAQMVQEDLEKTRAELKTAMSTPHVAEPAENEQDEQDENGAEASADLRAXSMAKDRSEEERTTEAEKNERVQKHLKALTSELANARDESKKTANDMIHAENMRLGRDKYKTLRQIRQGNTKQRIDEFESM

SEQ ID NO: 50307 - protein, 736 aa, Homo sapiens
  DOMAIN (226)..(276): Annexins repeat proteins domain proteins domain identified by eMATRIX, accession number BL00223B, p-value=1.000e-40, raw score of 28.47
  DOMAIN (81)..(736): Annexin domain identified by PFam, accession name annexin, E- value=1.3e-93, PFam score of 324.4
  misc_feature (1)...(736): Xaa = X or * as defined in Table 2
PRVRLGAHGCPPGPRRCGCCWANGLRSSERCVLESLRPCVQSATRGLRCGCDSAANLDTMAKPPQGAGDRGSIHDFPGFDPNQDAEALYTAMKGFGSDKEAILDIITSRSNRQRQEGCHSYKSLYGKDLIADLKYELTGKFERLIVRLMRPPAYCDAKEIKDAISGIGTDEKCLIEILASRTNEQMHQLVKRITKMPTERDLEADIIGDTSGHFQKMLVVLLQGTREEDDVVSEDLVQQDVQDLYEAGELKWGTDEAQFIYILGNRSKQHLRLVFDEYLKTTGKPIEASIRGELSGDFEKLMLAVVKCIRSTPEYFAERLFKAMKGLGTRDNTLIRIMVSRSELDMLDIREIFRTKYXEKSLYSMDIKNDTSGQSYKKTLLKLSGGDDDAADQFFPKAAQVAYQMWELSAVARVELKGTVRPANDFNPDADAKALRKAMKGLGTDEDTIIDIITHRSNVQRQQIRQTFKSHFGRDLMTDLKSEISGDLARLILGLMMPPAHYDAKQLKKAMEGAGTDEKALIEILATRTNAEIRAINEAYKEDYHKSLEDALSSDTSGHFRRILISLATGHREEGGENLDQAREDAQVAAEILEIADTPSGDKTSLETRFMTILCTRSYPHVRRVIQEFIRLTNYDVEHTIKKEMSGDIRDAFVAIVQSAKTKPLFFPDKLYKSMKGAGTDEKTLTRIMVSRGEIDLLNIRRGIPIEKFDKSLHQAIXGXTTTGDFLKALRALCGG

SEQ ID NO: 50308 - protein, 121 aa, Homo sapiens
HYRARNSRVDDFVENAFIVFIASSLGHMLLTCILWRLTKKHTDRKSYSWKQRLFIINFISFFSALAVYFRHNMYCEAGVYTIFAILEYTVVLTNMAFHMTAWWDFRNKELLITSQPEEKRI

SEQ ID NO: 50309 - protein, 311 aa, Homo sapiens
MMKCEEQKEEEEETVRMFSAASQPLDPDGTLFRLRFTAMVWWAITFPVFGFFFCIIWSLVFHFEYTVATDCGVSASSPAPGSGPGPNYLPSVSSAIGGEVPQRYVWRFCIGLHSAPRFLVAFAYWNHYLSCTSPCSCYRPLCRLNFGLNVVENLALLVLTYVSSSEDFTIHENAFIVFIASSLGHMLLTCILWRLTKKHTVSQEVRSIPSGGSKAAQKKIKDICPQDSGNGEDRKSYSWKQRLFIINFISFFSALAVYFRHNMYCEAGVYTIFAILEYTVVLTNMAFHMTAWWDFGNKELLITSQPEEKRF

SEQ ID NO: 50310 - protein, 271 aa, Homo sapiens
  misc_feature (1)...(271): Xaa = X or * as defined in Table 2
ESLFPSLAFLSPSKPLFSHPPSFHLSNKQDTSPCSCVLSSPFSLRTEASIGVPGIKMDGGNAQEHGHFLRLPQVPNYLPSVSSAIAREVPQRYVWRFCIGLHSAPRFLVAFAYWNHYLSCTSPCSCYRPLCRLNFGLNVVENLALLVLTYVSSSEDFTWVPGXGRSGEVFPEGTGLPLPHSDLPTSWCGHSLQCGSQSSFPPAIHENAFIVFIASSLGHMLLTCILWRLTKKHTVSQEVRSIPSGGSKAAQKKIKDICPQDSGNGEVGTEF

SEQ ID NO: 50311 - protein, 68 aa, Homo sapiens
EKAAQMKSQVMTHLHVIEERRNQSLSLLYKVPYVAQEIQEEIGSGVGEQDGGLIGAEEKVINSKNKVD

SEQ ID NO: 50312 - protein, 74 aa, Homo sapiens
  DOMAIN (28)..(74): Amyloidogenic glycoprotein extracellular domain proteins domain identified by eMATRIX, accession number BL00319G, p-value= 1.000e-40, raw score of 16.93
MSSSALIGVLVIAVAIATVIVISLVMLRKRQYGTISHGIVEVDPMLTPEERHVNKMQNHGYENPTYKYLEQMQI

SEQ ID NO: 50313 - protein, 699 aa, Homo sapiens
  DOMAIN (672)..(695): AMYLOID A4 PROTEIN PRECURSOR SIGNATURE domain identified by eMATRIX, accession number PR00203D, p-value=2.895e-30, raw score of 13.57
  DOMAIN (42)..(204): Amyloid A4 extracellular domain identified by PFam, accession name A4_EXTRA, E-value=5.4e-121, PFam score of 415.4
  misc_feature (1)...(699): Xaa = X or * as defined in Table 2
MAATGTAAAAATGRLLLLLLVGLTAPALALAGYIEALAANAGTGFAVAEPQIAMFCGKLNMHVNIQTGKWEPDPTGTKSCFETKEEVLQYCQEMYPELQITNVMEANQRVSIDNWCRRDKKQCKSRFVTPFKCLVGEFVSDVLLVPEKCQFFHKERMEVCENHQHWHTVVKEACLTQGMTLYSYGMLLPCGVDQFHGTEYVCCPQTKIIGSVSKEEEEEDEEEEEEEDEEEDYDVYKSEFPTEADLEDFTEAAVDEDDEDEEEGEEVVEDRDYYYDTFKGDDYNEENPTEPGSDGTMSDKEITHDVKVPPTPLPTNDVDVYFETSADDNEHARFQKAKEQLEIRHRNRMDRVKKEWEEAELQAKNLPKAERQTLIQHFQAMVKALEKEAASEKQQLVETHLARVEAMLNDRRRMALENYLAALQSDPPRPHRILQALRRYVRAENKDRLHTIRHYQHVLAVDPEKAAQMKSQVMTHLHVIEERRNQSLSLLYKVPYVAQEIQEEIDDVLQEQRADMDQFTASISETPVDVRVSSDESEEIPPFHPFHPFPAPTXERRILGVGRAGWGGLIGAEEKVINSKNKVDENMVHXTRLLDVKEMIFNAERVGGLEEERESVGPLREDFSLSSSALIGLLVIAVAIATVIVISLVMLRKRQYGTISHGIVEVVDPMLTPEERHLNKMQNHGYENPTYKYLEQMQI

SEQ ID NO: 50314 - protein, 841 aa, Homo sapiens
  DOMAIN (335)..(379): Pancreatic trypsin inhibitor (Kunitz) family proteins domain identified by eMATRIX, accession number BL00280, p-value=3.833e-20, raw score of 24.61
  DOMAIN (354)..(405): Kunitz/Bovine pancreatic trypsin inhibito domain identified by PFam, accession name Kunitz_BPTI, E-value=1.4e-25, PFam score of 82.3
  misc_feature (1)...(841): Xaa = X or * as defined in Table 2
SQPAEGKWSTGNAATATAGVLLLPAACGAXTAPALALAGYIEALAANAGTGFAVAEPSNSPMFCGKLNMPCETFQTGKWEPDPNQAPKSCFXNQKEEVSSSYFQEMYPRAYRSQNVMEAKPAGLRIDNWCRRDKKQCKSRFCYTFSSCLVGXILXSDVPAKFPEKVPSFFHKERMEVCENHQHWHTVSQKKAMSXPPGKXPLIIANGMPASPCGGRTSFHGTEYVCXPSAQRLLGSCVTKEEEEEEEEKEEEEDEKGDYAVYKGNFLLXADLEDSTEAAVDEDDEDEREGEDVVEDREYYYDTFKGDDYNEENPNDPGSAATMSDKEITHDVKAVCSQEAMTGPCRAVMPLWYFYLSKGKCVRFIYGGCGGNRNNFXSEDYCMAVCKAMIPPTPLSTNDDDVFFXTSKDDNEHARFHKAKEHVVIRPRNRMDRLKXEWXYAQLQLKNLPKAERQTLIQHFQAMVKALEKEAASEKQQLVETHTLARVEAMLNDRCLMALENYLAALQSDPPRPHRILQALRRYVRAENKDRLHTIRHYQHVLAVDPEKAAQMKSQVMTHLHVIEERRNQSLSLLYKVPYVAQEIQEEIDELLQEQRADMDQFTASISETPVDVRVSSEGRGEIPPFHPFHPFPALPENEDTQPVLYHPMKKGSGVGEQDGGLIVAEEKVINSKNKVDETLVIDETLDVKEMIFNAKRVGGLEEERESVGPLREVFSLDSSALIDLLVITVAIATGHPSSAWVMLRKSKYGTISHGIVEVDPMLTPEERHLNKMQNHGYENPTYKYLEQDARFRWQVARHALAEGMQVGRKIPHDSQSTAKRAAAARGCVLDILTSWTCRTI

SEQ ID NO: 50315 - protein, 105 aa, Homo sapiens
  misc_feature (1)...(105): Xaa = X or * as defined in Table 2
CCPPGGTGRCLGTCGYHNCGCSIXSSDLPQRCCVSGRRXTFWMVWSACVCASGCLPGGNRCCCPVSLSPERIAVLGGLLPRKPPCRVVGERRSVLTLQATSQCPR

SEQ ID NO: 50316 - protein, 389 aa, Homo sapiens
  DOMAIN (55)..(88): PROLINE-RICH PROTEIN 3 domain identified by eMATRIX, accession number DM00215, p-value=7.706e-11, raw score of 19.43
  DOMAIN (223)..(319): Eukaryotic protein kinase domain identified by PFam, accession name pkinase, E-value=4.1e-12, PFam score of 47.6
SVWWNSMQNILAVLLSQLMKTQEPAGSLEENNSDKNSGPQGPRRTPTMPQEEAAEKRPPEPPGPPPPPPPPPLVEGDLSSAPQELNPAVTAALLQLLSQPEAEPPGHLPHEHQALRPMEYSTRPRPNRTYGNTDGPETGFSAIDTDERNSGPALTESLVQTLVKNRTFSGSLSHLGESSSYQGTGASLIPAIQTAHAAAQKANQFTSDATIWHFTAPYKMQRCILGELFTKKPIFQANLELAQLELISRLCGSPCPAVWPDVIKLPYFNTMKPKKQYRRRLREEFSFIPSAALDLLDHMLTLDPSKRCTAEQTLQSDFLKDVELSKMAPPERVVLGTMPHPADTDPEWNNQEWHSAGVNIKEIRFLIPNQGHIHKIIIFLPNHKVWAEP

SEQ ID NO: 50317 - protein, 1223 aa, Homo sapiens
  DOMAIN (653)..(684): Protein kinases ATP-binding region proteins domain identified by eMATRIX, accession number BL00107A, p-value=6.786e-24, raw score of 18.39
  DOMAIN (531)..(825): Eukaryotic protein kinase domain identified by PFam, accession name pkinase, E-value=5.4e-93, PFam score of 322.4
  misc_feature (1)...(1223): Xaa = X or * as defined in Table 2
SRRRSSSYERSGSYSGRSPSPYGRRRSSSPFLSKRSLSRSPLPSRKSMKSRSRSPAYSRHSSSHSKKKRSSSRSRHSSISPVRLPLNSSLGAELSRKKKERAAAAAAAKMDGKESSYERSGSYSGRSPSPYGRRRSSSPFLSKRSLSRSPLPSRKSMKSRSRSPAYSRHSSSHSKKKRSSSRSRHSSISPVRLPLNSSLGAELSRKKKERAAAAAAAKMDGKESKGSPVFLPRKENSSVEAKDSGLESKKLPRSVKLEKSAPDTELVNVTHLNTEVKNSSDTGKVKLDENSEKHLVKDLKAQGTRDSKPIALKEEIVTPKETETSEKETPPPLPTIASPPPPLPTTTPPPQTPPLPPLPPIPALPQQPPLPPSQPAFSQVPASSTSTLPPSTHSKTSAVSSQANSQPPVQVSVKTQVSVTAAIPHLKTSTLPPLPLPPLLPGDDDMDSPKETLPSKPVKKEKEQRTRHLLTDLPLPPELPGGDLSPPDSPEPKAITPPQQPYKKRPKICCPRYGERRQTESDWGKRCVDKFDIIGIIGEGTYGQVYKAKDKDTGELVALKKVRLDNEKEGFPITAIREIKILRQLIHRSVVNMKEIVTDKQDALDFKKDKGAFYLVFEYMDHDLMGLLESGLVHFSEDHIKSFMKQLMEGLEYCHKKNFLHRDIKCSNILLNNSGQIKLADFGLARLYNSEESRPYTNKVITLWYRPPELLLGXERYTPAIDVWSCGCILGELFTKKPIFQANLELAQLELISRLCGSPCPAVWPDVIKLPYFNTMKPKKQYRRRLREEFSFIPSAALDLLDHMLTLDPSKRCTAEQTLQSDFLKDVELSKMAPPDLPHWQDCHELWSKKRRRQRQSGVVVEEPPPSKTSRKETTSGTSTEPVKNSSPAPPQPAPGKVESGAGDAIGLADITQQLNQSELAVLLNLLQSQTDLSIPQMAQLLNIHSNPEMQQQLEALNQSISALTEATSQQQDSETMAPEESLKEAPSAPVILPSAEQTTLEASSTPADMQNILAVLLSQLMKTQEPAGSLEENNSDKNSGPQGPRRTPTMPQEEAAGSREYSPKGLAVPGFCVPLLQSPGRSSSSSSPDIFRIKQPVLHLVRGKGKPNSERHGGKKDGSGGASGTLQPSSGGGTSNSRERHRLVSKHKRHKSKHSKDMGLVTPEAASLGTVIKPLVEYDDISSDSDTYTDDKAFKLDRRENDERRGSNRSDRLHKHRHHQHR

SEQ ID NO: 50318 - protein, 194 aa, Homo sapiens
  misc_feature (1)...(194): Xaa = X or * as defined in Table 2
LGLQAANDLHLEYAMGKRYFCDYCDRSFQDNLHNRKKHLNGLQHLKAKKVWYDMFRDAAAILLDEQNKRPCRKFLLTGQRDFGSNCRFSHMSERDLKELSIQVEEGRGEPREWLLDAPELPEGHLGGLGLEERRAKRLELQPQVSQGXNPFRTTVSFQXPRRVGQPSSGSLPPNSCGHPPPGGLALLQPRVQWG

SEQ ID NO: 50319 - protein, 138 aa, Homo sapiens
QLNAELRSRGWGQQDGPGPPSPGKSPSPCRTSPSPDSLGLPEDPCLGPRNEGRRAVSVHEDQLQAPAERPLRLQRSPVLKRRPKLEAPPSPSLGSGLGTEPLPPQPTEPSSPERSPPSPATDQTRRRPQSLILSSPAA

SEQ ID NO: 50320 - protein, 378 aa, Homo sapiens
  misc_feature (1)...(378): Xaa = X or * as defined in Table 2
ATTARRRGAPGTPSLAAEGNGLSARVDEGVEEFFSKRLIQQDRLWAPEEDPATEGGATPVPRTLRKKLGTLFAFKKPRSTRGPRTDLETSPGAAPRTRKTTFGDLLRPPTRPSRGEELGGAEGDTSSPDPAGRSRPPTQEIARPTRXYCCLPRRRQRWVPDPTSGGPWSGEKQNWLHPLNSGYKXCCRGXASAEAAGVPKARGSKAKMARSRKLAQMVTLWTVPRRPLPSRSSPAPTPVSADPSCRPGPGSQGPESATWKTLGQQLNAELRSRGWGQQDGPGPPSPGQSPSPCRTSPSPDSLGLPEDPCLGPRNEERPLRLQRSPVLKRRPKLEAPPSPSLGSGLGTEPLPPQPTEPSSPERSPPSPATDQRGGGPNP

SEQ ID NO: 50321 - protein, 67 aa, Homo sapiens
  DOMAIN (21)..(60): tRNA synthetases class II domain identified by eMATRIX, accession number PF00152D, p-value=2.161e-29, raw score of 21.30
  DOMAIN (36)..(53): tRNA synthetases class II (F) domain identified by PFam, accession name tRNA-synt_2d, E-value=0.023, PFam score of 12.4
PQLLTERALHHLIDLEKIKAYIDSFRFGAPPHAGGGIGLERVTMLFLGLHNVRQTSMFPRDPKRLTP

SEQ ID NO: 50322 - protein, 115 aa, Homo sapiens
  DOMAIN (35)..(58): tRNA synthetases class II domain identified by eMATRIX, accession number PF00152A, p-value=5.891e-10, raw score of 19.68
KERYGISSMIQSQEKPDRVLVRVRDLTIQKADEVVWVRARVHTSRAKGRIGFIIKALSLVFPLLNREKFKKSGEAAEWGGRGKPNRMCLKEPGKKEKSVKQNASEELALCVWNTN

SEQ ID NO: 50323 - protein, 128 aa, Homo sapiens
RVCGYSRAELKGGSLRGRVVSTAQFRVPMPSASASRKSQEKPREIMDAAEVGFLLSWAWEDRPLGRAAPREGGGGVGPYRSLSARSPQPRGRGVRAPPALAPAVGQDTLRTEFLAGVTWSGRLITSPT

SEQ ID NO: 50324 - protein, 384 aa, Homo sapiens
  DOMAIN (94)..(131): tRNA synthetases class II domain identified by eMATRIX, accession number PF00152C, p-value=1.918e-16, raw score of 28.03
  DOMAIN (69)..(296): tRNA synthetases class II (D, K and N) domain identified by PFam, accession name tRNA-synt_2, E-value=4.2e-28, PFam score of 106.8
MVKFAANINKESIVDVEGVVRKVNQKIGSCTQQDVELHVQKIYVISLAEPRLPLQLDDAVRPEAEGEETSTSQAVFRLQSGICHLFRETLINKGFLYKQMCICADFEKVFSIGPVFRAGELYTHRHLPEFVGLDIEMAFNYHYHEVMEEIADTMVQIFKGLQERFQTEIQTVNKQFPCEPFKFLEPTLRLEYCEALAMLREAGVEMGDEDDLSTPNEKLLGHLVKEKYDTDFYILDKYPLAVRPFYTMPDPRNPIYVISLAEPRLPLQLDDAVRPEAEGEEEGRATVNQDTRLDNRVIDLRTSTSQAVFRLQSGICHLFRETLINKGFVEIQTPKIISAASEGGANVFTVSYFKNNAYLAQSPQLYKQMCICADFEKVFSIWTS

SEQ ID NO: 50325 - protein, 550 aa, Homo sapiens
  DOMAIN (288)..(325): tRNA synthetases class II domain identified by eMATRIX, accession number PF00152C, p-value=5.500e-30, raw score of 28.03
  DOMAIN (215)..(550): tRNA synthetases class II (D, K and N) domain identified by PFam, accession name tRNA-synt_2, E-value=1.1e-84, PFam score of 294.7
  misc_feature (1)...(550): Xaa = X or * as defined in Table 2
LRPQGREGGDWEGGRSPFSLPYGSLRGRVVSTAQFRVPMPSASASRKSQEKPREIMDAAEDYAKERYGISSMIQSQEKPDRVLVRVRDLTIQKADEVVWVRARVHTSRAKGKQCFLILRQQQFNVQALVAVGDHASKQMVKFAANINKESIVDVEGVVRKVNQKIGSCTQQDVELHVQKIYVISLAEPRLPLQLDDAVRPEAEGEEEGRATVNQDTRLDNRVIDLRTSTSQAVFRLQSGICHPLRETLINKGFVEIQTPKIISAASEGGANVFTVSYFKNNAYLAQSPQLYKQMCICADFEKVFSIGPVFRAEDSNTHRHLTEFVGLDIEMAFNYHYHEVMEEIADTMVQIFKGLQERFQTEFQTVNKQFPCEAISNFWEPTLRLEYCEALAMLRGKLESEMGDEDDLSTPNEKLLGHLVKEKYDTDFYILDKYPIGLXRPFHLYPCPXPPRNPQQVPTLTNMFHEREKKYLSGAQRIHDPQLLTERALHHGIDLEKIKAYIDSFRFGSPSPHAGGGIGIENRVTMLFLGLHNVRQTSHVPSVIPNRLTP

SEQ ID NO: 50326 - protein, 140 aa, Homo sapiens
DAWADAWADACSDAWEALRFLENEHHELQAKIECLQGDRDLCSLHTQDLQDQLKRSEAEKLTLVTRVQQLQGLLQNQSLQLQEQEKLLTKKDQALPVWSPKSFPNEVEPEGTGKEKAWDLRDQLQKKTLQLQAKEKEVRG

SEQ ID NO: 50327 - protein, 227 aa, Homo sapiens
GTIHVLVGLDGTICVWAKESRLGTNINPDRSRHLFQELEAKRNRCLEVIMISPDPRPSPGLARWAEGYEAKCERRQEIRESRRCRPNVTTCRQVGKTLRIQQREQLQRARLQQFFRRRNLELEEKGKAQHPQAREQGPSRRPGQVTVLKEPLSCARRISSPREQVTGTSSEVFPAQHPPPSGICRDLSDHLSSQAGGLPPQDTPIKKPPKHHRGTQTKAEGPTIKND

SEQ ID NO: 50328 - protein, 96 aa, Homo sapiens
MRQNSPKNPSALPKPSGEFPTWFMNLVPYYSSLSREIPGSSWHGISDQKEWSRSELVIIHFFLAQSLPPWMILQGTFLLWSCLHMDHSQKLPSWLV

SEQ ID NO: 50329 - protein, 519 aa, Homo sapiens
  misc_feature (1)...(519): Xaa = X or * as defined in Table 2
PTNPRPSPGLARWAESYEAKCERRQEIRESRRCRPNVTTCRQVGKTLRIQQREQLQRARLQQFFRRRNLELEEKGKAQHPQAREQGPSRRPGQVTVLKEPLSCARRISSPREQVGRVKGHTAVCSGTLSGQGGWVRRPPSLHRACRESXDNCPSSLALTLSHPIHSSLERTQXISHALTFWNSMIYPRSSRLILPQASDSSWKGKGMKFFLNKAWASMCSHLIFLSTGKHSEGYFHLRNLELNEKNVFEPKAKESLQKVLEEKMNAEQQLQSTQVWGCHIDMGLGTPGSLGNKGSQLQRTLGTQHRELESQLHVLQSKLQVPGTGGGEGRQGMGRRDGDERSCSAKIECLQGDRDLCSLDTQDLQGTLLLGGLECMAAMAKXAKKKETEAFQILKVHRVFLGSWPTKGTQVWSPKSFPNEVEPEGTGKEKDWDLRDQLQKKTLQLQAKEKEVRGXPEIVRAHLRNSRETWEAVKNCREELNQSQQLPPRVRGSLLPIKPWMMGRFLLXPSFAHKDNLMI

SEQ ID NO: 50330 - protein, 390 aa, Homo sapiens
MAAAAAGAGSGPWAAQEKQFPPALLSFFIYNPRFGPREGQVVRNPIIEKQSKDGKPVIEYQEEELLDKVYSSVLRQCYSMYKLFNGTFLKAMEDGGVKLLKERLEKFFHRYLQTLHLQSCDLLDIFGGISFFPLDKMTYLKIQSFINRMEESLNIVKYTAFLYNDQLIWSGLEQDDMRILYKYLTTSLFPRHIEPEAMSAAVCFMIDGGPVKFSFEYCCSASHSKMNLTGIFCHDLPASVHPTLDFCRRLDSIVGPQLTVLASDICEQFNINKRMSGSEKEPQFKFIYFNHMNLAEKSTVHMRKTPSVSLTSVHPDLMKILGDINSDFTRVDEDEEIIVKAMSDYWVVGKKSDRRELYVILNQKNANLIEVNEEVKKLCATQFNNIFFLD

SEQ ID NO: 50331 - protein, 517 aa, Homo sapiens
  misc_feature (1)...(517): Xaa = X or * as defined in Table 2
SSRFLFSLGWLWEAPEVGTRSGWLQRRPGLGAGLGGQEKQFLPALLSFFIYNPRFWPREGEEENKILFYHPNEVEKNEKIRNVGLCEAIVQFTRTFSPSKPAKSLHTQKNRQFFNEPEENFWMVMVVRCPIIEKQSKDGKPVIEYQEEELLDKVYSSVLRQCYSMYKLFNGTFPESHGRRRVKLLKERLEKFFHRYLQTLHLQSCDLLDIFGGISFFPLDKMTYLKIQSFINRMEESLNIVKYTAFLYNDQLIWSGLEQDDMRILYKYLTTSLFPRHIEPELAGRDSPIRAEMPGNLQHYGRFLTGPLNLNDPDAKCRFPKIFVNTDDTYEELHLIVYKAMSAAVCFMIDASIHPTLDFCRRTGTASLGPQLHSGWASGHLVEQFNINKGDVPGLRKEPQFKFIYFNHMNLVEKSTVHIEENAPACPLTSVHPDLMKIPRXPSNSDLYPRVDEDEGDHCXRALSDYWVVGKKSDPAGSLYVIFEIQKNAKPXLKVKXKRSKKPLCNASSNNILPSLD

SEQ ID NO: 50332 - protein, 112 aa, Homo sapiens
  misc_feature (1)...(112): Xaa = X or * as defined in Table 2
LSNLFLHATNDGALTSTTIPHPPMRQPTSSGDGSEIFLHTELKLLEPPHAWPQSCPPRLXMTRQQLLPMTFLLKAHSKAGIESPGLNPRPGFSLHPVLPAASSAAFLLPSFR

SEQ ID NO: 50333 - protein, 114 aa, Homo sapiens
EHCGPQERPSLAALERGFGLCWAGCEEESTKRAFGLLHTENTSPSPVFSEQNLERQVLQTQCRRLEARHYSLSLTAEQLSHSVAELRSQKQKMVSELELLHAEPDHLRKCLALP

SEQ ID NO: 50334 - protein, 192 aa, Homo sapiens
MVCDFHGYYYDLDDSYDESDEEEVRAHLRCVAEQPPLKLDTSSEKLEFLQLFGLTTQQQKEELVAQKRRKRRRMLRERSPSPPTIQSKRQTPSPRLALSTRYSPDEMNNSPNFEEKKKFLTIFNLTHIIAEKRKGPLLEIRGYDTNQAESWSRSLSTLAEDALAKRPGFRSFRCQDSSLLAFDFAGVHHSDM

SEQ ID NO: 50335 - protein, 1157 aa, Homo sapiens
  DOMAIN (271)..(282): PROTEIN REPEAT MUSCLE CALCIUM-BI domain identified by eMATRIX, accession number PD00301A, p-value=4.600e-09, raw score of 10.24
  misc_feature (1)...(1157): Xaa = X or * as defined in Table 2
TMFGLKPPLYFLPGSSLSSESSPVSSPATNHSSPASTPKRVPMGPIIVPPGGHSVPSTPPVVTIAPTKTVNGVWRSESRQDAGPRSSSGGRERLIVEPPLPQEKAGGPAIPSHLLSTPYPFGLSPSSVVQDSRFPPLNLQRPVHHVVPPSTVTEDYLRSFRPYHTTDDLRMSSLPPLGLDPATAAAYYHPSYLAPHPFPHPAFRMDDSYCLSALRSPFYPIPTPGSLPPLHPSAMHLHLSGVRYPPELSHSSLAALHSERMSGLSAERLQMDEELRREREREREREREREADREREKEREREREKEREQEKEREREKERERELERQREQRAREKELLAAKALEPSFLPVAELHGLRGHATEERGKPSEQLTPTRAEKLKDASLQAPKPVQHPLHPVPTPHHTVPSLISNHGIFSLPSSSAATALLIQRTNEEEKWLARQRRLRQEKEDRQSQVSEFRQQVLEQHLDMGRPPVPAEAEHRPESTTRPGPNRHEPGGRDPPQHFGGPPPLISPKPQLHAAPTALWNPVSLMDNTLETRRAESHSLHSHPAAFEPSRQAAVPLVKVERVFCPEKAEEGPRKREPAPLDKYQPPPPPPREGGSLEHQPFLPGPGPFLAELEKSTQTILGQQRASLPQAATFGELSGPLKPGSPYRPPVPRAPDPAYIYDEFLQQRRRLVSKLDLEERRRREAQEKGYYYDLDDSYDESDEEEVRAHLRCVAEQPPLKLDTSSEKLEFLQLFGLTTQQQKEELVAQKRRKRRRMLRERSPSPPTIQSKRQTPSPRLALSTRYSPDEMNNSPNFEEKKKFLTIFNLTHISAEKRKDKERLVEMLRAMKQKALSAAVADSLTNSPRDSPAVSLSEPATQQASLDVEKPVGVAASLSDIPKAAEPGGSWEQVRPQGAVRESRELAPASGEKARLSGAPGGKKSLSMLHYIRGAAPKDIPVPLSHSTNGKSKPWEPFVAEEFAHQFHESVLQSTQKALQKHKGSVAVLSAEQNHKVDTSVHYNIPELQSSSRAPPPQHNGQQEPPTARKGPPTXELDLDSXEEEEEDDEDGGDEEEVPRRKWQGIEAVFEAYQEHIEEQNLERQVLQTQCRRLEARHYSLSLTAEQLSHSVAELRSQKQKMVSERERLQAELDHLRKCLALPAMHWPRGYLKGYPR

SEQ ID NO: 50336 - protein, 228 aa, Homo sapiens
  DOMAIN (68)..(106): Lysyl oxidase  copper-binding region proteins domain identified by eMATRIX, accession number BL00926B, p-value=8.302e- 09, raw score of 13.84
  misc_feature (1)...(228): Xaa = X or * as defined in Table 2
GDDLCSVGAPCRSTWACSTPLRCVRRSREFPGLPHAAGAARGFRLPAGRPVPARPGAAAARAAAAGEAHRPLPCGRRPGPVRRAAVPPRPRPPRRGLRGRREGPAAPAGPGGPSLLCASAGRHGPPGLRAGQGLRDSAGEAGGEPAPAGPRPEASPXRSSLCENTCTEAGLGPRRAAGDLGSPWLTSGLLWGSFFLFFLFFFVILRQSLLLSPKTEVAVAQLMSHCSL

SEQ ID NO: 50337 - protein, 35 aa, Homo sapiens
EGEEEGDEENDPDMTQRRIKTQQSASSSEAGCMWP

SEQ ID NO: 50338 - protein, 48 aa, Homo sapiens
NFYFSCKNKNKANKQQITWKKGLSNGCKFILSGGRQKGRTLPQRERMA

SEQ ID NO: 50339 - protein, 367 aa, Homo sapiens
  DOMAIN (127)..(168): Nuclesosome assembly protein (NAP) domain identified by eMATRIX, accession number PF00956B, p-value=3.721e-26, raw score of 23.14
  DOMAIN (38)..(305): Nucleosome assembly protein (NAP) domain identified by PFam, accession name NAP_family, E-value=1.6e-80, PFam score of 280.9
  misc_feature (1)...(367): Xaa = X or * as defined in Table 2
CQNPQIPCSPFKKRLDGLWVETPTGYIESLPRVVKRRVNALKNLQVKCAQIEAKFFEEKVHGFFERKYAVLYQPLFDKRFEIINAIYEPTEEKECEWETRXRKDEDFGGNWKEKGQIEDEKKDEEKEDPKGIFPEFWLTVFKNVDLLSDMVQEHDEPILKHLKDIKVKFSDAGQPMSFVLEFHFEPNEYFTNEVLTRTYRMRSEPDTRLILDPFSFDGPEIMGCTGCQIDWKKGKNVTLKTYXGGGRKHKGRGTVRTVTKTVSNDSFSNFFPPPEIPEDVGDLDDDAGSLFLAGRLSEIWFTFYRERIIPRSSVNILPGEAIEDDDDDYDEEGEEADEEGEEEGDEENDPRLLTQRRIKTQQSASSS

SEQ ID NO: 50340 - protein, 116 aa, Homo sapiens
  DOMAIN (67)..(115): Pyruvate kinase domain identified by PFam, accession name PK, E-value=1.8e-23, PFam score of 87.8
  misc_feature (1)...(116): Xaa = X or * as defined in Table 2
DNLEAEAVAPCTAAARAVAPDLFVFAAXPESVSAGGPQQPCRSPIVKPGLPSFRPSSCTQPWLTHSWAEDVDLRVNFAMNVGKARGFFKKGDVVIVLTGWRPGSGFTNTMRVVPVP

SEQ ID NO: 50341 - protein, 133 aa, Homo sapiens
SVSRVGQRRRTSAAMSKPHSEAGTAFIQTQQLHAAMADTFLEHMCRLDIDSPPPSPSPSIRPATLVELTLGCNVALVGWDTREEDQRLTETWLCLQPALVGQPRAWLPIMWPHPIKGRRRNAGLEAPGARWQE

SEQ ID NO: 50342 - protein, 131 aa, Homo sapiens
  DOMAIN (66)..(131): Pyruvate kinase domain identified by PFam, accession name PK, E-value=1.6e-27, PFam score of 102.5
IKSGSLRLCSVSRVGQRRRTSAAMSKPHSEAGTAFIQTQQLHAAMADTFLEHMCRLDIDSPPITARNTGIICTIGPASRSVETLKEAWAEDVDLRVNFAMNVGKARGFFKKGDVVIVLTGWRPGSGFTNTM

SEQ ID NO: 50343 - protein, 89 aa, Homo sapiens
  DOMAIN (43)..(85): Pyruvate kinase domain identified by PFam, accession name PK, E-value=2.7e-28, PFam score of 105.3
MSKPHSEAGTAFIQTQQLHADMADTFLEHMCRLDIDSPPITARNTGIICTIGPASRSVETLKEMIKSGMNVARLNFSHGTHEYHGKLCF

SEQ ID NO: 50344 - protein, 263 aa, Homo sapiens
  DOMAIN (122)..(174): Pyruvate kinase proteins domain identified by eMATRIX, accession number BL00110D, p-value=1.000e-40, raw score of 24.83
  DOMAIN (10)..(201): Pyruvate kinase domain identified by PFam, accession name PK, E-value=3.2e-114, PFam score of 392.9
CGTSRMCHTTEELASDPILYRPLAVALDTKEPEIRNGLIKGSGTSEVELKKGATLKFTRNNAYMEKCDENILWLDYKNICKVVEVGSKIYVDDGLISLQVKQKGADFLVTEVENGGSLGSKKGVNLPGAAVDLPAVSEKDIQDLKFGVEQDVDMVFASFIRKASDVHEVRKVLGEKGKNIKIISKIENHEGVRRFDEILEALGHWAVVPLKPTLALALTCFSSSLGLSSLHLSPPSTQLSCSKHSTLHLPFSPTTAAPPGLLL

SEQ ID NO: 50345 - protein, 140 aa, Homo sapiens
  DOMAIN (51)..(103): Pyruvate kinase proteins domain identified by eMATRIX, accession number BL00110D, p-value=1.000e-40, raw score of 24.83
  DOMAIN (1)..(108): Pyruvate kinase domain identified by PFam, accession name PK, E-value=1.1e-65, PFam score of 231.6
LWLDYKNICKVVEVGSKIYVDDGLISLQVKQKGADFLVTEVENGGSLGSKKGVNLPGAAVDLPAVSEKDIQDLKFGVEQDVDMVFASFIRKASDVHEVRKVLGEKGKNTPPSTFHFPPLLQHLQACCYRAYLYVNKQQLK

SEQ ID NO: 50346 - protein, 57 aa, Homo sapiens
  DOMAIN (1)..(26): MALIC ENZYME SIGNATURE domain identified by eMATRIX, accession number PR00072A, p-value=8.793e-09, raw score of 12.75
  DOMAIN (1)..(52): Pyruvate kinase domain identified by PFam, accession name PK, E-value=1.7e-15, PFam score of 59.0
IYHLQLFEELRRLAPITSDPTEATAVGAVEASFKCCSGAIIVLTKSGRSAHQQELGP

SEQ ID NO: 50347 - protein, 399 aa, Homo sapiens
  DOMAIN (49)..(72): Immunoglobulins and major histocompatibility complex proteins domain identified by eMATRIX, accession number BL00290A, p-value= 3.455e-11, raw score of 20.89
  DOMAIN (118)..(387): Pyruvate kinase domain identified by PFam, accession name PK, E-value=1.2e-173, PFam score of 590.2
  misc_feature (1)...(399): Xaa = X or * as defined in Table 2
MAVDQLGTTLTLHWGQGTLVTVSSAPTKAPDVFPIISGCRHPKDNSPVVLACLITGYHPSSVTVTWYMGTQSQPQRTFPEIQRRDSYYMTSSQLSTPLQQWRQGEYKCVVQHTASKNTKGPEIRTGLIKGSGTAEVELKKGATLKITLDNAYMEKCDENILWLDYKNICKVVEVGSKIYVDDGLISLQVKQKGADFLVTEVENGGSLGSKKGVNLPGAAVDLPAVSEKDIQDLKFGVEQDVMVARGDLGIEIPAEKVFLAQKMMIGRCNRAGKPVICATQMLDSXIKKPRPTRAEGSDVANAVLDGADCIMLSGETAKGDYPLEAVRMQHLIAREAEAAIYHLQLFEELRRLAPITSDPTEATAVGAVEASFKCCSGAIIVLTKSGRWPDTAHVPPSLL

SEQ ID NO: 50348 - protein, 648 aa, Homo sapiens
  DOMAIN (382)..(431): Pyruvate kinase proteins domain identified by eMATRIX, accession number BL00110F, p-value=6.451e-22, raw score of 16.62
  DOMAIN (197)..(577): Pyruvate kinase domain identified by PFam, accession name PK, E-value=2.3e-52, PFam score of 187.4
  misc_feature (1)...(648): Xaa = X or * as defined in Table 2
QRDNLEAEAVAPCTAAARAVAPDLLRLCSVRPSRSAPEDRQQPCLFSHSEAGTAFIQTQQLHAAMADTFLWEHMCRLDIDSPPITARNTGIICTIGPGLPDQVETLKEDDXSLGMKCGSVLNFSSWELHGVTMRETIQGMWRTANGKAFAFLTPFLLPGPLAVGFRTLKGPEIPNWGSSKGNGTAEVGAXRKGATLKFTLDNAYMEKCDENILWLDYKNICKVVEVGSKIYVDDGLISLQGKQKGADFLVTEVENGGSLGIMKGVNLPGAAVDFACLCRRKDIQDLKFGVEQDVDMVFASFIPQSILMFHEVRKVLGEKGKDHQGLSSKIRESMRGFRRFDEILEASDGILWVARGXFXALRIPAEKVFLAQKMIDLDRFNRAGKPVICATQMLESMIKKPRPTRAEGSDVANAVLDWKPTCIMLSWEKQPKGDYPLEAVRMQHLIAREARWLPSYHLQLFEELRPPGAQLTSDPTEATAVGAVEASFKCCSGAIIVLTKSGKVCSPRLARYRPRAPIIAVTRNSPGKLVRAHLYRGIFPGVCQGPDSRRAWAXDIGLRVKLCHGMFGKARGFFQERGDVVHCAXPEWRPWLPAPPNNMRVVPCCRDGPRGPSSSRPCSHPFFPKPIPFRPSNGLVELHSGAVNVATG

SEQ ID NO: 50349 - protein, 560 aa, Homo sapiens
  DOMAIN (418)..(435): Zinc finger C2H2 type, domain proteins. domain identified by eMATRIX, accession number BL00028, p-value=8.800e-10, raw score of 16.07
  DOMAIN (55)..(151): SCAN domain identified by PFam, accession name SCAN, E-value= 1e-29, PFam score of 112.2
  misc_feature (1)...(560): Xaa = X or * as defined in Table 2
TVTFSQCRFGKMLPLEKAFASPQELPSPAGSAHAGVSSRSSSRKNPRPSLRGPLLTLEFSRLRFREFVYQEAAGPHQTLARLHELCRQWLMPEARSKEQMLESLLVLEQFLGILPDKVRPWVVAQYPESCRSSLLVEGLADVLEEPGPSTVDRDAAGLPCGLILNSXRWSVREAHGPSAATRRAREPQPGPWSWGDPGTFXDTLAFSGPPVSGTEEGQMKQRPKRTALPHTEQVGGHEQVGGRSQRTTNVSEAEVLSRGPSAPGGVGPPGPCEENLKSYRKLLLWEGGRRQESAGCACEEAAPAGGCLSCLRRRPLGTPLPIPRRAHXGGGRAAWEGPGPAGPPGRGVRLCHRIAEAVRHPAACPETGARRNWEPRGRTPRMGTGRASRACSSSGDSAGLEAGQGPGADEPGLSRGKPYACGECGEAFAWLSHLMEHHSSHGGRKRYACQGCWKTFHFSLALAEHQKTHGKEKSYALGGARGPQPSTREAQAGARAGGPPESVEGRGSPRTPRGAEVSRCAVPFRRGRFAGRESQTRHWAFPRPWVAASCGVCGRPLPVP

SEQ ID NO: 50350 - protein, 122 aa, Homo sapiens
SLSFNSESCVEYLIKAIRLHLFHGRRMSAAPCSTAPSPIDHPRAEECGRTARDWQAAPPAAQARDPLGEASWAPESRRSAASLLSQRDHEPTRRKKLRTSEGTNSRRATLRAVTLTTRVRGF

SEQ ID NO: 50351 - protein, 43 aa, Homo sapiens
SCIHLLSTHCLSSPVCLSMHCLSSTSYSHQFLSMTCGDYGSYN

SEQ ID NO: 50352 - protein, 209 aa, Homo sapiens; identical to SEQ ID NO: 36781

SEQ ID NO: 50353 - protein, 147 aa, Homo sapiens; identical to SEQ ID NO: 33120

SEQ ID NO: 50354 - protein, 158 aa, Homo sapiens; identical to SEQ ID NO: 33539

SEQ ID NO: 50355 - protein, 49 aa, Homo sapiens
IQCHPHQATNDFLHRIGKNYFKNHMEPKKSLHRQVNPKPKEQSWRHHAT

SEQ ID NO: 50356 - protein, 806 aa, Homo sapiens
  misc_feature (1)...(806): Xaa = X or * as defined in Table 2
MKLRTLAVSVTALKVARLGSAPSDVQMCLEFLPSDSGAQLASPSGSRTGAAGGAACQSGAVRSYSSALGWSMGLGAVEQGVVLVGDARAAQEPMEWMGGSGMAGCRSRALHRGKAAKARREIEHSAGRKGLFGSARLIPATAMAPRSRLLSLGRRGNFRSRVLRRKSRPLEEAARRWRDCPTGFGALVAGAGSGRAPGVPPKRLPARTKAQVSRETRGSGEVTAQGGKGPRGLWILLWGFYNLLPTTSHAESYPERLIQKVVSEKIARALARYLHLPFGLLGGNKTIVYSWEALRFHHQLTPSVITNTVIKVYEEPKLSQQKSRTLDVSTDEEDKIHHSSESKDDQGLSSDSSSSLGEKELSSTVKIPDAAFIQAARRKRELARAQDDYISLDVQHTSSISGMKRESEDDPEISRNEETSEESQEDEKQDTWEQQQMRKAVKIIEERDIDLSCGNGSSKVKKFDTSISFPPVNLEIIKKQLNTRLTLLQETHRSHLREYEKYVQDVKSSKSTIQNLESSSNQALNCKFYKSMKIYVENLIDCLNEKIINIQEIESSMHALLLKQAMTFMKRRQDELKHESTYLQQLSRKDETSTSGNFSVDEKTQWILEEIESRRTKRRQARVLSGNCNHQEGTSSDDELPSAEMIDFQKSQGDILQKQKKVFEEVQDDFCNIQNILLKFQQWREKFPDSYYEAFISLCXRQFIITRCSFLMVTIPRKHPCLSSFCPSRFNSSKIHXVFSSTEKFPLVDVSSLRDNCCKYVDSCFNSSCLRFIKVIACFKRSACMDDSISWMLIIFSLRQSIKFST

SEQ ID NO: 50357 - protein, 197 aa, Homo sapiens
  misc_feature (1)...(197): Xaa = X or * as defined in Table 2
SQRNLCLGRVWYILFFLFAFLQTLELVSHERRGRTGITNAXVSNSPRRELGFHVLXRXQFLLLFLFSHRLRSPAGFTXWIPHRGCRWSCLPVLRHALAFLSPWVVDGTGRRGAGGGARRGGSGHTGAHGVGGRLRHGRLQVPSPLRARSPFLLSCTLSCQLDSPCLTCSQGHQYKYQHSDKGKRLTIVTKSFDFIPS

SEQ ID NO: 50358 - protein, 176 aa, Homo sapiens
MRPHSSALGWSMGLGAVEQGAALIGEARDAQEPMEGVGGSGMAGCRSRALPRGKAAKARPDTVQELSGNTNTFKHKGRDEAAVRHIPLPDDERERENEKQDGGKIESQGEKEIKRASTNKWPTLSQTDHIPSEESDPKRQQELEMMSESHALESRQCPGRGWLSWCPHHSLPATWS

SEQ ID NO: 50359 - protein, 74 aa, Homo sapiens [sequence omitted]

SEQ ID NO: 50360 - protein, 117 aa, Homo sapiens
KNKASTLWKGTGAGPRQTQEPSWLHPVDPAPGLQVELPASPAPCARTLQPLGGLWDWAPWSRGRCSSGRLGPHMSPWSGWEAQAWRAAGPEPCPARRQLRPGEKPRAAPLYQAGFLE

SEQ ID NO: 50361 - protein, 285 aa, Homo sapiens
MRRGPPSSRPQSGSSTNSLHCAFGKATDSGAQLASPSGSCTWAAGGAACKSGALRPNSSALGWSMGFGAVEQGVALLGEARAHRSPWRGWEAQAWRAAGPEPCPAGRQLRPGDTCLLASSLPASAILLTHAAGTIGLVPWTGPEKGGVIHPPPASRPPERLSVPPTTHGNYGNTIQDEIWVGTQNQTISGTQNAFTENQYTPARLQTMIKTTVQEQWQAFSPIGSGNVRLTGSGVQQTPCWIRRGRSQLRVCDGSKQQWWTASESSARALTNTDQKSVQFQDLIE

SEQ ID NO: 50362 - protein, 263 aa, Homo sapiens
  DOMAIN (115)..(136): GLUTELIN SIGNATURE domain identified by eMATRIX, accession number PR00211B, p-value=9.000e-09, raw score of 0.86
LPSRGAGLGTCSPPCLSLPPTPWAPVRPEPPQGAPPPAPRRPVPSTTQGLRSASARHGTGRQLHLQPWCGIHWVKLAGLLSLVGSQHLRGQGSRAAAALTHMHSPHACTHAHTRAEPLRLPPPPRPLPPPLSPPPLRLCCLRSLFPCPLTESAAKAGSKKFHSVQEIPSPAVCELGVGTVLHIDPEKWRAGRENVETGGKRTGSGKDSTGRGWGQTDYGLGKKERTEEASRSCICLVCVSMRRDALCGQSVGSHFCQWSLRTS

SEQ ID NO: 50363 - protein, 1600 aa, Homo sapiens; identical to SEQ ID NO: 39776
  DOMAIN (329)..(376): AAA-protein family proteins domain identified by eMATRIX, accession number BL00674D, p-value=1.783e-34, raw score of 23.41
  DOMAIN (766)..(1587): RNase H domain identified by PFam, accession name rnaseH, E- value=7.5e-62, PFam score of 218.9

SEQ ID NO: 50364 - protein, 614 aa, Homo sapiens; identical to SEQ ID NO: 39777
  DOMAIN (102)..(119): RNase H domain identified by eMATRIX, accession number PF00075A, p-value=4.060e-12, raw score of 14.44
  DOMAIN (82)..(267): Reverse transcriptase domain identified by PFam, accession name rvt, E-value=3.1e-38, PFam score of 140.4

SEQ ID NO: 50365 - protein, 157 aa, Homo sapiens; identical to SEQ ID NO: 37889
  DOMAIN (110)..(145): ENV polyprotein (coat polyprotein) domain identified by PFam, accession name ENV_polyprotein, E-value=4.3e-09, PFam score of 32.7
  misc_feature (1)...(157): Xaa = X or * as defined in Table 2

SEQ ID NO: 50366 - protein, 446 aa, Homo sapiens; identical to SEQ ID NO: 37891
  DOMAIN (360)..(445): ENV polyprotein (coat polyprotein) domain identified by PFam, accession name ENV_polyprotein, E-value=7.6e-22, PFam score of 76.0

SEQ ID NO: 50367 - protein, 1645 aa, Homo sapiens
  DOMAIN (503)..(524): POLYCYSTIC KIDNEY DISEASE PROTEIN SIGNATURE domain identified by eMATRIX, accession number PR00500B, p-value=6.380e-10, raw score of 7.74
  DOMAIN (303)..(492): Leucine Rich Repeat domain identified by PFam, accession name LRR, E-value=1.2e-28, PFam score of 108.7
MNLNQEEIPDLPEKEFRRLVIKLIREGLEKGKAQCKEIQKMIQEVKREIFQEIESLKKKPPKIQKTLDILLKMQNALESLSDRTEQAEEINSELEDKVFKLTQSNKDKEKITRKYEQSLQEVWSYVKRPNLRIIGVPEEEENTKSLENILGGIIEENFPSFARDLDIQIPEAQRTTGKLIAKRSLLRHIVFRLSKVKMKERILRAVRQKHQATVSQKNKAGGITLPDFKLYYKATVSQKNKAGGITLPDFKLYYKATVSQKNKAGGITLPDFKLYYKATVTKTAWAGNRIVEILPEHLKEFQSLETLDLSSNNISELQTAFPALQLKYLELNRNKIKNVDGLTFQGLGALKSLKMQRNGVTKLMDGAFWGLSNMEILQLDHNNLTEITKGWLYGLLMLQELHLSQNAINRISPDAWEFCQKLSELDLTFNHLSRLDDSSFLGLSLLNTLHIGNNRVSYIADCAFRGLSSLKTLILQGNRIRSITKKAFTGLDALEHLHLNTSSLLCDCQLKWLPQWVAENNFQSFVNASCAHPQLLKGRSIFAVSPDGFVCDDFPKPQITVQPETQSAIKGSNLSFICSAASSSDSPMTFAWKKDNELLHDAEMENYAHLRAQGGEVMEYTTILRLREVEFASEGKYQCVISNHFGSSYSVKAKLTVNMLPSFTKTPMDLTIRAGAMARLECAAVGHPAPQIAWQKDGGTDFPAARERRMHVMPEDDVFFIVDVKIEDIGVYSCTAQNSAGSISANATLTVLETPSFLRPLLDRTVTKGETAVLQCIAGGSPPPKLNWTKDDSPLVVTERHFFAAGNQLLIIVDSDVSDAGKYTCEMSNTLGTERGNVRLSVIPTPTCDSPQMTAPSLDDDGWATVGVVIIAVVCCVVGTSLVWVVIIYHTRRRNEDCSITNTDETNLPADIPSYLSSQGTLADRQDGYVSSESGSHHQFVTSSGAGFFLPQHDSSGTCHIDNSSEADVEAATDLFLCPFLGSTGPMYLKGNVYGSDPFETYHTGTFGKALRRPHLDAYSSFGQPSDCQPRAFYLKAHSSPDLDSGGFMIALWYHGTLSPEPAFVLKARDDVGTCHSHRAGQHWLKYYLLQALAEGNVVPEPPHRVPPGAPPTGAARRELLSSNPQNGRSTDSLRSVPAKAADTQCQSVKAARREAVPCKVTGPELPKATGAYLLHQCDLDMRHGVKTDHSGALRIGGKYRAPVGQLKTISVATGLKTQLSYQKPFINPVTRRCIQSVAATALLTEESRKETFRGNLIVRKPHCKRTLEPLEKGKAGKIECLIGLASSVVYKDTLKKIVQVEISHPLVHAPYAKGITGRPTDPGDEAVPNPYTLLSQIPEKAEWFILLDLKDALFFIPVHPDSQFLFAFEDPSNSTSQLTWTVLPLAFRNGPHLFGQASTQDLSQLSYLDTLVLWHVDDLLLAACSETLCHQATQALLNFLTTCGYKVSKPKAQLCSQQVKYLGLKLPKGTRAPSEECIQPILAYPHPKTLKQLRAFLGITGFCRIWIPSILTAKGDLWLSDNHLLKYQVLLLEGPVLQLRTCATLNPATFLPDNEEKIEHNCQQVIAQTYATRGDLLEVPLTDPDLNLYTDGSSFVQKGLQKAGYAVVSDNGILESNPFTPGTSTQLAELVALTWALEFGEGKR

SEQ ID NO: 50368 - protein, 139 aa, Homo sapiens; identical to SEQ ID NO: 42633
  DOMAIN (8)..(47): Gag P30 core shell protein domain identified by PFam, accession name Gag_p30, E-value=0.00017, PFam score of 19.1

SEQ ID NO: 50369 - protein, 179 aa, Homo sapiens
  DOMAIN (31)..(43): RNase H domain identified by eMATRIX, accession number PF00075C, p-value=1.000e-12, raw score of 11.58
MDAFFCIPVHPDSQFLFAFEDPSNPASQLTWTVLPQRFKNSPHLFGQALAQDLSQFSYLDTLVLRYMDDLLLAAYSETLCHQATEALLNFLATCGYKVSKPKAQLCSQQVKYLGLKLSKGTRDLTTFLPVNEEKIEHNCQQVIAQSYAARGELLEVPLADPDLNLYTNGSSFVEKALEK

SEQ ID NO: 50370 - protein, 107 aa, Homo sapiens
  DOMAIN (44)..(87): CTF/NF-I proteins domain identified by eMATRIX, accession number BL00349C, p-value=4.357e-09, raw score of 9.33
TSAQLAELIALTRAPELGEGKRVNIYANSIGREREFLTSKGTLVKHQEAIKRLLLAVQKPKEVAVLHCWGHQKGKEREIEENRQADIEARRAARQDPPLEMLTEGPL

SEQ ID NO: 50371 - protein, 221 aa, Homo sapiens
  DOMAIN (167)..(179): RNase H domain identified by eMATRIX, accession number PF00075C, p-value=5.622e-12, raw score of 11.58
  DOMAIN (69)..(220): Reverse transcriptase domain identified by PFam, accession name rvt, E-value=2.1e-14, PFam score of 61.3
EKCRHNCSSRVWQSLVSQSVWATEGQYGRTKNARPVQVKDSASFPYQRRYPLRLEAQQGLQKIVKDLKAQGLVKPFNSPCNTPILGVQKPNGQWKLVQDLRIINEAIVPLYPAVPNPYTLLSQIPEEAEWFTVLDLKDAFFCIPVHRESQFLFAFEDPSNPTSQLTWTVLPQGFRNSPHLFGQALAQDLSQFSYLNTLVLRYLDDLLLAAHLETLCHQATQ

SEQ ID NO: 50372 - protein, 381 aa, Homo sapiens
  DOMAIN (161)..(172): RNase H domain identified by eMATRIX, accession number PF00075H, p-value=2.607e-09, raw score of 10.48
  DOMAIN (189)..(228): Integrase core domain identified by PFam, accession name rve, E-value=6.8e-08, PFam score of 31.3
IWREGEFLISEGTPIKHQEAIRRLLFAVQQPKEVTVLHCRGHQKGKEREIEGNRQEDIEAKRAARQDPPLEMLIKGPVVWGNPLRETKPQYSEEEIEWGTSRGHSFLPSGWLATEEGKILLLAANQWKLLKTLQQTFHLGIDSTHQIAKSLFTGPGLFKTIKQIVRACEVCQRNNPLPYRQAPSGEQRTGNYPREDWQLDFIHMPKSQGFQCLLVWVDTFTGWAEAFPSLLRIQNSPQKAGLSPYRMLYGRSFLTNDLLLDQEMANLVADITSLAKYQQVLKTLQGACPREEGKEIFHPGVMVLVKSLPSNSPSLDTSWGGPYPVILSIPTAVKVAGVESWIHHTRIKPWILPKEPENPGDNASYFFEPLEDLCLLFKQQP

SEQ ID NO: 50373 - protein, 552 aa, Homo sapiens; identical to SEQ ID NO: 39780
  DOMAIN (40)..(57): RNase H domain identified by eMATRIX, accession number PF00075A, p-value=4.060e-12, raw score of 14.44
  DOMAIN (20)..(205): Reverse transcriptase domain identified by PFam, accession name rvt, E-value=3.1e-38, PFam score of 140.4

SEQ ID NO: 50374 - protein, 69 aa, Homo sapiens
  misc_feature (1)...(69): Xaa = X or * as defined in Table 2
MGIYDFSYFPPGCCLKSRRKSSRGSQEXLALSPGFSGSFGSIQDLTQVXCIQDSTPATLTAVGVDKMTG

SEQ ID NO: 50375 - protein, 166 aa, Homo sapiens
  DOMAIN (24)..(41): Zinc finger, CCHC class domain identified by PFam, accession name zf-CCHC, E-value=0.028, PFam score of 18.1
MALRQVDFGGSVKGKSWANRMPNRAYFQCGLQGHFKKDCPSRTLNLDTFLPHNEEKIEHNCQQVIAQTYATRGDHLEVPLTDPNPNLYTDGRSFVEKGLQKVGIKAVKLQIILQMEPQMQSMTKIYRGPLDHPDSPCSNVNDIEGTPPEEISTAQPLLHPRPAGSS

SEQ ID NO: 50376 - protein, 122 aa, Homo sapiens
  DOMAIN (17)..(114): Retroviral aspartyl protease domain identified by PFam, accession name rvp, E-value=2.4e-10, PFam score of 41.8
  misc_feature (1)...(122): Xaa = X or * as defined in Table 2
SSSRTEGARGKRQPMPSPSTEPRVCLTIEGQEVNCLLDTGAAFSVLLSCPGQLSSRSVTIXGVLGQPVTRYFPQPLSCDWGTLLFSNAFLIMPESPTPLLGRGILAKAGAIIHHAVLVTAAL

SEQ ID NO: 50377 - protein, 153 aa, Homo sapiens; identical to SEQ ID NO: 37896

SEQ ID NO: 50378 - protein, 44 aa, Homo sapiens; identical to SEQ ID NO: 37894
  misc_feature (1)...(44): Xaa = X or * as defined in Table 2

SEQ ID NO: 50379 - protein, 580 aa, Homo sapiens
  DOMAIN (117)..(134): RNase H domain identified by eMATRIX, accession number PF00075A, p-value=4.400e-13, raw score of 14.44
  DOMAIN (97)..(282): Reverse transcriptase domain identified by PFam, accession name rvt, E-value=2e-33, PFam score of 124.5
MTYGVGKGDMVDGTKERGERIESALGTSHIMRVAEPQGSQSWCPDEELRPVGSPATAAQKLPSTPGALGPTHSTECCSIPLDPKAQQGLQKIVKDLKAQGLVKPCNSPCNTPILGVQKPNGQWRLVQDLRIINEALVPLYPAVPNPYTLLSQIPEEAEWFTVLGLKDDFFCIPVHPDSQFLFAFEEPSNPTSQLTWTVLPKGFRDSPHLFGQVLAQNLSQFSYLDTLVLRYVDDLLLAARSETLCHQATQALLNFLTTCGYKVSKPKAQLCSQEVTYLGLKLSKGTRALSEERIQPILAYPHPKTLKQLRAFLGITGFCRIWIPSILTAKGDLWLSDNHLLKYQVLLLEGPVLQLRTCATLNPATFLPDNEEKIEHNCQQVIAQTYATRGDLLEVPLTDPDLNLYTDGSSFVQKGLQKAGYAVVSDNGILESNPFTPGTSTQLAELVALTWALEFGEGKRVNINTGSKYAYLVLHAHASIWREREFLTSEGTPIKHQEAIRRLLLVVQKPEEVAVLHCWGHPKGKEREIEGNCQADIEAKRASRQDPPLEMLIERHLVWGNPLWETNPQYSAEEIEWGTS

SEQ ID NO: 50380 - protein, 286 aa, Homo sapiens; identical to SEQ ID NO: 34796

SEQ ID NO: 50381 - protein, 2176 aa, Homo sapiens
  DOMAIN (762)..(782): ENDOPEPTIDASE LA (LON) SERINE PROTEASE (S16) SIGNATURE domain identified by eMATRIX, accession number PR00830A, p-value=7.429e- 11, raw score of 8.41
  DOMAIN (475)..(949): ATPases associated with various cellular act domain identified by PFam, accession name AAA, E-value=1.5e-66, PFam score of 234.5
MWGSDRLAGAGGGGAAVTVAFTNARDCFLHLPRRLVAQLHLLQNQAIEVVWSHQPAFLSWVEGRHFSDQGENVAEINRQVGQKLGLSNGGQELHAVSLEQHLLDQIRIVFPKAIFPVWVDQQTYIFIQIVALIPAASYGRLETDTKLLIQPKTRRAKENTFSKADAEYKKLHSYGRDQKGMMKELQTKQLQSNTVGITESNENESEIPVDSSSVASLWTMIGSIFSFQSEKKQETSWGLTEINAFKNMQSKVVPLDNIFRVCKSQPPSIYNASATSVFHKHCAIHVFPWDQEYFDVEPSFTVTYGKLVKLLSPKQQQSKTKQNVLSPEKEKQMSEPLDQKKIRSDHNEEDEKACVLQVVWNGLEELNNAIKYTKNVEVLHLGKVWPKDISEEDIKTVFYSWLQQSTTTMLPLVISEEEFIKLETKDGPSRSYGKRRKQGVNSLGVSSLEHITHSLLGRPLSRQLMSLVAGLRNGALLLTGGKGSGKSTLAKAICKEAFDKLDAHVERVDCKALRGKRLENIQKTLEVAFSEAVWMQPSVVLLDDLDLIAGLPAVPEHEHSPDAVQSQRLAHALNDMIKEFISMGSLVALIATSQSQQSLHPLLVSAQGVHIFQCVQHIQPPNQEQRCEILCNVIKNKLDCDINKFTDLDLQHVAKETGGFVARDFTVLVDRAIHSRLSRQSISTREKLVLTTLDFQKALRGFLPASLRSVNLHKPRDLGWDKIGGLHEVRQILMDTIQLPAKYPELFANLPIRQRTGILLYGPPGTGKTLLAGVIARESRMNFISVKGPELLSKYIGASEQAVRDIFIRAQAAKPCILFFDEFESIAPRRGHDNTGVTDRVVNQLLTQLDGVEGLQGVYVLAATSRPDLIDPALLRPGRLDKCVYCPPPDQDGSSSSDSDLSLSSMVFLNHSSGSDDSAGDGECGLDQSLVSLEMSEILPDESKFNMYRLYFGSSYESELGNGTSSDLEDESMNQPGPIKTRLAISQSHLMTALGHTRPSISEDDWKNFAELYESFQNPKRRKNQSGTMFRPGQKFFDEITELTYLPSFHHKAAPHQAEPGPNSSSASAPPPYNPFITSSPHTQSGLQFRSVTSPPPSAQQFPLKEVAGAKGIVKTALETAPTLALPVSSQPFSLHTAEVQGCAVGILTQGPGPCPVAFLSKQLDLTVLGSPSCLHAVASAALILLEALKITNYAQLTLYSSHNFQNLFSFSHLTHILSAPRLLQLYSLFVESPTITILPGPDFNLASHIILDTTPDPDDCMSLIYLTFTPFPHISFFSVPHVDHIWFTDGSSTRPDRHSPAKAGYAIESSTSIIEATALPPSTTSQQAELIALTRAFTLAKGLHVNIYTDSKYAFHILHHHAVIWAERGFLTTQGSSIINASLIKTLLKAALLPKEAGVTHCKGHQKASDPITLGNAYADKGVRCAPDPARRPLPLPIGLKACHCSCTAKIGGKYRALVGQLKTISVATGLKTQDRTIDGSSQVIEEKNHNGYSVIDTGTLVEAELEKLPNNWSPQTCELFALSQALKYLQNQKTISILIQKEPSPALGLTPERKGNVGHAGKGPLESSSPDPFLCGQERREKGCRTATSVSITNPINRGPWVVTHPGKELTPEHKGNVGHAGRDILAKAGAIIHLNIGEGTPVCCPLLEEGINPEVWATEGQYGRAKNARPVQVKLKDSTSFPYQRQYPLRPKAQQGLQKIVKDLKAQGLVKPCSNPCSTPILGVQKPNRQWRTLCHQATQALFNFLATCGYMVSKPKAQLCSQQRYLGLKLSKGTRALSEEHIQPILAYPHPKTLKQLRGFLGVIGFCRKWIPRYGEIARSLNTLIKETQKANTHLVRWTTEVEVAFQALTQAPVLSLPTGQDFSSYVTEKTGIALGVLTQIRGMSLQPVAYLTKEIDVVAKGWPHCLRVVAAVVVLVSEAVKLIQGRDLTVWTSHDVNGILTAKGDLWLSDNHLLKYQALLLEGPVLRLCTCATLNPATFLPDNKEKIEHNCQQVIVQTYAAQGDPLEVPLTDPDLTLCTDGSSFVEKGLRKVGYAVVSDNGILESNPLTPGTSAQLAELIALTWALELGEEKRANIYTDSKYAYLVLHAHAAIWKEREFLTSERTPIKHQEAIRKLLLAVQKPKEVAVLHCRGHQKGKEREIEENCQADIEAKRAARQDPPLEMLIKQPLV

SEQ ID NO: 50382 - protein, 99 aa, Homo sapiens
MGHGREPWNPVTSVQLDYDQPGHLTVQEQWQAFSPIGRGNGRLAGSGMQQTPCRIRRDGSQQRVCGGGGKQQWWTASRSSARAVKNTDQKSVQLQDLIE

SEQ ID NO: 50383 - protein, 101 aa, Homo sapiens
PKRLEIKGYNLRGYNSRLVKHGERSSLFPSLLVSYQSSSPPPSSRKGLLTSLGSRPLPLTSEWAATSSWFTYREWLRTPVTEVSKCFISLNPGTADTTVQI

SEQ ID NO: 50384 - protein, 487 aa, Homo sapiens
  DOMAIN (183)..(193): 4 kw A55R REDUCTASE TERMINAL DIHYDROPTERIDINE domain identified by eMATRIX, accession number DM00099B, p-value=2.125e- 09, raw score of 14.73
  DOMAIN (72)..(217): Kelch motif domain identified by PFam, accession name Kelch, E-value=4e-20, PFam score of 80.3
MACSWGMWWLLLLFEEAIRVLLPEGGGPGADKTMGSRGFWKQSVQEGQSKWKGPDAILLPPQFSRFMDLAEVIVVIGGCDRKGLLKLPFADAYHPESQRWTPLPSLPGYTRSEFAACALRNDVYVSGGHINSHDVWMFSSHLHTWIKVASLHKGRWRHKMAVVQGQLFAVGGFDGLRRLHSVERYDPFSNTWAAAAPLPEAEPQAIINYFSSLMQQRVQEKGETAEVNEENRIQSTEKKNLAQKNDKPGTPGVKRSSHLSLSVLGLRTRSTSRSRIPAFKADGREQGQGDIPTFYTYEEGLSHLTAEGQATLERLEGMLSQSVSSQYNMAGVRTEDSIRDYEGGWSPGPRETCDPRCRRENFSPEGKSALRDPAPLPSSATDPERSYRMILETAHFRNHGWFRGGTSILISHTGSEVRGEEQLAGSRSFEGAEPETNTFCPSQGLPLVAIVGGGPAHSHHTLNGHATGALDDGPFCQGPLDRPLREI

SEQ ID NO: 50385 - protein, 265 aa, Homo sapiens
  misc_feature (1)...(265): Xaa = X or * as defined in Table 2
AVWCTHCCAPTPSGPVLPHSAAMSFLKSFPPPGPAEGLLRQQPDTEAVLNGKGLGTGTLYIAESRLSWLDGSGLGFSLEYPTISLHALSRDRSDCLGEHLYVMVNAKFEEESKEPVADEEEEDSDDDVEPITEFRFVPSDKSAFXFPCSVEAMFTAMCECQALHPDPEDEDSDDYDGEEYDVEAHEQGQGDIPTFYTYEEGLSHLTAEGQATLERLEGMLSQSVSSQYNMAGVRTEDSIRDYEDGDGRLDTTPTVCLGQFEDADV

SEQ ID NO: 50386 - protein, 64 aa, Homo sapiens
  misc_feature (1)...(64): Xaa = X or * as defined in Table 2
RLLGDVCGRLRPRGHEEQRPGGPGARSHSRSGPRMGRDCAGAVPRVTPKXSACAAGGRGGPATQ

SEQ ID NO: 50387 - protein, 229 aa, Homo sapiens
  DOMAIN (130)..(145): G-PROTEIN BETA WD-40 REPEAT SIGNATURE domain identified by eMATRIX, accession number PR00320C, p-value=7.000e-12, raw score of 13.01
  DOMAIN (105)..(183): WD domain, G-beta repeat domain identified by PFam, accession name WD40, E-value=2.2e-15, PFam score of 64.5
MVEGKEEQVTSYVDGSRQRESFCRETPIFKTIRSQKEILRPVKAEVLDWFLTRPSGFMPVFVSLDGKGESRFAIIMTEQMTLCGTLRAPTAGWDKLVKVWNLANCKLKTNHIGHTGYLNTVTMSPNGSLCASGGKDGQAMLWDLNEGKHLYMPDGGGIINTLCFSPNCYWLCAAMGPSIKIWDLGVNIIVDELKQEVISTGSKAEPPQCTSLAWSVGGHLFAGYTDNLV

SEQ ID NO: 50388 - protein, 993 aa, Homo sapiens
  DOMAIN (212)..(260): Cadherins extracellular repeat proteins domain proteins domain identified by eMATRIX, accession number BL00232B, p-value= 2.125e-26, raw score of 32.79
  DOMAIN (18)..(433): Cadherin domain identified by PFam, accession name cadherin, E-value=5.6e-45, PFam score of 162.8
  misc_feature (1)...(993): Xaa = X or * as defined in Table 2
MLRRKKQEDWAAKGSSHACGQIPEEREKGFAVGNVVANLGLDLGSLSARRFRVVSGASRRFFEVNRETGEMFVNDRLDREELCGTLPSCTVTLELVVENPLELFSVEVVIQDINDNNPAFPTQEMKLEISEAVAPGTRFPLESAHDPDVGSNSLQTYELSRNEYFALRVQTREDSTKYAELVLERALDREREPSLQLVLTALDGGTPALSASLPIHIKVLDANDNAPVFNQSLYRARVLEDAPSGTRVVQVLATDLDEGPNGEIIYSFGSHNRAGVRQLFALDLVTGMLTIKGRLDFEDTKLHEIYIQAKDKGANPEGAHCKVLVEVVDVNDNAPEITVTSVYSPVPEDAPLGTVIALLSVTDLDAGENGLVTCEVPPGLPFSLTSSLKNYFTLKTSADLDRETVPEYNLSITARDAGTPSLSALTIVRVQVSDINDNVSHTCTLKANYFNSSLKYISVFQTQGAHDKHRRFDKDAEAAVAGPSHAPDTSDVGATLLVSDGTHSVRCLVTREALDTSDWEEKEFGFRGTEGRLLLLQDCGVHVQVAEGGAPAEFYLQVDRFSLLPTEQPRLRVPGCNQDLDVQKKLYDCLEEHLSESTSSNAGLSLSQLLDEMREDQEHQGALVCLAESCLTLEGPCTAPPVTHWAASRCKATPLQSLSVAESRLKLGASVLLRALATNPNLTALDISGNAMGDAGAKLLAKALRVNSRLRSVVWDRNHTSALGLLDVAQALEQNHSLKAMPLPLNDVAQAQRSRPELTARAVHQIQACLLRNNRADPASSDHTTRLQPLGLVSDPSEQVNVPSPTTRACNIILMARSELAHGKKVQAKIQDANGIAELADKEYPEPNRHSWDKLVKVWNLANCKLKTNHIGHTGYLNTVTMSPNGSLCASGGKDGQAMLWDLNEGKHLYMPDGGGIINTLCFSPNCYWLCAAMGPSIKIWDLGVNIIVDELKQEVISTGSKAEPPQCTSLAWSVGGHLFAGYTDNLVXVWQV

SEQ ID NO: 50389 - protein, 98 aa, Homo sapiens
FNGNIGFLLSSASSATRCACASPGRHPRYCACAVSRLPRSAPRGRARASPTRAPLFMSPRSKTVTYAPKKTSPRIHTGTGGEAMSKARKPDKQRRTSP

SEQ ID NO: 50390 - protein, 35 aa, Homo sapiens
CHPAPARRLPGPSRGFGRRVVSGDGRLVPSSFSVV

SEQ ID NO: 50391 - protein, 1083 aa, Homo sapiens
  DOMAIN (757)..(811): Tropomyosins proteins domain identified by eMATRIX, accession number BL00326C, p-value=6.108e-11, raw score of 9.99
  DOMAIN (393)..(1074): Myosin tail domain identified by PFam, accession name Myosin_tail, E-value=3.9e-72, PFam score of 253.1
  misc_feature (1)...(1083): Xaa = X or * as defined in Table 2
LTSRWRPWPRPPTSASSAGWFCASTGPWTAAPAKAPPSWASWTSRALRSSRPQTSRLWRRXPRSRAATPSSSGRGTCGIRPTSVFSTTRARSTTRPTSGXXKTWTLXMTTSQRLLHQSTDRLTAEIWKDVEGIVGLEQVSSRATAHQVAAPVGVCSGQWDSSHKESLSRLMATLSNTNPSFVRCIVPNHEKRAGKLEPRLVLDQLRCNGVLEGIRICRQGFPNRILFQEFRQRYEILTPNAIPKGFMDGKQACEKMGAGLPVLKQRKPGATQVKLSALPGQSLEGLQSGGETSMGIESQSRATPDKQVDEGKWERAFQKRQQQQSALRVMQRNCAAYLKLRHWQWWRLFTKVKPLLQVTRQDEVLQARAQELQKVQELQQQSAREVGELQGRVAQLEEERARLAEQLRAEAELCAEAEETRGRLAARKQELELVVSELEARVGEEEECSRQMQTEKKRLQQHIQELEAHLEAEEGARQKLQLEKVTTEAKMKKFEEDLLLLEDQNSKLSKERKLLEDRLAEFSSQAAEEEEKVKSLNKLRLKYEATIADMEDRLRKEEKGRQELEKLKRRLDGESSELQEQMVEQQQRAEELRAQLGRKEEELQAALARAEDEGGARAQLLKSLREAQAALAEAQEDLESERVARTKAEKQRRDLGEELEALRGELEDTLDSTNAQQELRSKREQEVTELKKTLEEETRIHEAAVQELRQRHGQALGELAEQLEQARRGKGAWEKTRLALEAEVSELRAELSSLQTARQEGEQRRRRLELQLQEVQGRAGDGERARAEAAEKLQRAQAELENVSGALNEAESKTIRLSKELSSTEAQLHDAQELLQEETRAKLALGSRVRAMEAEAAGLREQLEEEAAARERAGRELQTAQAQLSEWRRRQEEEAGALEAGEEARRRAAREAEALTQRLAEKTETVDRLERGRRRLQQELDDATMDLEQQRQLVSTLEKKQRKFDQVGHLSSPSRGISKSIYASHGRSNLFPPTPSPSNWKLLAEEKAAVLRAVEERERAEAEGREREARALSLTRALEEEQEAREELERQNRALRAELEALLSSKDDVGKSVSRAPAPRDTL

SEQ ID NO: 50392 - protein, 584 aa, Homo sapiens
  DOMAIN (445)..(456): Trp-Asp (WD) repeat proteins proteins domain identified by eMATRIX, accession number BL00678, p-value=8.615e-11, raw score of 9.67
  DOMAIN (239)..(382): Myosin head (motor domain) domain identified by PFam, accession name myosin_head, E-value=2.7e-42, PFam score of 148.0
MLSSVCVSSFRGRQGASKQQPAPPRQPPESPPPPPLPPQQHQPAQPAPRVPRRAPGTPRARGGRAVAFCWIVLFILHHCGVIMTDTYLDDVILGRRSVRHGIAIIFPRTHPSRDWDLTSPASKDSPNGCMQGPISSVGPTMTEALQSQVYKLSFDLDSGFRQPQVRPPLKSRLAGLQPHPALTLQHAPIGPLGHCVHVGWHLVALLAPVHLHNGFCVDGKLLVRVDDHTEKAGVRLQWAGKLEPRLVLDQLRCNGVLEGIRICRQGFPNRILFQEFRQRLGNTIQALELDPNLYRVGQSKIFFRAGVLAQLEEERDLKVTDIIVSFQAAARGYLARSGGHRGAGTVGQLYKESLSRLMATLSNTNPSFVRCIVPNHEKRHGSHAHHEHITVLQRFMPVLGQFMAQIWGPVPNTWVYADTLSSMRVTEWVSCVRFLPNSSNPITVSCSWDKLVKVWNLANCKLKTNHIGHTGYLNTVTMSPNGSLCASGGKDGQAMLWDLNEGKHLYMPDGGGIINTLCFSPNCYWLCAAMGPSIKIWDLGVNIIVDELKQEVISTGSKAEPPQCTSLAWSVGGHLFAGYTDNLV

SEQ ID NO: 50393 - protein, 122 aa, Homo sapiens
  misc_feature (1)...(122): Xaa = X or * as defined in Table 2
QVCLYPGWQHSPGRQRVSGXAHLHTAPLWICQXSGDCDWHESXGGGMXCVRFEPPRTSSPPSATSGSLLKXKEKTGLSNSPCSTSTSSGGRTPSTDRMGKTRRQYPSGAGNSEDKVGFPQVF

SEQ ID NO: 50394 - protein, 32 aa, Homo sapiens
IQGGFTKNSALTRHQTVHMKAVLSSQEGRDAL

SEQ ID NO: 50395 - protein, 236 aa, Homo sapiens
  DOMAIN (132)..(145): PROTEIN ZINC-FINGER METAL-BINDI domain identified by eMATRIX, accession number PD00066, p-value=7.300e-17, raw score of 13.92
  DOMAIN (57)..(223): Zinc finger, C2H2 type domain identified by PFam, accession name zf-C2H2, E-value=1.4e-31, PFam score of 118.3
  misc_feature (1)...(236): Xaa = X or * as defined in Table 2
GRKTPSQGRRWSSPRVFLLPGGPKPCYTYPLVGEKLLFRVLPLFPHKPSASNLEKVSHCPECGKTFSRSSYLVRHQRIHTGEKPSQVPVECGKGFXXALPTCTAHHYGTHTGERPYQCGQCGKSFNQSSSLIVHQRTHTGEKPYQCIVCGKRFNISSQFSAHRRIHTGESPYKCAVCGKIFNNSSHFSAHRKTHTGEKPYRCSHCERGFTKNSALTRHQTVHMKAVLSSQEGRDAL

SEQ ID NO: 50396 - protein, 224 aa, Homo sapiens
  misc_feature (1)...(224): Xaa = X or * as defined in Table 2
AQERKALKSTPSHSSFSRWLSRIILKNGSSSSSSSSSSSSSSSSLRERERKSCENVNITRNRRLTAETIADTIDTSNGSVFLIWTERXEWNWLPKPWHQYQLQARASLSEEILNNRWEQDPEAFRQDPEDQARSQWLPRGGSAPVKQRLLLHHDSVPDHAFLRTRAAGQDLPWETVRRPPDNPDLAPADFSLFPCLGKLLAERRCFSLQRRVPWPPENQPPHRQ

SEQ ID NO: 50397 - protein, 144 aa, Homo sapiens
STLIGSSSHVEWEDAVHIIPQNESDDEEEEEKGPVSPRNLQESEEEEVPQESWDEGHRWDQVKKEDQEATGPRLSRELLDEKEPEVLQDSLDRCYSTPSVYLGLTDSCQPYRSAFYVLEQQRIGLAVDMDEIEKCQEVEEDQDP

SEQ ID NO: 50398 - protein, 43 aa, Homo sapiens
MHKRNFHRAGRSQAVQDNWKELNNIYPVSPARLQALLPPAAPC

SEQ ID NO: 50399 - protein, 31 aa, Homo sapiens
LMEVEEPEVLQDSLDICYSTPSMYFELPDNC

SEQ ID NO: 50400 - protein, 40 aa, Homo sapiens
  misc_feature (1)...(40): Xaa = X or * as defined in Table 2
DLLCPQMGXGWKLTALSLQCSLQDGIERSRAKASQCCLSI

SEQ ID NO: 50401 - protein, 101 aa, Homo sapiens
MKVIRLSQFLLKGHRWDQVKKEDQEATGPRLSRELLAEKEPEVLQDSLDRCYSTPSVYLGLTDSCQPYRSAFYVLEQQRVGLAVDMDEIEKYQEVEEDQDP

SEQ ID NO: 50402 - protein, 50 aa, Homo sapiens
MGQWAWLYSYFKSMPVPTCAQSEDNGPTLGVTHSHNCAAHAGSDQPDILI

SEQ ID NO: 50403 - protein, 987 aa, Homo sapiens
MLRNERQFKEEKLAEQLKQAEELRQYKVLVHAQERELTQLREKLREGRDASRSLNEHLQALLTPDEPDKSQGQDLQEQLAEGCRLAQHLVQKLSPENDNDDDEDVQVEVAEKVQKSSAPREMQKAEEKEVPEDSLEECAITCSNSHGPYDSNQPHRKTKITFEEDKVDSTLIGSSSHVEWEDAVHIIPENESDDEEEEEKGPVSPRNLQESEEEEVPQESWDEGYSTLSIPPEMLASYKSYSSTFHSLEEQQVCMAVDIGSEYSIVKVIKLQFMAQSQAMPVPTWTDCHDIELKAGHRWDQVKKEDHEATGPRLSRELLDEKGPEVLQDSLDRCYSTPSGCLELTDSCQPYRSAFYVLEQQRVGLAVNMDEIEKYQEVEEDQDPSCPRLSRELLDEKEPEVLQDSLGRCYSTPSGYLELPDLGQPYSSAVYSLEEQYLGLALDVDRIKKDQEEEEDQGPPCPRLSRELLEVVEPEVLQDSLDRCYSTPSSCLEQPDSCQPYGSSFYALEEKHVGFSLDVGEIEKKGKGKKRRGRRSKKERRRGRKEGEEDQNPPCPRLSRELLDEKGPEVLQDSLDRCYSTPSGCLELTDSCQPYRSAFYILEQQRVGLAVDMDEIEKYQEVEEDQDPSCPRLSGELLDEKEPEVLQESLDRCYSTPSGCLELTDSCQPYRSAFYILEQQRVGLAVDMDEIEKYQEVEEDQDPSCPRLSRELLDEKEPEVLQDSLGRCYSTPSGYLELPDLGQPYSSAVYSLEEQYLGLALDVDRIKKDQEEEEDQGPPCPRLSRELLEVVEPEVLQDSLDRCYSTPSSCLEQPDSCQPYGSSFYALEEKHVGFSLDVGENRSQEPLAGDSMSPRTLPVQNMSNAMFLQKTLNLSFIGVFEPKHIPVTFCDYHLAPTLVLVFGAVPGSWCLCLGHQEPGTARHQLEGRTHETSSVPCILRARPAGRLSKALEDRRDWSVAFGAAAELPLPSSDPVFRTGAPPEQGSW

SEQ ID NO: 50404 - protein, 35 aa, Homo sapiens
MKEPKPVFSRLDLRPTGIFLSKSPVLTLTRLMSLC

SEQ ID NO: 50405 - protein, 42 aa, Homo sapiens
  misc_feature (1)...(42): Xaa = X or * as defined in Table 2
AGAVQFQALGVPNKDTKSLELHQKPKPRXGQDDNHRMSPVYV

SEQ ID NO: 50406 - protein, 150 aa, Homo sapiens
KEEQEDLLRKRERELTALKGALKEEVSSHDQEMDKLKEQYDAELQALRESVEEATKNVEVLASRSNTSEQDQAGTEMRVKLLLAEKEPEVLQDSLDRWYSTPSGYLELPDLGQPYRSAVYSLEEQYLGLALDVDRIKKDQEEEEDQGPPC

SEQ ID NO: 50407 - protein, 439 aa, Homo sapiens
  DOMAIN (355)..(397): Beta-lactamase class-A proteins domain identified by eMATRIX, accession number BL00146D, p-value=8.977e-25, raw score of 23.11
  DOMAIN (320)..(396): Beta-lactamase domain identified by PFam, accession name beta -lactamase, E-value=5.5e-17, PFam score of 64.3
MWICPGGRGGGGGGGDREDTRPAPRSAVGAAGALAVLRDPRAWREAGSKSQKLLFRSARVHRRWAVLPFRYRVSWENESDDEEEEEKGPVSPRNLQESEEEEVPQESWDEGYSTLSIPPEMLASYQSYSSTFHSLEEQQVCMAVDIGRCREQTSPSGRVSGCWRVSGLDLLCGIRADCTESAPYAVSYSGTDALRTCWEGRSVRASSLLRQLAKGGCVARRLSWVTPGFSQSRRCKTTASAKLACMQVDSRGSRQKLYIIITIVIIIIISILTQSTELKKLTQLEKREMFARLIKLGNDRFFPINNVVKERPSPKLECFKNKRDTPMPVAMATFGRKLLTGELLTLASRQQLIDWMEADKVAGPLLRSALPDGWLIADKSGAVKLGSRGIIAALGPNVAISRVLPGWSQDDSYRIRRSGRAERGVRAHSPAWSERPTPN

SEQ ID NO: 50408 - protein, 450 aa, Homo sapiens
  DOMAIN (355)..(375): GASTRIN RECEPTOR SIGNATURE domain identified by eMATRIX, accession number PR00527I, p-value=9.294e-09, raw score of 5.36
MDKPRPGKTTFVIMVSPLPAPYTSPFTHMVTCPAHPRAFLALTHSWDPQVRPAVLNPLPRHGSSFVVKQPVAKQQPLRCLIYIEVALSVMSPTAPSSSRSPWKRPGLRPGFEQPGGSREAERLVGSRDGSSRSLHSLHPVREPVPSLLSRIRGAAELPLPSSDPAFGTGAPPGQGSWQYKVLVHAQERELTQLREKLREGRDASRSLNEHLQALLTPDEPDKSQGQDLQEQLAEGCRLAQHLVQKLSPENDNDDDEDVQVELAEKVQKSSAPREMQKAEEKEVPEDSQEECAITYSNSHGPYDSNQPHRKTKITFEEDKVDSTLIGSSSHVEWEDAVHIIPENESDDEEEEEKGPVSPRSPRKRPRPRPEPPPRGSGEAERSVGSWDASSRSLRRLHPLREPVPTLPSRFRGRCGASAAIFGSCVPHGGSTRAVMMKKSSKQKIYYPEKR

SEQ ID NO: 50409 - protein, 530 aa, Homo sapiens
  misc_feature (1)...(530): Xaa = X or * as defined in Table 2
FPLAYSLLFPPCSRLSRELLEVVEPEVLQDSLDRCYSTPSSCLEQPDSCQPYGSSFYALEEKHVGFSLDVGEIEKKGKGKKRRGRRSTKKRRRRGRKEGEEDQNPPCPRLSRELLAEKEPEVLQDSLDRWYSTPSVYLGLTDPCQPCRSAFYVLEQQRVGLAVDMDEIEKYQEVEEDQDPSCPRXLXAITDAXFCVDTWRCQVQGKQECVQFHVFNEGXITPTDIAVGFHCSRCLGFHFFLPLSFTHLLXVDHTSKAVWQLHGILSKFMENYXAHSFHDHCSLCVPRALTQSVLXPLHQCVTRPIRXAHFLLSLSLPLPVFLFHSFLPGPGLSQHKGNNSLPHXWICPFSFXTVPYVSHEIXLGLCGFXFPLAYSLLFPTCSRLSRELLDEKEPEVLQDSLDRCYSTPSGYLELPDLGQPYSSAVYSLEEQYLGLALDVDRIKKDQEEEEDQGPPCPRLSRELLEVVEPEVLQDSLDRCYSTPSSCLEQPDSCQPYGSSFYALEEKHVGFSLDVGEIEKKGKGKKRRGRR

SEQ ID NO: 50410 - protein, 1332 aa, Homo sapiens
  misc_feature (1)...(1332): Xaa = X or * as defined in Table 2
LHLFCHKRQHGGISRALGSSKKPEMNILEISETLRPQLAEKKQQFRSLKEKCFLTQLAGFLANRQKKYKYEECKDLIKFMLRNERQFKEEKLAEQLKQAEELRQYKVVVHSQERELNQLREKLREGRDASRSLYEHLQALLTPDEPDKSQGQDLQEQLAEGCRLAQHLVQKLSPENDEDEDEDVQVEEAEKVLESSAPREVQKAEESKVPEDSLEECAITCSNSHGPCDSNQPHKNIKITFEEDEVNSTLVVDRESSHDECQDALNILPVPGPTSSATNVSMVVSAGPLSSEKAEMNILEINEKLRPQLAEKKQQFRNLKEKCFLTQLSGFLANQQKKYKYEECKDLIKFMLRNERQFKEEKLAEQLKQAEELRQYKVLVHAQERELTQLKEKLREGRDASRSLNEHLQALLTPYEPDKSQGQDLQEQLAEGCRLAQHLVQKLSPENDNDDDEDVQVEVAEKVQKSSAPREMQKAEEKEVPEDSLEECAITYSNSHGSYDSNQPHRKTKITFEEDKVDSTLIGSSSHVEWEDAVHIIPENESDDEEEEEKGPVSPRNLQESEEEEVPQESWDEGYSTLSIPPEMLASYQSYSSTFHSLEEQQVCMAVDIGSEYSIVKVIKLQFMAQASVTLVYLSVKDVTQVSLNLFPFSVSSKFACFSSSVRHVPGHRWDQVKKEDQEATGPSRELLDEKGPEVLQDSQDRCYSTPSGCLELTDSCQPYRSAFYILEQQRVGLAIDMDEIEKYQEVEEDQDPSCPRLSRELLDEKEPEVLQDSLDRCYSTPSGYLELPDLGQPYSSAVYSLEEQYLGLALDVDRIKKDQEEEEDQDPPCPRLSRELLEVVEPEVLQDSLDRCYSTPSSCLEQPDSCQPYGSSFYALEEKHVGFSLDVGEIEKKGKGKKRRGRRSKKERRRGRKEGEEDQNPPCPRLSRELLNEKGPEVLQDSLDRCYSTPSGCLELTDSCQPYRSAFYVLEQQRVGLAVDMDEIEKYKEVEEDQDPSCPRLSRELLGEKEPEVLQDSLDRCYSIPSGYLELPDLGQPYKQVLFYSLEEQYLGLALDVDEIKKDEEEEEDQDPPCPRLSRELLEVVEPEVLQDSLDRCYSTPFSFLEQADSCQPYGSSFYALEEKHVGFSLDVGEIEKKGKGKKRRGRRSKKERRGGRKEGEEEENPPCPRLSRELLDEKGPEVLQDSLDRXYSTPSGWLELTDSCQPYRSAFYVLEQQRIGLAVDMDEIEKYQEVEEDQDPSCPRLSRELLDEKEPEVLQDSLDRCYSTPSGYLELPDLGQPYSSAVYSLEEQYLGLALDVDRIKKDQEEEEDQDPLMPQAQQGAAGGSRA

SEQ ID NO: 50411 - protein, 947 aa, Homo sapiens
  misc_feature (1)...(947): Xaa = X or * as defined in Table 2
GRRVCLFSEDEECKDLIKFMLRNERQFKEEKLAEQLKQAEELRQYKVLVHAQERELTQLREKLREGRDASRSLNEHLQALLTPDEPDKSQGQDLQEQLAEGCRLTQHLVQKLSPENDNDDDEGVSQVEVAEKVQKSSAPREMQKAEEKEVPEDSLEECAITCSNSHGPYDSNQPHKKTKITFEEDKVDSTLIGSSSHVEWEDAVHIIPENESDDEEEEEKGPVSPRNLQESEEEEVPQTPWHEXLSHLSILSEMLASYKSYSSTFHSLEEQQVCMAVDIGRHRWDQDDRDDHEATGPMLSRELLDEKGPEVLQDSLDRCHSTPSGWLELTDSCQPYRSAFLHYWSQQRVGWALDMDEIEKYQEVEEDQDPSCPRLSRELLDEKEPEVLQDSLDRCYSTPSGYLELPDLGQPYRSAVYSLEEQYLGLALDVDRIKKDQEEEEDQGPPCPRLSRELLEVVEPEVLQDSLDRCYSTPSSCLEQPDSCQPYGSSFYALEEKHVGFSLDVGEIEKKGKGKKRRGRRSMKKRRRRGRKEGEEDQNPPCPRLSRELLDEKGPEVLQDSLDRCYSTPSGCLELTDSCQPYRSAFYILEQQRVGLAVDMDEIEKYQEVEEDQDPSCPRLSGELLDEKEPEVLQESLDRCYSTPSGCLELTDSCQPYRSAFYILEQQRVGLAVDMDEIEKYQEVEEDQDPSCPRLSRELLAEKEPEVLQDSLDRCYSTPSGYLELPDLGQPYSSAVYSLEEQYLGLVLDVDRIKKDQEEEEDEDQGPPCPPGLSRELLEVVEPEVLQDSLDRCYSTPSSCLEQPDSCQPYGSSFYALEEKHVGFSLDVGEIEKKGKGKKRRGRRSTKKRRRRGRKEGEEDQNPPCPRLSGVLMEVEEPEILQDSLDRYYSTPSMYFELPDSFQHXRSVFYSFEEQHISFALDMDNRFFTLTVRSLHLVFQMGVIFPQ

SEQ ID NO: 50412 - protein, 133 aa, Homo sapiens
  misc_feature (1)...(133): Xaa = X or * as defined in Table 2
ILSVLIAVLCVVGKIPLKEPLCPAAGSAAEACVGQGMPVIQVPCSQQRPSSMCWPRNACQSSRALGGDESYVPKNRKSFTKHPVSSCPSPSLGWGRGXRPGGPGRSPGLALGFPSFSGPAGFGQGTSSPRFWG

SEQ ID NO: 50413 - protein, 62 aa, Homo sapiens
  misc_feature (1)...(62): Xaa = X or * as defined in Table 2
RPLVESRGIPRSPAASFSTACPRNTASIPSAPSWWETAWTQTSSXAPPVAXRPSXPSPESPL

SEQ ID NO: 50414 - protein, 235 aa, Homo sapiens
  DOMAIN (92)..(137): Synaptophysin / synaptoporin proteins domain identified by eMATRIX, accession number BL00604F, p-value=1.761e-10, raw score of 5.96
  misc_feature (1)...(235): Xaa = X or * as defined in Table 2
MGVLMHRRCTKAPAWAVATYEAPLHCQQLLGVVGVLAGDPSLLDLGGIHQQPQGLPITVLHQAEEADLVLLRAVTDAAALPVEQHRPXGAPGLLPPPDGGQXSGDPAAAGGYLQGPRGLGPQPGHPPHPGAAGSAGEPRKWLPPRRGLWCSACAXGPPSTGPGEQRGPGDSGXFISASTSASRATSACRSAFITSQTEPPTWPSLARPQSSGLARPPAPGRTAAGRDXXTLPPGK

SEQ ID NO: 50415 - protein, 285 aa, Homo sapiens
  DOMAIN (83)..(110): C1q domain proteins domain identified by eMATRIX, accession number BL01113A, p-value=4.981e-09, raw score of 17.99
  misc_feature (1)...(285): Xaa = X or * as defined in Table 2
SLGGNKSRPTRRCCSGSRCRCRDKSAAVSGALWRGCRESPRAPPPAPQTIPRAWPSPTAVLTHPLLAGPSRWGSSCTGAAPKPPPGRGPLRGSPALPAAPGCGGCPGWGPKPLGPWRYPPAAAGSPDHCPPSGGGSRPGAPQGGNRCSRSARRTAPPSCGCSEVGSLXWSPRSGPRPPGWFGWAGACGGSGGSFAASAALAWEGPEQSQEALQPQSPQRPAPAAAAAGAGPRLSSPRRRAWSSPGXHGIPWPTHASAALPAAGHRGSFSGILPXRAGKRSAMLST

SEQ ID NO: 50416 - protein, 43 aa, Homo sapiens
  DOMAIN (9)..(40): HMG14 and HMG17 proteins domain identified by eMATRIX, accession number BL00355, p-value=2.446e-24, raw score of 5.97
VSSAEGAAKEEPKRRSARLSAKPPAKVEAKPKKAAAKILQTPK

SEQ ID NO: 50417 - protein, 310 aa, Homo sapiens
  DOMAIN (246)..(277): HMG14 and HMG17 proteins domain identified by eMATRIX, accession number BL00355, p-value=8.800e-33, raw score of 5.97
  DOMAIN (234)..(310): HMG14 and HMG17 domain identified by PFam, accession name HMG14_17, E-value=2e-23, PFam score of 91.2
MESPWRQWRLRKVARSGGGRLSNKRKLHLKKKKKGERGGGGAEREKAAAAVAPGCKAGAGNAKKFVQNGPGTKESSASQVPTGPSAAGLLEFARGPLQTLFAWVSAAVSAEPRIFMIRECCCLIVPLEVLSQRSTWPCEFLISDCCASNQQDSMGVGPSEPGAGYNLLVRHFLSPSEKCSIRVGVARFSRVLPPPLLGISAARAAGGAARQAAQLREGSRCPRLTDIPHAPSTPPEQGHSAEGAAKEEPKRRSARLSAKPAPAKVEAKPKKAAAKDKSSDKQVQTKGKRGAKGKQAEVANQETKEHLPAV

SEQ ID NO: 50418 - protein, 73 aa, Homo sapiens
  DOMAIN (49)..(60): NONHISTONE CHROMOSOMAL PROTEIN HMG17 FAMILY SIGNATURE domain identified by eMATRIX, accession number PR00925D, p-value=1.563e- 09, raw score of 6.56
  DOMAIN (1)..(69): HMG14 and HMG17 domain identified by PFam, accession name HMG14_17, E-value=6.7e-11, PFam score of 49.7
ENAKVEAKLKKAAAKDKSSGKNVQTKGKRRAKGKQAKVANQETKEDLPAENGEMKTEESPASDEAGEKETKSD

SEQ ID NO: 50419 - protein, 428 aa, Homo sapiens
  DOMAIN (291)..(346): Beta-lactamase class-A proteins domain identified by eMATRIX, accession number BL00146C, p-value=1.000e-40, raw score of 25.08
  DOMAIN (176)..(386): Beta-lactamase domain identified by PFam, accession name beta -lactamase, E-value=6.8e-106, PFam score of 365.2
MNGLRFPCFVKSAPDLSAINQPAGRAERRSGPATLSASIQSINCCREARVSSSPVNSLRNVVAIAAGIVVSRSSFAPVPNDQGELHDPPCCAKKRLAPSVLRSLSEQILQGCRPFGCALEALVAAAGTAIAVVDVCKAKFRLHMWPTDTVILRNLHAMVSTAITITADIHRLMQTLVKVKDAEDQLGARVGYIELDLNSGKILESFRPEERFPMMSTFKVLLCGAVLSRIDAGQEQLGRRIHYSQNDLVEYSPVTEKHLTDGMTVRELCSAAITMSDNTAANLLLTTIGGPKELTAFLHNMGDHVTRLDRWEPELNEAIPNDERDTTMPVAMATTLRKLLTGELLTLASRQQLIDWMEADKVAGPLLRSALPAGWFIADKSGAGGRSLWKNASNAAFLRFLAFCWPFAHMFFPALSPDSVDNRITAFE

SEQ ID NO: 50420 - protein, 85 aa, Homo sapiens
MSYQWVPVSLLVQSRGNIFINYFVNASFLRSSRNIFKEGGNPPLIPIFLKCKCFFFKKVKSFAWLFIFWYNQKNSVGIFEFMGRL

SEQ ID NO: 50421 - protein, 1141 aa, Homo sapiens; identical to SEQ ID NO: 38073
  DOMAIN (798)..(813): Kinesin motor domain proteins domain identified by eMATRIX, accession number BL00411A, p-value=4.977e-09, raw score of 11.31
  misc_feature (1)...(1141): Xaa = X or * as defined in Table 2

SEQ ID NO: 50422 - protein, 893 aa, Homo sapiens
MYQELKDEDDEDDCFILEKAARGKRPIFECFWNGRLIPYTSVEDFDWCTPPKKRGLAPIECYNRISGALFTNDKFQVSTNKLTFMDLELKLKDKNTLFTRILNGQEQRMKIDREFALWLKDCHEKYDKQIKFTLFKGVITRPDLPSKKQGPWATYAAIEWDGKIYKAGQLEPQALYDEVRTVPIAKLDRTVAEKAVKKYVEDEMARLPDRLSVTWPEGDELLPNEVRPAGTPIGALRIEILNKKGEAMQKLPGTSHGGSKKLLVELKVILHYLLQQYRSAVCKLDSVNKDLNSQLEYLRTPDMRKKKQELDEHEKNLKLIEEKLGMTPIRKCNDSLRHSPKVETTDCPVPPKRMRREATRQNRAQAPALAGVARQFSGPEGMLQGGAEQPLPCQRSSMGKVGSLGLHNLAGDSGTRFSTVLTWLDSLLPSAAGSKLKQPAKSQAVCPQIVNLSQAAKRFCAARCDLGSGMAAFYLYHPGLGVWVEHFPLFPMLSKSDPVLENIQKLGNYTLKLQVVLNESNADTYAGRPLPSKAIKFSVKEGKPEKFSFGLLDLPFRVGVPFNIPLEFQDEFGHTSQLVTDIQPVLEASGLSLHYEEITKGPNCVIRGVTAKGPVNSCQGKSCKDVAPVEKTIKLLPSSHVARLQIFSVEGQKAIQIKHQDEVNWIAGDIMHNLIFQMYDEGEREINITSALAEKIKVNWTPEINKEHLLQGLLPDVQVPTSVKDMRYCQVSFQDDHVSLESAFTVSMLELLQLMVSLKTSNLLNNFRPLPDEPKHLKCEMKGGKTVQMGQELQGEVVIIITDQYGNQIQAFSPSSLSSLSIAGVGLDSSNLKTTFQENTQSISVRGIKFIPGPPGNKDLCFTWREFSDFIRVQLISGPPAKLLLIDWPELKE

SEQ ID NO: 50423 - protein, 489 aa, Homo sapiens
MFYNDVKKQQQMAALTKEKDQLSQSIVMYKSLFEASQQLLNEMKCQVEEARLKEAQLRNELKIHNIDIPTTQQVPHIEALLKRKLSEQEELKKKPRRSCTLPNYTKGSGDVLGKSCKDVAPVEKTIKLLPSSHVARLQIFSVEGQKAIQIKHQDEVNWIAGDIMHNLIFQMYDEGEREINITSALAEKIKVNWTPEINKEHLLQGLLPDVQVPTSVKDMRYCQVSFQDDHVSLESAFTVSMLELLQLMVSLKTSNLLNNFRPLPDEPKHLKCEMKGGKTVQMGQELQGEVENIQKLGNYTLKLQVVLNESNADTYAGRPLPSKAIKFSVKEGKPEKFSFGLLDLPFRVGVPFNIPLEFQDEFGHTSQLVTDIQPVLEARRGLFKSLSASVAFTQRSEIDSKWDVTATSLDVQDLKATLRTVDGQLHAEVWLEDVAPGKRKHRVTKVLEEGGVPVLQTSESPGQGKSRRKDVSHSCDFCRRTWAIKKERK

SEQ ID NO: 50424 - protein, 57 aa, Homo sapiens
  misc_feature (1)...(57): Xaa = X or * as defined in Table 2
NPCKKGVLIFQFXLKIHKRQFICADLEFVISEXCTRYPIVAFNWCKPSLLRRSTPVK

SEQ ID NO: 50425 - protein, 307 aa, Homo sapiens
MVIVEVLPNQPVKLVPKIKPPTPAVSNVRSVASRTLVRDLHLSITFSGAPNLPVYVVDCSSSGTSILTGSAIQVQNIKKDQTLKARIEIPIAHLAQIEDDRAAMVISWHLASDMDCVVTLTTDAARRIYDETQGRQQVLPLDSIYKKTLPDWKRSLPHFRNGKLYFKPIGDPVFARDLLTFPDNVEHCETVFGMLLGDTIILDNLDAANHYRKEDVLQPETDSQSEDRLPVTWLAVSACCQQQMGQSTGLGPVEVTQSSPSSRTSEYFWLTKHFRTRNLAHLNAPYFVSALITILKQEGKKKTYWHV

SEQ ID NO: 50426 - protein, 52 aa, Homo sapiens
ALSGWVAVDAACGKLQAGGTRRAQSPPKRARGSLCRENRRYESRRPFFLLIS

SEQ ID NO: 50427 - protein, 1060 aa, Homo sapiens
  DOMAIN (830)..(882): ELEMENT TRANSPOSABLE INSERTION PROTEIN TRANSPOSITION DNA domain identified by eMATRIX, accession number PD02455C, p-value= 2.350e-09, raw score of 29.23
  DOMAIN (764)..(919): Integrase core domain identified by PFam, accession name rve, E-value=4.3e-30, PFam score of 108.1
MAEDKEEQVPSYTDGSRQRENEEDTRVKTPDKTIRSHETYSLPREQYGGNYAHDSIISHQVPPTTCGNYGSTIQDEIWVGDHSGYVRPVPVPRSLNSDISYFGVGGKQAVFFVGQSARMISKPADSQDVHELVLSKEDFEKKEKNKEAIYSGYIRNRKDDYDNHTGIDLVGTIIATIKGSNEEDTDTPLFIGKVRTLEFPFVNGSAEIMLMPSNQQHKTDEKGRANLGVFSVFAPRGEHTLQVKAIYNKSIIEGPIIKLMILPDPEKPVRLNVKYDKDASFLAGGLFTAPPLPAQLMSSLSCAWIIESVLNSWRKGCNKLRNQRALHKKQDRGKLPEDRELQHTKKQTNWAGLLIPAMNNNVDMTARKLQRDLQPFTSVTVHCRKGNDQTFGGPLDAGSELTLIPGDPKHHCGPPVKVGAYGGQVINGVLAQPSYLACAEDRWILRMTVDYCKLNQVVIPIAAAVSDVVSLLEQINTSPGTWYAAIDLANAFFSIPVHKAQQKQFAFSWQGQQYTFTVLPQWYINSPALCHNLIRRDLDCFSLPLDITLVHYIDDIMLIGSSEQEVANTLDLFVRHLRARGWEINPTKIQGPSTSVKFLGFQWCGACQAIPSKMRDKLLHLVPPTTKKEAQCLTALGLLLALVETEHLTISHQVTMRPELPIMNWVLFDPSSHKVGCAQQHSIIKWKWYVHDWARAGPEGTTTPVISQWPHEQCGHGGRDGGYAWAQQCRLPLTKADLNTATAKRPICQQQRPTLSPQYGTIPQGDQPATWWWVDYMGSLPSWKGQRFVLTGIDTYSGYGFAYPACNASAKTAICGLTECLIHHHDIPHSIASDQGTHFMAKEVRQWAHDHGIHWSYHVSHHPEAAGLIEWWNGLLKSQLQCQLGDNTWQGWGKVLQKVVYALNQHPIYGTVSPIAKIHRSRNQGLEVAPLTITPRDPLAKFLLPFPATLQSAGLEVLVPEEGTLPPGDTMIPLNWKLRLPPRHFGLLLPLNQQAKKGVTVLAGVTDLDYKDEITLLLHNGGKEEYAWNTGDPLGLLLILPCPMIKVNGKLQQLKPDHPR

SEQ ID NO: 50428 - protein, 436 aa, Homo sapiens
  DOMAIN (377)..(392): Kinesin motor domain proteins domain identified by eMATRIX, accession number BL00411A, p-value=4.977e-09, raw score of 11.31
MLYWSVTARPIDKSSGQVSMCVIRRPFKAHHCKAQILLFEGAPEILKVAIHNSTNKKLPVAFFKLFRGRAGVGRRVFTGSLGPSWQSPPLKPGQHLHSNCVTVLYLVTYLGLKFTRYLWTEGMASLFTGCRYKQLPALDPNKEDSGMQDPACSPGWPRGDVGLLSPDLTGGQLEERWQRLQSQVISELDACKECTQGVQREVSMVEGRVSHMEKTCSKLDSISGNLQRIKEGLNKHVSSLWNCVRQMNGTLRSHSRDISGLKNSVQQFYSHVFQISTDLQDLVKFQPSANGDRIRSNGKFGGLQNKAPPMDKLRGMVFGAPVPKQCLILGEQIGALRIEILNKKGEAMQKLPGTSHGGSKKLLVELKVILHFWKKINITVILRCRSLTKVLLATERTFETAGVGGLILDNEPSQFSEPRKTLSPTGTAQPSWGVDP

SEQ ID NO: 50429 - protein, 1300 aa, Homo sapiens
  misc_feature (1)...(1300): Xaa = X or * as defined in Table 2
MFYNDVKKQQQMAALTKEKDQLSQSIVMYKSLFEASQQLLNEMKCQVEEARLKEAQLRNELKIHNIDIPTTQQVPHIEALLKRKLSEQEELKKKPRRSCTLPNYTKGSGDVLGKIAHLAQIEDDRAAMVISWHLASDMDCVVTLTTDAARRIYDETQGRQQVLPLDSIYKKTLPDWKRSLPHFRNGKLYFKPIGDPVFARDLLTFPDNVEHCETVFGMLLGDTIILDNLDAANHYRKEVVKITHCPTLLTRDGDRIRSNGKFGGLQNKAPPMDKLRGMVFGAPVPKQCLILGEQIVINGRDLQNPIIVQLCDQWDNPAPVQHVKISLTKASNLKLMPSNQQHKTDEKGRANLGVFSVFAPRGEHTLQVKAIYNKSIIEGPIIKLMILPDPEKPVRLNVKYDKDASFLAGGLFTDFMISVISEDDSIIKNINPARISMKMWKLSTSGNRPPANVIVEVLPNQPVKLVPKIKPPTPAVSNVRSVASRTLVRDLHLSITDDYDNHTGIDLVGTIIATIKGSNEEDTDTPLFIGKVRTLEFPFVNGSAEIMMLPALEHWTPSPSVLRLGLALLAPQVADSLLWDLVDRLADSLLXDLVIMLLKLHTVLHCXPEMEIEFEVMESLGAFRIKLLQWINFGEWYLERPVPKQCLILGEQIAQIEDDRAAMVISWHLASDMDCVVTLTTDAARRIYDETQGRQQVLPLDSIYKKTLPDWKRSLPHFRNGKLYFKPIGDPVFARDLLTFPDNVEHCETVFGMLLGDTIILDNLDAANHYRKEVVKITHCPTLLTRDGDRIRSNGKFGGLQNKAPPMDKLRGMVFGAPVPKQCLILGEQIVINGRDLQNPIIVQLCDQWDNPAPVQHVKISLTKASNLKLMPSNQQHKTDEKGRANLGVFSVFAPRGEHTLQVKAIYNKSIIEGPIIKLMILPDPEKPVRLNVKYDKDASFLAGGLFTDFMISVISEDDSIIKNINPARISMKMWKLSTSGNRPPANVIVEVLPNQPVKLVPKIKPPTPAVSNVRSVASRTLVRDLHLSITDDYDNHTGIDLVGTIIATIKGSNEEDTDTPLFIGKVRTLEFPFVNGSAEIMMLPALEHWTPSPSVLRLGLALLAPQACRQPIVGPCGSSCRQPTVRPCDHVVKITHCPTLLTRDGDRIRSNGKFGGLQNKAPPMDKLRGMVFGAPVPKQCLILGEQIAQIEDDRAAMVISWHLASDMDCVVTLTTDAARRIYDETQGRQQVLPLDSIYKKTLPDWKRSLPHFRNGKLYFKPIGDPVFARDLLTFPDNVEHCETGKRHYGDFTFVQMLNL

SEQ ID NO: 50430 - protein, 848 aa, Homo sapiens
GKTVQMGQELQGEVVIIITDQYGNQIQAFSPSSLSSLSIAGVGLDSSNLKTTFQENTQSISVRGIKFIPGPPGNKDLCFTWREFSDFIRVQLISGPPAKLLLIDWPELKESIPVINGRDLQNPIIVQLCDQWDNPAPVQHVKISLTKASNLKLMPSNQQHKTDEKGRANLGVFSVFAPRGEHTLQVKAIYNKSIIEGPIIKLMILPDPEKPVRLNVKYDKDASFLAGGLFTDFMISVISEDDSIIKNINPARISMKMWKLSTSGNRPPANAETFSCNKIKDNDKEDGCFYFRDKVIPNKVGTYCIQFGFMMDKTNILNSEQVIVEVLPNQPVKLVPKIKPPTPAVSNVRSVASRTLVRDLHLSITDDYDNHTGIDLVGTIIATIKGSNEEDTDTPLFIGKVRTLEFPFVNGSAEIMSLVLAESSPGRDSTEYFIVFEPRLPLLSRTLEPYILPFMFYNDVKKQQQMAALTKEKDQLSQSIVMYKSLFEASQQLLNEMKCQVEEARLKEAQLRNELKIHNIDIPTTQQVPHIEALLKRKLSEQEELKKKPRRSCTLPNYTKGSGDVLGKIAHLAQIEDDRAAMVISWHLASDMDCVVTLTTDAARRIYDETQGRQQVLPLDSIYKKTLPDWKRSLPHFRNGKLYFKPIGDPVFARDLLTFPDNVEHCETVFGMLLGDTIILDNLDAANHYRKEVVKITHCPTLLTRDGDRIRSNGKFGGLQNKAPPMDKLRGMVFGAPVPKQCLILGEQIDLLQQYRSAVCKLDSVNKDLNSQLEYLRTPDMRKKKQELDEHEKNLKLIEEKLGMTPIRKCNDSLRHSPKVETTDCPVPPKRMRREATRQNRIITKTDV

SEQ ID NO: 50431 - protein, 1141 aa, Homo sapiens
  misc_feature (1)...(1141): Xaa = X or * as defined in Table 2
NRGLLFCFLFLHLHLKEHERHLATVYVFPILSCTIYRSVLLTSSQTIIYTHVGDREAQAALKLGRWSHPRTPNAVGAPGPPEGAGGGDAVTSQSALLTFSRTRFASGAHAGAHPVLLRNEEEKGAPALVAPIFSAEGPTCSLWWTLRPASTAGLKLPAAASTRPSQRGLTADGGGPGGASVGTEEDGGGVGHRTVYLFDRREKESELGDRPLQVGERSDYAGFRAYETVKDGVTLYLLQSVNQLLLTATKERIDFLPHYDTLVKSGMYEYYASEGQNPLRYVRPVPVPRSLNSDISYFGVGGKQAVFFVGQSARMISKPADSQDVHELVLSKEDFEKKEKNKEAIYSGYIRNRKPSDSVHITNDDERFLHHLIIEEKEKDSFTAVVITGVQPEHIQYLKNYFHLWTRQLAHIYHYYIHGPKGNEIRTSKEVEPFNNIDIEISMFEKGKVPKIVNLREIQDDMQTLYVNTAADSFEFKAHVEGDGVVEGIIRYHPFLYDRETYPDDPCFPSKLKDEDDEDDCFILEKAARGKRPIFECFWNGRLIPYTSVEDFDWCTPPKKRGLAPIECYNRISGALFTNDKFQVSTNKLTFMDLELKLKDKNTLFTRILNGQEWKELSMEGYPLPSPPPQRSCHLPLIGKQLRGHPHLFLKPASFWWVESPASEQMISFSQVRGLKAQHHAEAAKVWDFHPLKPQPKLYVGPFQPWLEWLGTGHQVPRLHTADVKKQQQMAALTKEKDQLSQSIVMYKSLFEASQQLLNEMKCQVEEARLKEAQLRNELKIHNIDIPTTQQVPHIEALLKRKLSEQEELKKKPRRSCTLPNYTKGSGDVLGKIAHLAQIEDDRAAMVISWHLASDMDLCXSPLTTXRLHVVIFMDGNPQGRSGRCLPLDSIYKKTLPDWKRSLPHFRNGKLYFKPIGDPVFARDLLTFPDNVEHCETVFGMLLGDTIILDNLDAANHYRKEVIVEVLPNQPVKLVPKIKPPTPAVSNVRSVASRTLVRDLHLSITDDYDNHTGIDLVGTIIATIKGSNEEDTDTPLFIGKVRTLEFPFVNGSAEIMLFDETQGKPAVAVIDNGRGMTSKQLNNWAVYRLSKFTRQGDFERALFAKHSGVESSGVIYQNVLVENILNEDVTGKTKCAKSHQT

SEQ ID NO: 50432 - protein, 86 aa, Homo sapiens
  misc_feature (1)...(86): Xaa = X or * as defined in Table 2
RGEMPGERLKAEVFLPPSPLSPTQVVGPLHRVWSXIGNASSQRGEAQVRSXVSFSLRLEDSTPWIPGTRALRGCWLWRDFQTLQSG

SEQ ID NO: 50433 - protein, 1230 aa, Homo sapiens
  DOMAIN (287)..(443): Integrase core domain identified by PFam, accession name rve, E-value=4.6e-11, PFam score of 42.3
  misc_feature (1)...(1230): Xaa = X or * as defined in Table 2
MNPIREMQVSGIALKGTMKGWTELPKSPVWTQGNKGRNYFTNLALSLLFEDDTKLNPYAGGDAIRVRISVGPFKGERFTVPGLASECGKNSFLRFPSNSRRKQLCGRVHGSFLWFSMMSQSMGGDNLSSLDTNEAEIEPENMREKFFRSLARLLENKSNNTKIFSKAKYCQLIKEVKEAKAKAKKESVDYRRLARFDVILVQGNEKLIEAVNGETDKIRYYLHSEDLFDILHNTHLSIGHGGRTRMEKELQAKYKNITKEVIMLYLTLCKPCQQKNSKLKKVLTSKSIKEVSSRCQVDLIDMQLNPDGEYRFILHYQDLCTKLTFLRSLKSKRPTEVAHALLDIFTIIGAPSVLQSDNGREFSSQVVSELSNIWPELKIVHGKSQTCQSQSSAEQTEDIRKRIFSWMQTNNSSHWTEFLWFIQMSQNQPYHRSMQQTPCESAFSSEAKLGLSHSQLTEELVASLHTENELDQADKELENTLRAQYEENIETGTDSSDIEENLSVTPKVAEKSPPESRLRFLSCVVCEKECTGVNSCISCDGNIHAICGVPSQHGTEGCGRQITCSLCYETSTMKRKHDEIQRSLPVKPSKMLKPSGTPFSPDKVGDWMAKQASLDFFVKKRHAFSEHSSSNKRNVNNRSYPEEGKTKRVHASFTRKYDPSYIEFGFVAVIDGEVLKPQCIICGDVLANEAMKPSKLKRHLYSKHKEISSQPKEFFERKSSELKSQPKQVFNVSHINISALRASYKVALPVAKSKTPYTIAETLVKDCIKEVCLEMLGESAAKKVAQVPLSNDTIARRIQELANDMEDQLIEQIKLAKYFSLQLDECRDIANMIILLVYVRFEHDDDIKEEFFFSASLPTNTTSSELYEAVKNYIVNKCGLEFKFCVGVCSDGAASMTGKHSEVVTQIKELAPECKTTHCFIHRESLAMKKISAELNSVLNDIVKIVNYIKSNSLNSRLFSLLCDNMEADHKQLLLHAEIRWLSRGKVLSRMFEIRNELLVFLQGKKPMWSQLFKDVNWTARLAYLSDIFSIFNDLNASMQGKNATYFSMADKVEGQKQKLEAWKNRISTDCYDMFHNLTTIINEVGNDLDIAHLRKVISEHLTNFXNVLNFIFHQKKIHAXEICGSRGPFLXSKDNLNLTVTLQDKLLKLATDEGLKISFENTASLPSFWIKAKNDYPELAEIALKLLLLFPSTYLCETGFSTLSVIKTKHRNSLNIHYPLRVALSSNPT

SEQ ID NO: 50434 - protein, 35 aa, Homo sapiens
  misc_feature (1)...(35): Xaa = X or * as defined in Table 2
PVHKRWSXNDECYRHCTVXXXQPGSEENNPALENR

SEQ ID NO: 50435 - protein, 60 aa, Homo sapiens
MNIWDTLWKKSKHIQMLALNYEMAWKYSNRTNPAVGYKLAFNYLKAKRYVDSIDICHQGS

SEQ ID NO: 50436 - protein, 2645 aa, Homo sapiens
  DOMAIN (1056)..(1077): Somatomedin B domain proteins domain identified by eMATRIX, accession number BL00524A, p-value=4.282e-09, raw score of 9.65
  DOMAIN (321)..(2604): TPR Domain domain identified by PFam, accession name TPR, E- value=6.3e-39, PFam score of 142.8
  misc_feature (1)...(2645): Xaa = X or * as defined in Table 2
MVILKDFMKFEMNSEEGDFLRTCDFFFLRHLVAVKQLAHVKVDRFFPRRQSLAESRTAGIRLQTNVQKMVSSFTTSDRKQTSPSSYSVSFIPEFHFLGPPTHCPQTAVSQCDLLFQLHSPAEALFPARTLPGGPRSPHLRVPAAPAPLQHDPRHTGPPLPPTANRGATPPLPLGPGALERSGRLGELNSASSFRLRRDNPQSPAARPRGSHGLAGIEGERTLINYYCQERYFHHVLLVASEGIKRYGSDPVFRFYHAYGTLMEGKTQEALREFEAIKNKQDVSLCSLLALIYAHKMSPNPDREAILESDARVKEQRKGAGEKALYHAGLFLWHIGRHDKAREYIDRMIKISDGSKQGHVLKAWLDITRGKEPYTKKALKYFEEGLQDGNDTFALLGKAQCLEMRQNYSGALETVNQIIVNFPSFLPAFVKKMKLQLALQDWDQTVETAQRLLLQDSQNVEALRMQALYYVCREGDIEKASTKLENLGNTLDAMEPQNAQLFYNITLAFSRTCGRSQLILQKIQTLLERAFSLNPQQSEFATELGYQMILQGRVKEALKWYKTAMTLDETSVSALVGFIQCQLIEGQLQDADQQLEFLNEIQQSIGKSAELIYLHAVLAMKKNKRQEEVINLLNDVLDTHFSQLEGLPLGIQYFEKLNPDFLLEIVMEYLSFCPMQPASPGQPLCPLLRRCISVLETVVRTVPGLLQTVFLIAKVKYLSGDIEAAFNNLQHCLEHNPSYADAHLLLAQVYLSQEKVKLCSQSLELCLSYDFKVRDYPLYHLIKAQSQKKMGEIADAIKTMHMAMSLPGMKRIGASTKSKDRKTEVDTSHRLSIFLELIDVHRLNGEQHEATKVLQDAIHEFSGTSEEVRVTIANADLALAQGDIERALSILQNVTAEQPYFIEAREKMADIYLKHRKDKMLYITCFSNSTEKQESVQLAVRTAEKLLKELKPQTVQGHVQLRIMENYCLMATKQKSNVEQALNTFTEIAASEKEHIPALLGMATAYMILKQTPSSQKPAEAYCENDIGMLLMLKSLRRVGCYLLIFTFNQQNMTWQKTCXNGACVIIGSCCKAYEYMGYIMEKEQAYTDAALNYEMAWKYSNRTNPAIMLELARLYLAQDDPDSCLRQCALLLQSDQDNEAATMMMADLMFRKQDYEQAVFHLQQLLERKPDNYMTLSRLIDLLRRCGKLEDVPRFFSMAEKRNSRAKLEPGFQYCKGLYLWYTGEPNDALRHFNKARKDRDWGQNALYNMIEICLNPDNEDCWSKXTCDFFFLRHLVAVKQLAHVKVDRFFPRRQSLAESRTAGIRLQTNVQKMVSSFTTSDRKQTSPSSYSVSFIPEFHFLGPPTHCPQTAVSQCDLLFQLHSPAEALFPARTLPGGPRSPHLRVPAAPAPLQHDPRHTGPPLPPTANRGATPPLPLGPGALERSGRLGELNSASSFRLRRDNPQSPAARPRGSHGLAGIEGERTLINYYCQERYFHHVLLVASEGIKRYGSDPVFRFYHAYGTLMEGKTQEALREFEAIKNKQDVSLCSLLALIYAHKMSPNPDREAILESDARVKEQRKGAGEKALYHAGLFLWHIGRHDKAREYIDRMIKISDGSKQGHVLKAWLDITRGKEPYTKKALKYFEEGLQDGNDTFALLGKAQCLEMRQNYSGALETVNQIIVNFPSFLPAFVKKMKLQLALQDWDQTVETAQRLLLQDSQNVEALRMQALYYVCREGDIEKASTKLENLGNTLDAMEPQNAQLFYNITLAFSRTCGRSQLILQKIQTLLERAFSLNPQQSEFATELGYQMILQGRVKEALKWYKTAMTLDETSVSALVGFIQCQLIEGQLQDADQQLEFLNEIQQSIGKSAELIYLHAVLAMKKNKRQEEVINLLNDVLDTHFSQLEGLPLGIQYFEKLNPDFLLEIVMEYLSFCPMQPASPGQPLCPLLRRCISVLETVVRTVPGLLQTVFLIAKVKYLSGDIEAAFNNLQHCLEHNPSYADAHLLLAQVYLSQEKVKLCSQSLELCLSYDFKVRDYPLYHLIKAQSQKKMGEIADAIKTMHMAMSLPGMKRIGASTKSKDRKTEVDTSHRLSIFLELIDVHRLNGEQHEATKVLQDAIHEFSGTSEEVRVTIANADLALAQGDIERALSILQNVTAEQPYFIEAREKMADIYLKHRKDKMLYITCFSNSTEKQESVQLAVRTAEKLLKELKPQTVQGHVQLRIMENYCLMATKQKSNVEQALNTFTEIAASEKEHIPALLGMATAYMILKQTPRARNQLKRIAKMNWNAIDAEEFEKSWLLLADIYIQSAKYDMAEDLLKRCLRHNRSCCKAYEYMGYIMEKEQAYTDAALNYEMAWKYSNRTNPAIMLELARLYLAQDDPDSCLRQCALLLQSDQDNEAATMMMADLMFRKQDYEQAVFHLQQLLERKPDNYMTLSRLIDLLRRCGKLEDVPRFFSMAEKRNSRAKLEPGFQYCKGLYLWYTGEPNDALRHFNKARKDRDWGQNALYNMIEICLNPDNETVGVNELSALMEDGRCQVLLAKVYSKMEKLGDAITALQQARELQARVLKRVQMEQPDAVPAQKHLAAEICAEIAKHSVAQRDYEKAIKFYREALVHCETDNKVAMGWADPEENQLESDSPSRTRHPPPPYNTAKYVLKMKI

SEQ ID NO: 50437 - protein, 488 aa, Homo sapiens
  DOMAIN (189)..(389): CBS domain identified by PFam, accession name CBS, E-value= 2.8e-33, PFam score of 124.0
MGFRHVGQAGLELLTSGLGLVTASGYCTISWGSPCTCAFGNGPIDGHSLSIILEMGLCTMKTKQEFQDWTKRSVELEGGNASSELQSFQGHHNKEGLRNCRSQEEPEEMLPTIMWNPGRDPVEDSESGVYMRFMRSHKCYDIVPTSSKLVVFDTTLQVKKAFFALVANGVRAAPLWESKKQSFVELYLQETFKPLVNISPDASLFDAVYSLIKNKIHRLPVIDPISGNALYILTHKRILKFLQLFMSDMPKPAFMKQNLDELGIGTYHNIAFIHPDTPIIKALNIFVERRISALPVVDESGKVVDIYSKFDVINLAAEKTYNNLDITVTQALQHRSQYFEGVVKCNKLEILETIVDRIVRAEVHRLVVVNEADSIVGIISLSDILQALILTPAAPVKYEQPSLCQGHMDPMWEQTACPLNSQNPILNEFTGMEQVMWHKVSARYVQITVPYVRIQQYVTAAAGAHACETTPSLNVEVFEPFTKSVCFL

SEQ ID NO: 50438 - protein, 174 aa, Homo sapiens
RIASMPRLPPRTQGRGSARLPSRARPGLHWHHRHTMLPPKPRRWRRALGPAEAGMLEKLEFEDEGECAPPAAGPALPRPGRPRTGTRGDPAPHLRRCPTASCVLRKPRGRGGNRGGDAGAGELGLRGPCDLPSQNFLCFLVDVLKNGLLALQLFSSNPTASCAESLPMLRTPVI

SEQ ID NO: 50439 - protein, 383 aa, Homo sapiens
  DOMAIN (74)..(294): CBS domain identified by PFam, accession name CBS, E-value= 1.3e-09, PFam score of 45.4
  misc_feature (1)...(383): Xaa = X or * as defined in Table 2
SARPAASPPAGERASQLMLIAVLLLPLRRRWRRALGPAEAGMLEKLEFEDEAVEDSESGVYMRFMRSHKCYDIVPTSSKLVVFDTTLQVKKAFFALVANGVRAAPLWESKKQSFVGMLTITDFINILHRYYKSPMVQIYMELEDHKNLETWRELYLQETFKPLVNISPDASLFGWLYTSLIKNKIHRLPVIDPISGNALYILTHKRILKFLQLFMSDMPKPAFMKQNLDELGIGTYHNIAFIHPDTPIIKALNIFVEKDRISALPVLWDESGKSWXIFNSPNLNVNXILACLEENIPNNLRXSTVTQALQHRSQYFEGVVKCQLSWKFLETHRWTRIVRAEGPSGLVVVNEADSIVGIISLSDILQALILTPAGAKQKETETE

SEQ ID NO: 50440 - protein, 49 aa, Homo sapiens
HICPAASFKLTNVYKQGKTRVHGRSPGPIKRPHIHCGASAFPEKPGRLS

SEQ ID NO: 50441 - protein, 410 aa, Homo sapiens
  misc_feature (1)...(410): Xaa = X or * as defined in Table 2
NPSPCWAVFFQKDAITSKIQTFLSMLHLYNXXSSPSKENTRTVEKLYKCSVDIRKIRRFKKDGVLLRRXKPYVERNCRIFYQELGARXDAVASILERCPEAIVXSPTAVNTQRKLWQLVCKNEEELIKLIEQFPESFFTIKDQENQKLNVQFFQDVGTKKCGHCRLLTAAPNCFSNPVEKNKQMVEFFQESYLDLGGSEANMKSFGLLKLFKPKPFYFVXISPTAIKETLEFLQEPRFPPALKFLQLPIPNSKGFLFQLCPKKYTEXYFLLXKCLLNAQIFMDPVSNXVLKWPCPFILFLFPVLEERMQGLLREGISIAQIRETPMVLELTPQIVQYRIRKLNSSGYRIKDGHLANLNGSKKEFEANFGKIQAKKALQNLLLRSLNYYDELTVGECGNRKGRGTNVNTTL

SEQ ID NO: 50442 - protein, 151 aa, Homo sapiens
SWSEPRPGCGNKMAGKMNVLSSLAVYAEDSEPESDGEAGIEAVGSAAEEKGGLVSDAYGEDDFSRLGGDEDGYEEEEDENSRQSDNTEAEKRDPQELVASFSERVRNMSPDEIKIPPEPPGRCSNHLQDKIQKLYERKIKEGMDMNYIIQR

SEQ ID NO: 50443 - protein, 48 aa, Homo sapiens
  misc_feature (1)...(48): Xaa = X or * as defined in Table 2
MFCXLSQFTRKIQSPSLMARLGSRRWAARLKRKADWYLMPMGRMTFLV

SEQ ID NO: 50444 - protein, 149 aa, Homo sapiens
  misc_feature (1)...(149): Xaa = X or * as defined in Table 2
LGILLVDDFVNVLSSLAVYAEDSEPESDGEAGIEAVGSAAEEKGGLVSDAYGEDDFSRLGGDEDGYEEEEDENSRQSEDDDSETEKPEADDPKENSAQXQRHPGLSKLMAQLVGLRGQKNHILNMIRDVTQQPQLSLAAHTPHTPFHLQ

SEQ ID NO: 50445 - protein, 111 aa, Homo sapiens
NHVTLRARQPDNKLQPLTGPSPWESGGPSGSLLRAAELDLKVVKVLCQPQELDGSGPMQGRGLVPAQRRHCSFSIYEKLIQFCAIDELGTNYPKDMFDPHGWSEDSYYEAL

SEQ ID NO: 50446 - protein, 229 aa, Homo sapiens
MVALSCKGVLKESNPKTFFSVLRTRRSGSKGKVVWWLLILAKNSGQRLRQSVARGSPGFRKNLPFRPEVGVLSHRSEPRPGCGNKMAGKKNVLSSLAVYAEDSEPESDGEAGIEAVGSAAEEKGGLVSDAYGEDDFSRLGGDEDGYEEEEDENSRQSAGGNTLSATISTFQSPPPLPSRTLLCPIWDAVLRHELAGPHTASLEKRGNKASDKATIMAFDALVTFCEELG

SEQ ID NO: 50447 - protein, 426 aa, Homo sapiens
  misc_feature (1)...(426): Xaa = X or * as defined in Table 2
RPGCGNKMAGKKNVLSSLAAYAXISEPESDGEAGIEAVGSAADEKGGLVSDAYGEDDFSRLGGDEDGYEEEEDENSRQSEDDDSETEKPEADDPKDNTEAEKRDPQELVASFSERVRNMSPDEIKIPPEPPGRCSNHLQDKIQKLYERKIKEGMDMNYIIQRKKEFRNPSIYRERLIQFCAIDELGTNYPKDMFDPHGWSEDSYYEALAKAQKIEMGQIGKRPKKERNQKFEFCDGAPKKGTTRTNATSTTTTTCQAQLFADCFRRGKRQVGIRAIPSATKPKRTPPPKPPPNTLTTTATLPSVVVTVTHPSASGSKDPPVISCCGAPIVKERPKQVTLRGPPLGLERDRAAPVTHCPVGGAHFVYFRTGTYSPRCHLRGASVWHSRWKDRQHGSQALWTGSVHAPPGVCRLLKVPYSYLLASQKK

SEQ ID NO: 50448 - protein, 181 aa, Homo sapiens
  misc_feature (1)...(181): Xaa = X or * as defined in Table 2
MAYSAPEKSCTEGHESPHHHTAGHSGWHGGXALRQRGHSCPKEGTRGHPQTLAPHHQCPQHAAGLPRHNQLLHDWFRHHHHRHWHHHHHHHQXFPECQPSTSHQANPHHRPDLHDRQAPDSGYEGVSPKRVAEANFSLGSAPQAAQGRSHGQSPGVHGFFSHGSPAASSDIMKRLPPPGLF

SEQ ID NO: 50449 - protein, 43 aa, Homo sapiens
  misc_feature (1)...(43): Xaa = X or * as defined in Table 2
RKTRERIGHDVICNLLXCXXSSCGCGLSCICSXIRHSKSSRKA

SEQ ID NO: 50450 - protein, 64 aa, Homo sapiens
  DOMAIN (13)..(59): Vertebrate metallothioneins proteins domain identified by eMATRIX, accession number BL00203, p-value=5.846e-11, raw score of 13.94
  misc_feature (1)...(64): Xaa = X or * as defined in Table 2
GLGPHDYLYSILSIERSCCCXCCCCCCRRRRCCCCCCVXGCSRFLCSIAESTPSGALRRLRGGR

SEQ ID NO: 50451 - protein, 360 aa, Homo sapiens
MRPKTLRNSAARSRKEPGFLNHHMEGSCLQLGELSSVGYWWPFGHPGPAQGHLPVAVWASWVVAGISIALYLPPHPEGRYEGPFKRHTKTFRSAQCADCLRENPKEGVSAAWQREERVHGFSGMLQLMPLINTPGASATAALLLCNHFSVLCLRHALWNREPFGRCKRIPGNGSKALEEFKGIGAEVVCRGAHFEDVQYPQTVEQDVRQSRGTKEGEKEAQRRVAPPLFEAAGRSLCAKELREAMGTGCFHSCAELQLRAVHPTAHTLGQLWRRGKGWPPPHFVEEETAFLRPCCICCLFCELRPKAGPTESPQLPAHPAASLTSPASLQRSELPTSICLSGVYLSPSLFNRDQVYTQDK

SEQ ID NO: 50452 - protein, 28 aa, Homo sapiens
CQVCPSKQVYKSVQAGKFTASKFFSLHI

SEQ ID NO: 50453 - protein, 32 aa, Homo sapiens
DIGICQVCPSKQVYKSVQAGKFTASKFFSLHI

SEQ ID NO: 50454 - protein, 138 aa, Homo sapiens
  DOMAIN (13)..(59): Vertebrate metallothioneins proteins domain identified by eMATRIX, accession number BL00203, p-value=5.846e-11, raw score of 13.94
  misc_feature (1)...(138): Xaa = X or * as defined in Table 2
GLGPHDYLYSILSIERSCCCXCCCCCCRRRRCCCCCCVXGCSRFLCSIAESTPSGALRRLRGGRSGGSGGCCSPGGCREGGRGNTKPATRCEVICGGGSGGGGARPAAPPGGPDASRVCWFSLNTSIVFFSCPFCLIL

SEQ ID NO: 50455 - protein, 120 aa, Homo sapiens
EWIQQNNILSIVLQDSLHQPQYVEKLEKILRFVIKEKALTLQDLDNIWAAQASWTNASKKQREKLLELIRRLAEDDKDGVMAHKVLNLLWNLAQSDDVPVDIMDLALSAHIKILDYSCSQ

SEQ ID NO: 50456 - protein, 1226 aa, Homo sapiens
  DOMAIN (435)..(453): Ubiquitin carboxyl-terminal hydrolases family 2 proteins domain identified by eMATRIX, accession number BL00972A, p-value= 1.000e-15, raw score of 11.93
  DOMAIN (691)..(787): Ubiquitin carboxyl-terminal hydrolase family domain identified by PFam, accession name UCH-2, E-value=4.2e-31, PFam score of 116.7
MVVVYALLMPAGAPLADDSSDFQFHFLKSGGLPLVLSMLTRNNFLPNADMETRRGAYLNALKIAKLLLTAIGYGHVRAVAEACQPGVEGVNPMTQINQVTHDQAVVLQSALQSIPNPSSECMLRNVSVRLAQQISDETNAGNEPDLEDEQVCCEALEVMTLCFALIPTALDALSKEKAWQTFIIDLLLHCHSNISDSGGLHWSLRVGISNKFPDNADVAALGTVLLELPVRYTAAVPNPFGTRAQFHGRQFFRGSGRHLLNYAYNSNINVPNAEVLLNNEIDWLKRIRDDVKRTGETGIEETILEGHLGVTKELLAFQTSEKKFHIGCEKGGANLIKELIDDFIFPASNVYLQYMRNGELPAEQAIPVCGSPPTINAGFELLVALAVGCVRNLKQIVDSLTEMYYIGTAITTCEALTEWEYLPPVGPRPPKGFVGLKNAGATCYMNSVIQQLYMIPSIRNGILAIEGTGSDVDDDMSGDEKQDNESNVDPRDDVFGYPQQFEDKPALSKTEDRKEYNIGVLRHLQVIFGHLAASRLQYYVPRGFWKQFRYECEESFTTLNVDIRNHQNLLDSLEQYVKGDLLEGANAYHCEKCNKKETTFVGTTVNIKQVDTVKRLLIKKLPPVLAIQLKRFDYDWERECAIKFNDYFEFPRELDMEPYTVAGVAKLEGDNVNPESQLIQQSEQSESETAGSTKYRLVGVLVHSGQASGGHYYSYIIQRNGGDGERNRWYKFDDGDVTECKMDDDEEMKNQCFGGEYMGEVFDHMMKRMSYRRQKRWWNAYILFYERMDTIDQDDELIRYISELAITTRPHQIIMPSAIERSVRKQNVQFMHNRMQYSMEYFQFMKKLLTCNGVYLNPPPGVAEKTQLLKLSVPATFMLVSLDEGPGPPIKYQYAELGKLYSVVSQLIRCCNVSSRMQSSINGNPPLPNPFGDPNLSQPIMPIQQNVADILFVRTSYVKKIIEDCSNSEETVKLLRFCCWENPQFSSTVLSELLWQVAYSYTYELRPYLDLLLQILLIEDSWQTHRIHNALKGIPDDRDGLFDTIQRSKNHYQKRAYQCIKCMVALFSNCPVAYQILQGNGDLKRKWTWAVEWLGDELERRPYTGNPQYTYNNWSPPVQSNETSNGYFLERSHSARMTLAKACELCPEEEPDDQDAPDEHESPPPEDAPLYPHSPGSQYQQNNHVHGQPYTGPAAHHMNNPQRTGQRAQENYEGSEEVSPPQTKDQ

SEQ ID NO: 50457 - protein, 97 aa, Homo sapiens
INQVTHDQAVVLQSALQSIPNPSSECMLRNVSVRLAQQISDETNAGNEPDLEDEQVCCEALEVMTLCFALIPTALDALSKEKAWQTFIIDLLLHCHS

SEQ ID NO: 50458 - protein, 108 aa, Homo sapiens
  misc_feature (1)...(108): Xaa = X or * as defined in Table 2
XCQRSLLEGANAYHCEKCNKKVDTVKRLLIKKLPPVLAKQLKRFDYDWERECAIKFNDYFEFPRELDMEPYTVAGVAKLEGDNVNPESQLIQQSEQSESETAGSTRKL

SEQ ID NO: 50459 - protein, 374 aa, Homo sapiens
  DOMAIN (314)..(344): kw TRANSCRIPTASE REVERSE II ORF2 domain identified by eMATRIX, accession number DM01354R, p-value=5.235e-21, raw score of 8.50
  DOMAIN (82)..(179): Ubiquitin carboxyl-terminal hydrolase family domain identified by PFam, accession name UCH-2, E-value=4.5e-31, PFam score of 116.7
VDTVKRLLIKKLPPVLAIQLKRFDYDWERECAIKFNDYFEFPRELDMEPYTVAGVAKLEGDNVNPESQLIQQSEQSESETAGSTKYRLVGVLVHSGQASGGHYYSYIIQRNGGDGERNRWYKFDDGDVTECKMDDDEEMKNQCFGGEYMGEVFDHMMKRMSYRRQKRWWNAYILFYERMDTIDQDDELIRYISELAITTRPHQIIMPSAIERSVRKQNVQFMHNRMQYSMEYFQFMKKLLTCNGVYLNPPPGVAEKTQLLKLSVPATFMLVSLDEGPGPPIKYQYAELGKLYSVVSQLIRCCNVSSRMQSSINDAETAFNKIQHRFMLKILNKQGIEETYIKITRAIYDKPTANIILNGQMLEALPLRNRTRQG

SEQ ID NO: 50460 - protein, 351 aa, Homo sapiens
GKLYSVVSQLIRCCNVSSRMQSSINGNPPLPNPFGDPNLSQPIMPIQQNVADILFVRTSYVKKIIEDCSNSEETVKLLRFCCWENPQFSSTVLSELLWQVAYSYTYELRPYLDLLLQILLIEDSWQTHRIHNALKGIPDDRDGLFDTIQRSKNHYQKRAYQCIKCMVALFSNCPVAYQILQGNGDLKRKWTWAVEWLGDELERRPYTGNPQYTYNNWSPPVQSNETSNGYFLERSHSARMTLAKACELCPEEVKKATSVQQIEMEESKEPDDQDAPDEHESPPPEDAPLYPHSPGSQYQQNNHVHGQPYTGPAAHHMNNPQRTGQRAQENYEGSEEVSPPQTRDPMKMHIN

SEQ ID NO: 50461 - protein, 2587 aa, Homo sapiens
  DOMAIN (1588)..(1606): Ubiquitin carboxyl-terminal hydrolases family 2 proteins domain identified by eMATRIX, accession number BL00972A, p-value= 1.000e-15, raw score of 11.93
  DOMAIN (1896)..(1994): Ubiquitin carboxyl-terminal hydrolase family domain identified by PFam, accession name UCH-2, E-value=1.7e-25, PFam score of 98.1
  misc_feature (1)...(2587): Xaa = X or * as defined in Table 2
MTATTRGSPVGGNDNQGQAPDGQSQPPLQQNQTSSPDSSNENSPATPPDEQGQGDAPPQLEDEEPAFPHTDLAKLDDMINRPRWVVPVLPKGELEVLLEAAIDLSKKGLDVKSEACQRFFRDGLTISFTKILTDEAVSGWKFEIHVSLAFDFKGSDLHSDACEWEERCIINNTHRLVELWCGPSCPQDWFPLLELLAMALNPHCKFHIYNGTRPCESVSSSVQLPEDELFARSPDPRSPKGWLVDLLNKFGTLNGFQILHDRFINGSALNVQIIAALIKPFGQCYEFLTLHTVKKYFLPIIEMVPQFLENLTDEELKKEAKNEAKNDALSMIIKSLKNLASRVPGQEEPVKSLEIFRLKMILRLSQVSSLNGKMNAVNEVNKVISSVSCYPHRHGNPEEEEWLTAERMAEWIQQNNILSIVLRDSLHQPQYVEKLEKILRFVIKEKALTLQDLDNIWAAQAGKHEAIVKNVHDLLAKLAWAFSPEQLDHLFDCFKASWTNASKKQREKLLELIRRLAEDDKDGVMAHKVLNLLWNLAHSDDVPVDIMDLALSAHIKILDYSCSQDRDTQKIQWIDRFIEELRTNDKWVIPALKQIREICSLFGEAPQNLSQTQRSPHVFYRHDLINQLQHNHALVTLVAENLATYMESMRLYARDHEDYDPQTVRLGSRYSHVQEVQERLNFLRFLLKDGQLWLCAPQAKQIWKCLAENAVYLCDREACFKWYSKLMGDEPDLDPDINKDFFESNVLQLDPSLLTENGMKCFERFFKAVNCREGKLVAKRRAYMMDDLELIGLDYLWRVVIQSNDDIASRAIDLLKEIYTNLGPRLQVNQVVIHEDFIQSCFDRLKASYDTLCVLDGDKDSVNCARQEAVRMVRVLTVLREYINECDSDYHEERTILPMSRAFRGKHLSFVVRFPNQGRQVDDLEVWSHTNDTIGSVRRCILNRIKANVAHTKIELFVGGELIDPADDRKLIGQLNLKDKSLITAKLTQISSNMPSSPDSSSDSSTGSPGNHGNHYSDGPNPEVESCLPGVIMSLHPRYISFLWQVADLGSSLNMPPLRDGARVLMKLMPPDSTTIEKLRAICLDHAKLGESSLSPSLDSLFFGPSASQVLYLTEVVYALLMPAGAPLADDSSDFQFHFLKSGGLPLVLSMLTRNNFLPNADMETRRGAYLNALKIAKLLLTAIGYGHVRAVAEACQPGVEGVNPMTQINQVTHDQAVVLQSALQSIPNPSSECMLRNVSVRLAQQISDEASRYMPDICVIRAIQKIIWASGCGSLQLVFSPNEEITKIYEKTNAGNEPDLEDEQVCCEALEVMTLCFALIPTALDALSKEKAWQTFIIDLLLHCHSNISDSGGLHWSLRVGISNKFLRXCXCCCSGDRALELPVRYTAAVPNPFGTRAQFHGRQFFRGSGRHLLNYAYNSNINVPNAEVLLNNEIDWLKRIRDDVKRTGETGIEETILEGHLGVTKELLAFQTSEKKFHIGCEKGGANLIKELIDDFIFPASNVYLQYMRNGELPAEQAIPVCGSPPTINAGFELLVALAVGCVRNLKQIVDSLTEMYYIGTAITTCEALTEWEYLPPVGPRPPKGFVGLKNAGATCYMNSVIQQLYMIPSIRNGILAIEGTGSDVDDDMSGDEKQDNESNVDPRDDVFGYPQQFEDKPALSKTEDRKEYNIGVLRHLQVIFGHLAASRLQYYVPRGFWKQFRLWGEPVNLREQHDALEFFNSLVDSLDEALKALGHPAMLSKVLGGSFADQKICQGCPHRYECEESFTTLNVDIRNHQNLLDSLEQYVKGDLLEGANAYHCEKCNKKVDTVKRLLIKKLPPVLAIQLKRFDYDWERECAIKFNDYFEFPRELDMEPYTVAGVAKLEGDNVNPESQLIQQSEQSESETAGSTKYRLVGVLVHSGQASGGHYYSYIIQRNGGDGERNRWYKFDDGDVTECKMDDDEEMKNQCFGGEYMGEVFDHMMKRMSYRRQKRWWNAYILFYERMDTIDQDDELIRYISELAITTRPHQIIMPSAIERSVRKQNVQFMHNRMQYSMEYFQFMKKLLPCKGVYLNPPPGQDHLLPEAEEITMISIQLAARFLFTTGFHTKKVVRGSASDCKNVRFWFAHNVLFNVSNRFSEYLLECPSAEVRGAFAKLIVFIAHFSLQDGPCPSPFASPGPSSQAYDNLSLSDHLLRAVLNLLRREVSEHGRHLQQYFNLFVMYANLGVAQRKTQLLKLSVPGYFYGLCLXDEGPGSLQFKYPVWLELGQIITQXVFTGWIRCCNVSSRMQSSINGNPPLPNPFGDPNLSQPIMPIQQNVADILFVRTSYVKEIIGDCSNSRGNRSKLASVFGCWENPQFSSTVLSELIWQVAYSYPMELRPYLDLLLQIFTGLRDSWAKLHRNFIMALKGIPGGPRWGCFDTIQRSKNHYQKRAYQCIKCMVALFSNCPVAYQILQGNGDLKRKWTWAVEWLGDELERRPYTGNPQYTYNNWSPPVQSNETSNGYFLERSHSARMTLAKACELCPEEEPDDQDAPDEHESPPPEDAPLYPHSPGSQYQQNNHVHGQPYTGPAAHHMNNPQRTGQRAQENYEGSEEVSPPQTKDQ

SEQ ID NO: 50462 - protein, 2644 aa, Homo sapiens
  DOMAIN (1563)..(1581): Ubiquitin carboxyl-terminal hydrolases family 2 proteins domain identified by eMATRIX, accession number BL00972A, p-value= 1.000e-15, raw score of 11.93
  DOMAIN (1866)..(1962): Ubiquitin carboxyl-terminal hydrolase family domain identified by PFam, accession name UCH-2, E-value=1.1e-29, PFam score of 112.1
  misc_feature (1)...(2644): Xaa = X or * as defined in Table 2
ADKIAKICPVSSMTATTRGSPVGGNDNQGQAPDGQSQPPLQQNQTSSPDSSNENSPATPPDEQGQGDAPPQLEDEEPAFPHTDLAKLDDMINRPRWVVPVLPKGELEVKLEANIDLSKKGLDVKSEACQRFFRDGLTISFTKILTDEAVSGWKFEIHRCLVELCVAKLSQDWFPLLELLAMALNPHCKFHIYNGTRPCESVSSSVQLPEDELFARSPDPRSPKGWLVDLLNKFGTLNGFQILHDRFINGSALNVQIIAALIKPFGQCYEFLTLHTVKKYFLPIIEMVPQFLENLTDEELKKEAKNEAKNDALSMIIKSLKNLASRVPGQEETVKNLEIFRLKMILRLLQISSFNGKMNALNEVNKVISSVSYYTHRHGNPEEEEWLTAERMAEWIQQNNILSIVLRDSLHQPQYVEKLEKILRFVIKEKALTLQDLDNIWAAQAGKHEAIVKNVHDLLAKLAWDFSPEQLDHPFDCFKASRTNASKKQREKLLELIRRLAEDDKDGVMAHRVLNLLWNLAHSDDVPVDIMDLALSAHIKILDYSCSQDRDTQKIQWIDRFIEELRTNDKWVIPALKQIREICSLFGEAPQNLSQTQRSPHVFYRHDLINQLQHNHALVTLVAENLVTYMESMRLYARDHEDYDPQTVRLGSRYSHVQEVQERLNFLRFLLKDGQLWLCAPQAKQIWKCLAENAVYLCDREACFKWYSKLMGDEPDLDPDINKDFFESNVLQLDPSLLTENGMKCFERFFKAVNCREGKLVAKRRAYMMDDLELIGLDYLWRVVIQSNDDIASRAIDLLKEIYTNLGPRLQVNQVVIHEDFIQSCFDRLKASYDTLCVLDGDKDSVNCARQEAVRMVRVLTVLREYINECDSDYHEERTILPMSRAFRGKHLSFVVRFPNQGRQVDDLEVWSHTNDTIGSVRRCILNRIKANVAHTKIELFVGGELIDPADDRKLIGQLNLKDKSLITAKLTQISSNMPSSPDSSSDSSTGSPGNHGNHYSDGPNPEVESCLPGVIMSLHPRYISFLWQVADLGSSLNMPPLRDGARVLMKLMPPDSTTIEKLRAICLDHAKLGESSLSPSLDSLFFGPSASQVLYLTEVVYALLMPAGAPLADDSSDFQFHFLKSGGLPLVLSMLTRNNFLPNADMETRRGAYLNALKIAKLLLTAIGYGHVRAVAEACQPGVEGVNPMTQINQVTHDQAVVLQSALQSIPNPSSECMLRNVSVRLAQQISDEASRYMPDICVIRAIQKIIWASGCGSLQLVFSPNEEITKIYEKTNAGNEPDLEDEQVCCEALEVMTLCFALIPTALDALSKEKAWQTFIIDLLLHCHSKTVRQVAQEQFFLMCTRCCMGHRPLLFFITLLFTVLGSTARERAKHSGDYFTLLRHLLNYAYNSNINVPNAEVLFNNEIDWLKRIRDDVKRTGETGIEETILEGHLGVTKELLAFQTSEKKFHIGCEKGGANLIKELIDDFIFPASNVYLQYMRNGEPPAEQAIPVCGSPPTINAGFELLVALAVGCVRNLKQIVDSLTEMYYIGTAITTCEALTEWEYLPPVGPRPPKGFVGLKNAGATCYMNSVIQQLYMIPSIRNGILAIEGTGSDVDDDMSGDEKQDNESNVDPRDDVFGYPQQFEDKPALSKTEDRKEYNIGVLRHLQVIFGHLAASRLQYYVPRGFWKQFRLWGEPVNLREQHDALEFFNSLVDSLDEALKALGHPAMLSKVLGGSFADQKICQGCPHRYECEESFTTLNVDIRNHQNLLDSLEQYVKGDLLEGANAYHCEKCNKKVDTVKRLLIKKLPPVLAIQLKRFDYDWERECAIKFNDYFEFPRELDMEPYTVAGVAKLEGDNVNPESQLIQQSEQSESETAGSTKYRLVGVLVHSGQASGGHYYSYIIQRNGGDGERNRWYKFDDGDVTECKMDDDEEMKNQCFGGEYMGEVFDHMMKRMSYRRQKRWWNAYIPFYERMDTIDQDDELIRYISELAITTRPHQIIMPSAIERSVRKQNVQFMHNRMQYSMEYFQFMKKLLTCNGVYLNPPPGQDHLLPEAEEITMISIQLAARFLFTTGFHTKKVVRGSASDWYDALCILLRHSKNVRFWFAHNVLFNVSNRFSEYLLGVPXVQEVRGAFAKLIVFIAHFSLQDGPCPSPFASPGPSSQAYDNLSLSDHLLRAVLNLLRREVSEHGRHLQQYFNLFVMYANLGVAEKTQLLKLSVPATFMLVSLDEGPGPPIKYQYAELGKLYSVVSQLIRCCNVSSRMQSSINGNPPLPNPFGDPNLSQPIMPIQQNVADILFVRTSYVKKIIEDCSNSEDTIKLLRFCSWENPQFSSTVLSELLWQVAYSYTYELRPYLDLLFQILLIEDSWQTHRIHNALLKGIPDDRDGLFDTIQRAPKNHYQKTRAYQCIKCMVALFSSCPVAYQILQGNGDLKRKWTWAVEWLGDELERRPYTGNPQYTYNNWSPPVQSNETSNDYSLERSHSARMTLAKACELCPEEEPDDQDAPRXTWCPPPPDRCAPLYPPIPPGIFSIKQNNHMCHGQPIYRPQHAHHMNNPQEELAQRAQENYEGSEEVSPPQTKDQWKWHIINWFHQDCAPQALQFQPFFCVWLIFKTRKTIPNQHGVESLFTVLSAEICCQYNNRLAVEKCIVFCNKWP

SEQ ID NO: 50463 - protein, 236 aa, Homo sapiens
  DOMAIN (108)..(120): 4Fe-4S ferredoxins iron-sulfur binding region proteins. domain identified by eMATRIX, accession number BL00198, p-value= 7.632e-12, raw score of 10.43
  DOMAIN (101)..(124): 4Fe-4S binding domain identified by PFam, accession name fer4, E-value=0.00027, PFam score of 25.6
SVTEEKVNEIKEDSHCGETFTPVPDDRLNFQKKKASPEVKSCDSFVCEVGLAKPQNGRRRFLRDVVRTAGGLAAVGVALGLQQQTGRASGVRLRPPGAINENAFASACVRCGQCVQACPYDTLKLATLASGLSAGTPYFVARDIPCEMCEDIPCAKVCPSGALDREIESIDDARMGLAVLVDHENCLNFQGLRCDVCYRECPKIDEAITLELERNTRTGKHARFLPTVHSDACTGC

SEQ ID NO: 50464 - protein, 567 aa, Homo sapiens
  DOMAIN (89)..(128): PROTEIN ZINC FINGER ZINC-FINGER METAL-BINDING NU domain identified by eMATRIX, accession number PD01066, p-value=7.000e-30, raw score of 19.43
  DOMAIN (254)..(559): Zinc finger, C2H2 type domain identified by PFam, accession name zf-C2H2, E-value=1.1e-60, PFam score of 215.1
RPLDVGGPAAGTPGVLSRPCPSTAALAPKPFCAAPRPQPDAPACAGATGGSCADFDSGVDFVRRRSSGLWGPQPPLFPVKNYTEDPVAFKDVAVNFTQEEWALLDISQKNLYREVMLETFWNLTSIGKKWKDQNIEYEYQNPRRNFRSVTEEKVNEIKEDSHCGETFTPVPDDRLNFQKKKASPEVKSCDSFVCEVGLGNSSSNMNIRGDTGHKACECQEYGPKPWKSQQPKKAFRYHPSLRTQERDHTGKKPYACKECGKNIIYHSSIQRHMVVHSGDGPYKCKFCGKAFHCLSLYLIHERTHTGEKPYECKQCGKSFSYSATHRIHERTHIGEKPYECQECGKAFHSPRSCHRHERSHMGEKAYQCKECGKAFMCPRYVRRHERTHSRKKLYECKQCGKALSSLTSFQTHIRMHSGERPYECKTCGKGFYSAKSFQRHEKTHSGEKPYKCKQCGKAFTRSGSFRYHERTHTGEKPYECKQCGKAFRSAPNLQLHGRTHTGEKPYQCKECGKAFRSASQLRIHRRIHTGEKPYECKKCGKAFRYVQNFRFHERTQTHKNALWRKTL

SEQ ID NO: 50465 - protein, 803 aa, Homo sapiens
  DOMAIN (39)..(78): PROTEIN ZINC FINGER ZINC-FINGER METAL-BINDING NU domain identified by eMATRIX, accession number PD01066, p-value=3.250e-15, raw score of 19.43
  DOMAIN (207)..(571): Zinc finger, C2H2 type domain identified by PFam, accession name zf-C2H2, E-value=5.8e-81, PFam score of 282.4
CGWDPVFPAPRGTWFLCPGFCHSVTYAMPCCSHRRCREDPGTSESQEMEEWALLDISQRKLYKEVMLETFRNLTSVGKSWKDQNIEYEYQNPRRNFRSLIEKKVNEIKDDSHCGETFTQVPDDRLNFQEKKASPEIKSCDSFVCGEVGLGNSSFNMNIRGDIGHKAYEYQEYGPKPCKCQQPKNKKAFRYRPSIRTQERDHTGEKPYACKVCGKTFIFHSSIQRHVVMHSGDGPYKCKFCGKAFHCLSLYLIHERIHTGEKPYECKQCGKSFSYSATLRIHERTHTGEKPYECQQCGKAFHSPRCYRRHERIHTGEKAYQCKECGKAFTCPQYVRIHERTHSRKKPYECTQCGKALSSLTSFQTHIRMHSGERPYECKICGKGFCSANSFQRHEKTHSGEKPYKCKQCGKAFIHSSSLRYHERIHTGEKPYECKQCGKAFRSSSHLQLHGRTHTGEKPYECQECGKAFRSMKNLQSHERTQTHVRIHSGERPYKCKLCGKGFYCPKSLQRHEKTHTGEKLYECKQCGEAFSSSSSFRYHERTHTGEKPYKCKQCGKAFRAASVLRMHGRTHPEDKPYELLEVLARAIRKDKELKGIQVGKEEVKLSLFADDMIVYLENPIISAQNLLKLISNFSKVSGYKINVQKSQAFLYTNNRQTESQIMSELPFTIASKRIKYLGIQLTRDVKDLFKENYKPLLNEIKEDTNKWKNIPCSWIGRINIMKMAILPKVICRFHAIPIKLPMTFFTELEKTTLKFIWNQRRAHIAKTILSQKNKAQGIRLPDFKLYYKATVTKTAWYWYQTEI

SEQ ID NO: 50466 - protein, 708 aa, Homo sapiens
  DOMAIN (45)..(84): PROTEIN ZINC FINGER ZINC-FINGER METAL-BINDING NU domain identified by eMATRIX, accession number PD01066, p-value=2.286e-32, raw score of 19.43
  DOMAIN (211)..(688): Zinc finger, C2H2 type domain identified by PFam, accession name zf-C2H2, E-value=3.2e-69, PFam score of 243.4
  misc_feature (1)...(708): Xaa = X or * as defined in Table 2
MGKNTPMIQLSPPGPFHNSEYRFPVLSVSAFLLYTCEMFQDPVAFEDVAVIFTQEEWALLDISQRKLYREVMLETFRNLTSLGKRWKDQNIEYEHQNPRRNFRSLIEEKVNEIKDDSHCGETFTPVPDDRLNFQEKKASPEVKSCESFVCGEVGLGNSSFNMNIRGDIGHKAYEYQEYGPKPCKCQQPKKAFRYRPSFRTQERDHTGEKPNACKVCGKTFISHSSVRRHMVMHSGDGPYKCKFCGKAFHCLRLYLIHERIHTGEKPCECKQCGKSFSYSATHRIHKRTHTGEKPYEYQECGKAFHSPRSYRRHERIHMGEKAYQCKECGKAFTCPRYVRIHERTHSRKNLYECKQCGKALSSLTSFQTHVRLHSGERPYECKICGKDFCSVNSFQRHEKIHSGEKPYKCKQCGKALPHSSSLRYHVRTHTGEKPYECKQCGKATHNGEKPYACKECGKPFGSAQNLRIHERTQTHIMHSVERPYKCKICGRGFYSAKSFQIHEKSYTGEKPYECKQCGKAFVSFTSFRYHERTHTGENPYECKQFGKAFRSVKNLRFHKRTHTGEKPLXIHEKTHTGRKHYECKQCGKAFTSSSSFQYHERTHSGEKPYQCKQCAKAFISSTSFQYHERTHMGEKPYECMPSGKAFISSSSLQYHERTHTGEKPYEYKQCGKAFRSASHLQMHGRTHTGEKPYECKQYGKAFRPDKIL

SEQ ID NO: 50467 - protein, 80 aa, Homo sapiens
FDDFVTDVWDYCTGLRRGGADARKIHTAPARTMFLLRPLPILLVTGGGYAGYRQYEKYRERELEKLGLEIPPKLAGHWEP

SEQ ID NO: 50468 - protein, 143 aa, Homo sapiens
HRCLGLLHGVAPWRSSLHPCEITALSQSLQPLRKLPFRAFRTDARKIHTAPARTMFLLRPLPILLVTGGGYAGYRQYEKYRERELEKLGLEIPPKLAGHWEISPSDGRILNFGQVKNCEVEQVKGVTYSLESVLGPRMCTEDL

SEQ ID NO: 50469 - protein, 52 aa, Homo sapiens
LVSAWKTCPSLSGTQAWGAPSGGDRARFHVDPGDAVNFSCRRDIIEFFQLYQ

SEQ ID NO: 50470 - protein, 476 aa, Homo sapiens
  DOMAIN (323)..(336): DECARBOXYLASE PHOSPHATIDYLSERINE domain identified by eMATRIX, accession number PD02876C, p-value=2.723e-13, raw score of 8.80
  misc_feature (1)...(476): Xaa = X or * as defined in Table 2
EGADKMATSVGHRCLGLLHGVAPWRSSLHPCEMTALSQSLQPLRKLPFRAFRTDARKIHTAPARTMFLLRPLPILLVTGGGYAGYRQYEKYRERELEKLGLEIPPKLAWSLGSVALYKSVPTRLLSRAWGRLNQVGAAHTGLRRPRFTSLYIWTFGVNMKEARVEDLHHYRNLSEFFRRKLKPQARPVCGLHSVGEAXPFPPAGNRTFSCLPSTAPLVSSVSGRGRMTRGGGGCLLGGGDPALPGSKPLLPFQISPSDGRILNFGQVKNCEVEQVKGVTYSLESFLGPRMCTEDLPFPPAASCDSFKNQLVTREGNELYHCVIYLAPGDYHCFHSPTDWTVSHRRHFPGSLMSVNPGMARWIKELFCHNERVVLTGDWKHGFFSLTAVGATNWGSTRIYFDRDRNTNNPRHSKGSYNDFSFVTHTNREGVPMRKGEHLGEFNLGSTIVLIFEAPKDFNFQLKTGQKIRFGEALGSL

SEQ ID NO: 50471 - protein, 325 aa, Homo sapiens
  misc_feature (1)...(325): Xaa = X or * as defined in Table 2
ARTRRLAPSPGCRRGPAVKKMRHEELLTKTFQGPAVVCGTPTSHVYMFKNGSGDSGDSSEEESHRVVLRPRVKERHKSGVHQPPQAGAGDVVLLQRELAQEDSLNKLALQYGCKHSEXLTMANVADIKKVNNFIREQDLYALKSVKIPVRNHGILMETHKELKPLLSPSSETTVTVELPEADRAGAGTGAQAGQLMGFFKGIDQDIERAVQSEIFLHESYCMDTSHQPLLPAPPKTPMDGADCGIQWWNAVFIMLLIGIVLPVFYLVYFKIQASGETPNSLNTTVIPNGSMAMGTVPGQAPRLAVAVPAVTSADSQFSQTTQAGS

SEQ ID NO: 50472 - protein, 208 aa, Homo sapiens
  DOMAIN (48)..(70): PROSTANOID EP1 RECEPTOR SIGNATURE domain identified by eMATRIX, accession number PR00580E, p-value=9.520e-09, raw score of 7.15
  misc_feature (1)...(208): Xaa = X or * as defined in Table 2
RYSSTLTRPWTQTPRTRASPHSPVAGALTARPSPPRPTKPSRAGVHASRRPPQDLGPIGKGSAKTKGPRHQRKHHESITPPSRSPTKEAPPGLNDDAQIPASQESVAPLWIPVTAPXAHRVLSSCEFGAAFESAGEEEGEGEVSASQAAVQAGTQTRRXGATSAPCGPVPEGASVPALXAAGAAGRAEAERPPCVPAQAVGLSGQPLS

SEQ ID NO: 50473 - protein, 710 aa, Homo sapiens
  DOMAIN (433)..(469): Synapsins proteins domain identified by eMATRIX, accession number BL00415Q, p-value=5.783e-10, raw score of 2.23
  misc_feature (1)...(710): Xaa = X or * as defined in Table 2
WHSWRQQGWGAHLGSSATGPGCXQGRPTCVMRPAGTTRPGEAPIGSGTGAVEMPAREPGDEKPPAPFPXQRHFVPRAHLLFGTALRSLPELMRRAVRNPRHHLSAEESLLFSLPGSPWKGWSSWNGQAPPLAPPAQGPLLPVPLSAGPGVAGERTVPSSPRWWRPHLFLAPTAPSPPPCPTVSAPGHLLGVAQKPDCHPPASQRPRRHPLPFLPGEAFAESAANSXISSISASFTFSXSSSWSLDSTKSSLPPLHLPTLTSRVPGKFSALLSQFSASFSSHGLPSESVAIGTCSTPGERAHSRQTCGPGSSAQSXGQEEGQCPQCRDSAGTCGRPRCSRHPAGHAGSEPRPLQRRSLHCSHTGXGAGIGHKARTCGRKAPPRCPSETGHHSGVGYXPWRQSQQPAARGRARCGRPCPGACPAMAPQTQSEEGRRAPRTNPAVPSEPARPSTAGPRAGASVPPSPGPRGPAGPGAPSAGRRRRAPGATACSGGAVESGXPSLGSALSAQVAPEAARAPAXGPGQAAGAREEGPAWPCRSPPGPGPSQCAALPQKGSALRSGGRRTLGPLLSHPSFKILLAGSGGVLDNSTSSERSRATRSSICRPVVSESWTNNNGGDTGGSSCDFYSPGPADGLSQGHSSDHTNLLLVLSSQKRHFPAXALVQPHPAPSPTGTEPWPPAGPRTVPRPPSASSVAPSCWWVLSVSDLYCDH

SEQ ID NO: 50474 - protein, 145 aa, Homo sapiens
  misc_feature (1)...(145): Xaa = X or * as defined in Table 2
PQLSLPLLSIRDRRRPSKCANLTLTLTVAARHGLQSLGKVGISRRMPPPANLPSLKAENKGNDPNVNIVPKDGTGWASKQEQHEEEKTPEVPPAQPKPGVAAPPEVAPAPKSWASNKQGGQGDGIQVKXQFQQEFPSLQAAGDQK

SEQ ID NO: 50475 - protein, 189 aa, Homo sapiens
MTGAAGEEAAGAGVGAEVDARAEARMGIEAEARMVTEAGVETEARMGVGAGAEAGAEEEVIAAAEVEAGTEAETEAEAETGAKGEAGTGAEVEARTGAKVEAGTGAEVEAGTGVKVAGSGAEVEAGTEAEVEGGSGAEARASAGDTQAVDLQQIPTDLQLRDLAVRRKTNKQKGIASTSTKRTSTPKPH

SEQ ID NO: 50476 - protein, 365 aa, Homo sapiens
MPGPKALSTRPPSLRAPGSGCAPTPQAALWPFPMGPSLIAAPTPSLSLPGECQVCALRGSPPISDRKKGEGKLGLKGWPEGPPDWKSRSCGWTNRQSTFAAFRGGASEREKEARWRLASPYVLRHDAKYNQFVTFPSKSSWSPGEWAVPLPSGNVHSVVDERLNMGDVEKGRRLLFRVCSVPHGPNLHGLFGKQMSSLDSLSQTLGVRCSSDPVRCPLPLLIRLEACHYSCMAKCRGSIGTTKTGSLSGVNTKVLDLMAKEIKDADAYRLRLEQEFKSQDGRDSNLEAAQTLSSAAQDALNAVVSGAEPAGQLQVRHSELTHGHSRDICVAQEGQRLDLSDMYSVLWGENLVMTLNFGTWTFVDD

SEQ ID NO: 50477 - protein, 655 aa, Homo sapiens
  DOMAIN (22)..(39): ANNEXIN TYPE V SIGNATURE domain identified by eMATRIX, accession number PR00201C, p-value=8.742e-09, raw score of 11.13
  misc_feature (1)...(655): Xaa = X or * as defined in Table 2
MWKGFTILDSFKNISDSWEDVRISTLTGVWKKLIVTLMDDLEEFKTSVEEITLTQRKLFFVMESPVGPISPPQPPSVSAWNKPLTSFGSAPSSEGAKNGQESGLEIGTDTIQFGAPASNGNENEVVPVLSEKSADKIPEPKEQRQKQPRAGPIKAQKLPDLSPVDNKEHKPGPIGKERSLKNRKVKDAQQVEPEGQEKPSPATVRSTDPVTTKETKAVSEMSTEIGTMISVSSAEYGTNAKESVTDYTTPSSSLPNTVATNNTKMEDTLVNNMESARKAWENSPNVREKGSPVTSTAPPIATGVSSSASGPSTANYNSFSSASMPQIPVASVTPTASLSGAGTYTTSSLSTKSTTTSDPPNICKVKPQQLQTSSLPSASHFSQLSCMPSLIAQQQQNPQVYVSQSAAATLTTACLSXWSTAQIPAFYMDTSHLFNTQHARLAPPSLAQQQGFQPGLSRSQPAFMQSSLSQPSVVLSGTAIHNFPTVQHQELAKAQSGLAFQQTSNTQPIPILYEHQLGQASGLGGSQLIDTHLLQVTVPLPASQLSLPNFGSTGQPLIALPQTLQPPLQHTTPQAQAQSLSRPAQVSQPFRGLIPAGTQHSMIATTGKMSEMELKAFGSGIDIKPGTPPIAGRSTTPTSSPSGLLLQVRTASPAK

SEQ ID NO: 50478 - protein, 2724 aa, Homo sapiens
  DOMAIN (536)..(589): Clathrin light chain proteins domain identified by eMATRIX, accession number BL00224B, p-value=4.927e-09, raw score of 16.94
  misc_feature (1)...(2724): Xaa = X or * as defined in Table 2
VSTEMSEKSGQSTKAKDGKKYATLSLFNTSKGKSLETQKTTVAARHGLQSLGKVGISRRMPPPCXPPKFLKPEXQRANDPNVNIVPKDGTGWASKQEQHEEEKTPEVPPAQPKPGVAAPPEVAPAPKSWASNKQGGQGDGIQVNSQFQQEFPSLQAAVDQEKKEKETNDDNYGPXPSLRPPNVACWRDGGKAAGSPSSSDQDEKLPGQDESTAGTSEQNDILKVVEKRIACGPPQAKLNGQQAALASQYRAMMPPYMFQQYPRMTYPPLHGPMRFPPSLSETNKGLRGRGPPPSWASEPERPSILSASELKELDKFDNLDAEADEGWAGAQMEVDYTEATGIFSDDDDKGSNSPKENNSEDQGSKASENNENKKETDEVSNTKSSSQIPAQPSVAKVPYGKGPSFNQERGTSSHLPPPPKLLAQQHPPPDRQAVPGRPGPFPSKQQVADEDEIWKQRRRQQSEISAAVERARKRREEEERRMEEQRKAACAEKLKRLDEKLGILEKQPSPEEIREREREKEREREKELEKEQEQEREKEREKDRERQQEKEKELEKEQEKQREMEKERKQEKEKELERQKEKEKELQKMKEQEKECELEKEREKLEEKIEPREPNLEPMVEKQESENSCNKEEEPVFTRQDSNRSEKEATPVVHETEPENPGSQPRPAVLSGYFKQFQKSLPPRFQRQQEQMKQQQWQQQQQQGVLPQTVPSQPSSSTVPPPPHRPLYQPMQPHPQHLASMGFDPRWLMMQSYMDPRMMSGRPAMDIPPIHPGMIPPKPLMRRGQMEGSPNSSESFEHIARSARDHAISLSEPRMLWGSDPYPHAEPQQATTPKATEEPEDVRSEAALDQEQITAAYSVEHNQLEAHPKADFIRESSEAQVQKFLSRSVEDVRPHHTDANNQSACFEAPDQKTLSTPQEERISAVESQPSRKRSVSHGSNHTQKPDEQRSEPSAGIPKVTSRCIDSKEPIERPEEKPKKEGFIRSSEGPKPEKVYKSKSETRWGPRPSSNRREEVNDRPVRRSGPIKKPVLRDMKEEREQRKEKEGEKAEKVTEKVVVKPEKTEKKDLPPPPPPPQPPAPIQPQSVPPPIQPEAEKFPSTETATLAQKPSQDTEKPLEPVSTVQVEPAVKTVNQQTMAAPVVKEEKQPEKVISKDLVIERPRPDSRPAVKKESTLPPRTYWKEARERDWFPDQGYRGRGRGEYYSRGRSYRGSLWEGRGRGWXGDTLRDYPQYRDNKPRAEHIPSGPLRQREESETRSESSDFEVVPKRRRQRGSETDTDSEIHESASDKDSLSKGKLPKREERPENKKPVKPHSSFKPDNHVRIDNRLLEKPYVRDDDKAKPGFLPKGEPTRRGRGGTFRRGGRDPGGRPSRPSTLRRPAYRDNQWNPRQSEVPKPEDGEPPRRHEQFIPIAADKRPPKFERKFDPARERPRRQRPTRPPRQDKPPRFRRLREREAASKSNEVVAVPTNGTVNNVAQEPVNTLGDISGNKTPDLSNQNSSDQANEEWETASESSDFNERRERDEKKNADLNAQTVVKVGENVLPPKREIAKRSFSSQRPVDRQNRRGNNGPPKSGRNFSGPRNERRSGPPSKSGKRGPFDDHPAGTTGVDLINGSSAHHQEGVPNGAGQKNSKDCTGKKREDPKPGPKKPKEKVDALSQVDLHNYASVVIIDDHPEVTVIEDPQSNLNDDGFTEVVSKKQQKRLQDEERRKKEEQVIQVWNKKNANEKGRSQTSKLPPRFAKKQATGIQQAQSSASVPPLASAPLPPSTSASVPASTSAPLPATLTPVPASTSGSVSTLTLSPVWASPSAPVPASPLAPVSASASVSASVPASTSAAAITSSSAPASAPAPTPILASVSTPASVTNPASASIPIRASALASTSAPTPAPAASSPAAPVITAPTIPASAPTASVPHATASASAPAPAPTPVSAPNPAPPAPAQTQAQTHKPVQNPLQTTSQSSKQPPPSIRLPSAQTPNGTDYVASGKSIQTPQSHGTLTAEFMWDNKVAPHQAVLNDILLRKLGSPLVPPQPPSVSAWNKPLTSFGSAPSSEGAKNGQESGLEIGTDTIQFGAPASNGNENEVVPVLSEKSADKIPEPKEQRQKQPRAGPIKAQKLPDLSPVENKEHKPGPIGKERSLKNRKVKDAQQVEPEGQEKPSPATVRSTDPVTTKETKAVSEMSTEIGTMISVSSAEYGTNAKESVTDYTTPSSSLPNTVATNNTKMEDTLVNNVPLPNTLPLPKRETIQQSSSLTSVPPTTFSLTFKMESARKAWENSPNVREKGSPVTSTAPPIATGVSSSASGPSTANYNSFSSASMPQIPVASVTPTASLSGAGTYTTSSLSTKSTTTSDPPNICKVKPQQLQTSSLPSASHFSQLSCMPSLIAQQQQNPQVYVSQSAAAQIPAFYMDTSHLFNTQHARLAPPSLAQQQGFQPGLSQPTSVQQIPIPIYAPLQGQHQAQLSLGAGPAVSQAQELFSSSLQPYRSQPAFMQSSLSQPSVVLSGTAIHNFPTVQHQELAKAQSGLAFQQTSNTQPIPILYEHQLGQASGLGGSQLIDTHLLQARANLTQASNLYSGQVQQPGQTNFYNTAQSPSALQQVNYGMVTVPLPASQLSLPNFGSTGQPLIALPQTLQPPLQHTTPQAQQQSVGRPAQVSQPFRGLIPAGTQHRHGLATTGKMFWKWELKAFGSGIDIKPGTPPIAGRSTTPTSSPSGLLLQVRTASPAK

SEQ ID NO: 50479 - protein, 51 aa, Homo sapiens
  misc_feature (1)...(51): Xaa = X or * as defined in Table 2
RQGDRVSLCCLGRSXTPGLKXFSHLDLLNCWDYRCETVHLAEIAQVSEKQI

SEQ ID NO: 50480 - protein, 74 aa, Homo sapiens
MLSGRRETFFLGGGFFGLLLVFFFFLAGRKSFALVAQAGVQWRDLRSLQPPPRGFRRFFCLSLPGACGPRYLGG

SEQ ID NO: 50481 - protein, 135 aa, Homo sapiens
  misc_feature (1)...(135): Xaa = X or * as defined in Table 2
MPFSLADCDSQHCLLFAVVDLGTAKATSCMSDTFDFYSSSGNSANLKEGGKSPPAGPGKGPRGAQKRKYSGPWNRKESCKKHEGVKGAEGRGGTVASVRESREPRFKMAAFSMHPCXRLSRHRGHLAQRCFCFCR

SEQ ID NO: 50482 - protein, 217 aa, Homo sapiens
  misc_feature (1)...(217): Xaa = X or * as defined in Table 2
HMDLAQPSQPVDELELSVLERQPEENTPLNGADEVFPSLDEEVPPAEANKESPWSSCNKNVVGRCKLWMIITSIFLGVITVIIIGLCLAAVTYVDEDENEILELSSNKTFFIMLKIPEECVAEEELPHLLTERLXXSLXXHLGKWRXXSSTGLHLPTTFLLQELQGLSLLASAGGTSSSKEGKTSSAPLRGVFSSGCRSSTESSSSSTGCEGWARSM

SEQ ID NO: 50483 - protein, 79 aa, Homo sapiens
MGLWGDASPHSSTAEMWGDGRCGFLSRQSITQIEAFFMLFFPFFQTSKVLFTLWLARQHSCGRLSGNSISISRKLSGRG

SEQ ID NO: 50484 - protein, 176 aa, Homo sapiens
AKDSESRRMLRGYNPQQMSEGHRQKSEFYNRTASESNVYLNSFHYPDHSYKDQAFDTLSLDSSDSMETSISACSPDNISSASTSNIARIEEMERLLKQAHAEKTRLLESREREMEAKKRALEEEKRRREILEKRLQEETSQRQKLIEKEVKIRERQRAQARPLTRYLPVRKEDFDL

SEQ ID NO: 50485 - protein, 168 aa, Homo sapiens
MECALLDGEQKSETTELMKEKEILDHLNRKIAELEKNIVGEKTKEKVKLDAEREKLERLQELYSEQKTQLDNCPESMREQLQQQLKRDADLLDVESKHFEDLEFQQLEHESRLDEEKENLTQQLLREVAEYQRNIVSRKGKIFCIEKASQSHCSAGSERARSFCERKE

SEQ ID NO: 50486 - protein, 62 aa, Homo sapiens
HESAWASRTLSCTPGRLPCCCPSAGLLRSVPGEAAPRKSLSDSAGLSCETRMALPDSSHHPW

SEQ ID NO: 50487 - protein, 1051 aa, Homo sapiens
  DOMAIN (88)..(108): Calponin family repeat proteins domain identified by eMATRIX, accession number BL01052D, p-value=3.106e-20, raw score of 10.26
  DOMAIN (129)..(240): Trypsin domain identified by PFam, accession name trypsin, E- value=4.6e-28, PFam score of 91.0
  misc_feature (1)...(1051): Xaa = X or * as defined in Table 2
TELQQLGQKTADGSPGLKRALIFALNFHSSPPGKDMAAVQRTLMALGSVAVTKDDGCYRGEPSWFHRKAQQNRRGFSEEQLRQGQNVIGLQMGSNKGASQAGMTGLSDPTPWTAHLGMYVQGNAKFVSPVRRIVVHEYYNSQTFDYDIALLQLSIAWPETLKQLIQPICIPPTGQRVRSGEKCWVTGWGRRHEADNKGSLVLQQAEVELIDQTLCVSTYGIITSRMLCAGIMSGKRDACKKRKLGTERPGTQAAPKRRWSASAGAGKGIAGSALNKSEKQPSALEPTPARPQVLYPAGSREWPPLTVAPPVRSGPLPPPEVRDAPPSGWSVRRGGRSTRRRCGLPRSRSDFPCRHMDLAQPSQPVDELELSVLERQPEENTPLNGADKVFPSLDEEVPPAEDADLLDVESKHFEDLEFQQLEHESRLDEGKGELAPQQLLREVAEYQRNIVSRKEKISALKKQANHIVQQAQREQDHFVKEKNNLIMMLQREKENLCNLEKKYSSLSGGKGFPVNPNTLKEGYISVNEINGRVAIPRNLSPSTQFPAGCWMLLPLEPATAVLASQPQSKEQRSPVYSGFVFPSALSPHPITQHTSAPWPEFMATSVDPLPLNDTPPPLPAKKHRRQQQQQEQQHFRSLEERKKQHKEGLYLSDTLPRKKTTSSISPHFSSATMGRSITPKAHLPLGQSNSCGSVLPPSLAAMAKDSESRRMLRGYNHQQMSEGHRQKSEFYNRTASESNVYLNSFHYPDHSYKDQAFDTLSLDSSDSMETSISACSPDNISRFYATGIQARKSVCMSSRESSKEGRETSQSKPIFSKGFGVSFSASTSNIARIEEMERLLKQAHAEKTRLLESREREMEAKKRALEEEKRRREILEKRLQEETSQRQKLIEKEVKIRERQRAQARPLTRYLPVRKRDFDLRSHVETAGHNIDTCYHVSITEKTCRGFLIKMGGKIKTXKKRWFGFDRNERTFSXYADKHETKLKGVIYFQAIEEVYYDHLKNANKSPNPLLTFSVKTHDRIYYMVAPSPEAMRIWMDVIVTGAEGYTHFLL

SEQ ID NO: 50488 - protein, 209 aa, Homo sapiens
  DOMAIN (111)..(157): Actin-depolymerizing proteins domain identified by eMATRIX, accession number BL00325B, p-value=4.169e-16, raw score of 21.66
  misc_feature (1)...(209): Xaa = X or * as defined in Table 2
KKFRALGSVGPGFRASGVQVADEVCRIFYDMKVRKCSTPEEDQDKERSAVIFCLSADKKCIIVEEGKEILVGDVGWNPXTDPFRHFVGMLPXKKIVRYAFVMDGKLLETKGFQKRKSLMFFFVWAPELAPLKKXKXSYCKLQGMAFKKNFQGIKHECQANGPEDLNRACIAEKLGGSLIVAFEGCPCVDHHSVPQIEKLPMFNCYPLAI

SEQ ID NO: 50489 - protein, 114 aa, Homo sapiens
  misc_feature (1)...(114): Xaa = X or * as defined in Table 2
GHGQKPAGKKKKILAVRSGSEPAGGFQGYRGGHGTASGSPGDDDSPGALWEQSPGPLXAWPGAVSEEPMVCAEPVQEQSGPQLPPPRHSRSPSGDSGQPGVPAERRRIMGMADA

SEQ ID NO: 50490 - protein, 75 aa, Homo sapiens
LLMDTFFQIVIYLGETIAQWRKAGYQDMPEYENFKHLLQAPLDDAQEILQARFPMPVKLRIQPGNATVSDCVQNV

SEQ ID NO: 50491 - protein, 213 aa, Homo sapiens
RRDTIARNWANVQSQVRHIEQAFDQEAAAVLMARLGVFEPKSKEGPDVLRWLDRQLIRLCQKFGQYTKEDPTSFRLSDSFSLYPQSMFHLRRSPFLQVFNNSPDESSYYRHHFARQDLTQSLIMIQPILYSYSFHGPPEPVLLDSSRFPMPRYINTEHGGSQARFLLSKVNPSQTHNNLYAWGQETGAPILTDDVSLQVFMDHLKKLAVSSAC

SEQ ID NO: 50492 - protein, 72 aa, Homo sapiens
  misc_feature (1)...(72): Xaa = X or * as defined in Table 2
XFLQARSPMPRYINTEHGGSQARFLLSKVNPSQTHNNLYAWGQETGAPILTDDVSLQVFMDHLKKLAVSSAC

SEQ ID NO: 50493 - protein, 1010 aa, Homo sapiens
  DOMAIN (426)..(469): kw TRANSCRIPTASE REVERSE II ORF2 domain identified by eMATRIX, accession number DM01354T, p-value=1.000e-40, raw score of 9.48
  DOMAIN (309)..(548): Reverse transcriptase domain identified by PFam, accession name rvt, E-value=4e-40, PFam score of 146.7
MSGFLISPKHKHGTNSGIVSWADVQSQLRHIEAAFDQEAAAVLMARLGVFRAESEEGPDVLRWLDRQLIRLHSLLTTLDIVPAGKGEVVKGPMSISQQAKGCQKFGQYNKEDPTSFRLSDSFSLYPQFMFHLRRSPFLQVFNNSPDESSYYRHHFARQDLTQSLIMIQPILYSYSFHGPPEPVLLDSSSILADRILLMDTFFQIVIYLGETIAQWRKAGYQDMPEYENFKHLLQAPLDDAQEILQARFPMPRYINTEHGGSQKKREKNQIDAIKNDKGDITTEPTEIQTTIREYYKHLYANKLESLEEMNKFLDTYTLPRLNQEEVESLNRQITGSEIEAIINSLPTKKSPGPDRFTAKFYQRTNDQKHMIISIDAEKAFDKIQQPFMLKTLNKLGIDGTYFKIIRAIYDKPTANIILNGQKLEAFPLKTGTRQGCPLSLLLFNIMLEVLARAIRQEKEIKGIQFGKEEVKLSLFADDMIVYLENPIVLAQNLLKLISNFSKVSGYKINVQKSQAFLYTSNRQTESQIMSELPFTIASKRIKYLGIQLTRDVKDLFKENYKPLLNEIKEDTNKWKNIPCSWVGRINIVKMAILPKVIYRFNAIPIKLSMTFFTELEKTTLEFIWNQKRARITKSILSQKNKAEGITLPDFKLQYKATVTKTAWYSYQNRDIDQWNRTEPSEIVPCIYNYLIFDKPDKNKKWGKDSLFNKWCWENWLAICRKLKLDPFLTPYTKINSRRIKDLNVRPKTIKTLEENLGNTIQDASKKKVYMLYNLQPDRSVTGGAWYSDQDFESEFVEVLNQQCFKFLQSKAETARESKQNPMIQRNSSFASSHEVWKYICELGISKVELSMEDIETILNTLIYDGKVEMTIIAAKEGTVGSVDGHMKLYRAVNPIIPPTGLVRAPCGLCPVTLALYRKKLALTSQLASFGLLCMFPIVCEVCSHLGQIPHETGQCGYYGLQQRSPTFLAPGTSFVEDNFSTDLVGGWIQDETAPPQIISHELDSYKERAT

SEQ ID NO: 50494 - protein, 889 aa, Homo sapiens
  DOMAIN (783)..(826): 1 kw MIND INHIBITOR DIVISION CONTROL domain identified by eMATRIX, accession number DM01756B, p-value=8.313e-09, raw score of 22.91
  DOMAIN (753)..(866): ParA family ATPase domain identified by PFam, accession name ParA, E-value=0.005, PFam score of 1.2
MAEVKVKVQPPDADPVEIENRIIELCHQFPHGITDQVIQNEMPHIEAQQRAVAINRLLSMGQLDLLRSNTGLLYRIKDSQNAGKMKGSDNQEKLVYQIIEDAGNKGIWSRDIRYKSNLPLTEINKILKNLESKKLIKAVKSVALGIPAGCSVCPKCGASNHLSARFCGSCGICVKSLVKLSLDRSLALAAEEPRPFSESLNIPLPRSDVGTKRDIGTQTVGLFYPSGKLLAKKEQELASQKQRQEKMSDHKPLLTAISPGRENIGENLQVIGLVKNFLSNIPQAPATQAKMGKWDPRQRGAQSPLIFLYVVDTCLEEDDLQALKESLQMSLSLLPPDALVGLITFGRMVQVHELSCEGISKSYVFRGTKDLTAKQIQDMLGLTKPAMPMQQARPAQPQEHPFASSRFLQPVHKIDMNLTDLLGELQRDPWPVTQGKRPLRSTGVALSIAVGLLEGTFPNTGARIMLFTGGPPTQGPGMVVGDELKIPIRSWHDIEKDNARFMKKATKHYEMLANRTAANGHCIDIYACALDQTGLLEMKCCANLTGGYMVMGDSFNTSLFKQTFQRIFTKDFNGDFRMAFGATLDVKRVQVGERGREAKNKLWTVHAHSSWRALNTGLRSFDFIPGTVREPVKILGRRLTSDLQIRNSPLEAAVQGGVSKTVSTVSLAHAMRAHPHLLMEDLRILVIDLDPQSSATMFLSHKHSIGIVNATSAQAMLQNVSREELLEEFIVPSVVPGVDVMPASIDDAFIASDWRELCNEHLPGQNIHAVLKENVIDKLKSDYDFILVDSGPHLDAFLKNALASANILLTPLPPATVDFHSSLKYVARLPELVKLISDEGCECQLATNIGVMSKLSNKADHKYCHRLAKEVFSGDMLDVFLPRLDGCER

SEQ ID NO: 50495 - protein, 476 aa, Homo sapiens
MRPAHLAGAAHLARAVLTHSCNKQAPAPTAKSSSALNRLASAPARHATALSTGQSKSASPTDWRKRETQRSSATILEQGKTGVCRTSKREFLGTRFPTPKRFCFRKPRRLPHRCLSAASAPQRFALIQYDIRSSQWEVPLIALATGKRERMVQVHELSCEGISKSYVFRGTKDLTAKQIQDMLGLTKPAMPMQQARPAQPQEHPFASSRFLQPVHKIDMNLTDLLGELQRDPWPVTQGKRPLRSTGVALSIAVGLLEGTFPNTGARIMLFTGDFNGDFRMAFGATLDVKTSPRELKIRGAIGPCVSLNVKGPCVSENELGVGGTSQWKICGLDPTSTLGIYFEVVNQHNTPIPQGGRGAIQFVTHYQQSSTQRRIRVTTIARNWGRCTESAQAHRKQHFDQEGCGSVDGHGLGCSERSQREGPDVLRWLDRQLIRLCQKFGQYNKEDPTSFRLSDSFSLYPQVLVPSEKISISSSV

SEQ ID NO: 50496 - protein, 455 aa, Homo sapiens
  DOMAIN (382)..(397): G-PROTEIN BETA WD-40 REPEAT SIGNATURE domain identified by eMATRIX, accession number PR00320C, p-value=6.760e-10, raw score of 13.01
  DOMAIN (141)..(395): WD domain, G-beta repeat domain identified by PFam, accession name WD40, E-value=7.8e-09, PFam score of 42.8
AAFQYGIKMSEGRKTRRFKETNDKAELDRQWKKISAIIEKRKKMEADGVGGSEADYPAAARLAVLLSMDRTCEERPAEDGSDEEDPDSMEAPTRIRDTPEDIVLEAPASGLAFHPARDLLAAGDVDGDVFVFSYSCQEGETKELWSSGHHLKACRAVAFSEDGQKLITVSKDKAIHVLDVEQGQLERRVSKAHGAPINSLLLVDENVLATGDDTGGIRLWDQRKEGPLMDMRQHEEYIADMALDPAKKLLLTASGDGCLGIFNIKRRRFELLSEPQSGDLTSVTLMKVQLVMWGKKVACGSSEGTIYLFNWNGFGATSDRFALRAESIDCMVPVTESLLCTGSTDGVIRAVNILPNRVVGSVGQHTGEPVEELALSHCGRFLASSGHDQRLKFWDMAQLRAVVVDDYRRRKKKGGPLRALSSKTWSTDDFFAGLREEGEDSMAQEEKEETGDDSD

SEQ ID NO: 50497 - protein, 485 aa, Homo sapiens
  DOMAIN (407)..(422): G-PROTEIN BETA WD-40 REPEAT SIGNATURE domain identified by eMATRIX, accession number PR00320C, p-value=6.760e-10, raw score of 13.01
  misc_feature (1)...(485): Xaa = X or * as defined in Table 2
MLEGKYGPPPGSFQTRRTALARSHTNTSPSTSPAANRLNALGIGERDASPSWLGETQDQVKRQPGLSGSRKIPRCAMTYGSLGQQAAQAAGVHAPNVFVASLLCQFLQFVYRNSMGWTGGADFSYSCQEGETKELWSSGHHLKACRAVAFSEDGQSEYWGRQPAMWWKGAVSSTMTLGTFSPELITVSKDKAIHVLDVEQGQLERRVSKAHGAPINSLLLVDENVLATGDDTGGICLWDQRKEGPLMDMRQHEEYIADMALDPAKKLLLTATYCSTLYSGDGCLGIFNIKRRRFELLSEPQSGDLTSVTLMKVQLVMWGKKVACGSSEGTIYLFNWNGFGATSDRFALRAESIDCMVPVTESLLCTGSTDGVIRAVNILPNRVVGSVGQHIGEPVEELALSHCGRFLASSGHDQRLKFWDMAQLASCGGGXLPSAQKKGRTTAGSEQQDLEHRXLLRRTEARGRSLHGSQKKRRRLGMTVTEGMN

SEQ ID NO: 50498 - protein, 207 aa, Homo sapiens
  DOMAIN (77)..(107): Ribosomal protein L29 proteins domain identified by eMATRIX, accession number BL00579B, p-value=2.091e-20, raw score of 21.99
  DOMAIN (47)..(114): Ribosomal L29 protein domain identified by PFam, accession name Ribosomal_L29, E-value=0.003, PFam score of 20.0
  misc_feature (1)...(207): Xaa = X or * as defined in Table 2
RHIFSFFSGHVLAVSLGKFIFESTLFPSERAARRRRRPVQQWPRFKARDLRGKKKEELLKQLDDLKVEAVSQLRVAKVTGRAASKLSKIRVVRKSIARVLTVINQTQKENLRKFYKGKKYKPLDLRPXGRHRAMRPPASNQARRENLEGPKEAGSGKGAAFTRCGKXRGSRALRGRLCQXKHKENLKTKKQQRKERLYPLRKYAVKA

SEQ ID NO: 50499 - protein, 138 aa, Homo sapiens
  DOMAIN (59)..(76): Zinc finger C2H2 type, domain proteins. domain identified by eMATRIX, accession number BL00028, p-value=7.261e-12, raw score of 16.07
  DOMAIN (4)..(80): Zinc finger, C2H2 type domain identified by PFam, accession name zf-C2H2, E-value=2e-16, PFam score of 68.0
  misc_feature (1)...(138): Xaa = X or * as defined in Table 2
FFFFFECGXSFTNSFSVTIHRRIHNGEKSYECSDCGKSFNVLSSVKKHMRTHTGKKPYECNYCGKSFTSNSYLSVHTRMHNTANVNSITVGKAFIDLSCLRXHEQTLTRCMNHLLLCNKLPPKILWLQTKTLVISKFL

SEQ ID NO: 50500 - protein, 524 aa, Homo sapiens
  DOMAIN (61)..(100): PROTEIN ZINC FINGER ZINC-FINGER METAL-BINDING NU domain identified by eMATRIX, accession number PD01066, p-value=3.531e-37, raw score of 19.43
  DOMAIN (169)..(416): Zinc finger, C2H2 type domain identified by PFam, accession name zf-C2H2, E-value=7.4e-60, PFam score of 212.3
  misc_feature (1)...(524): Xaa = X or * as defined in Table 2
RRSVLLPGCPVAVGVTGWRLSSCPQLPLCLPCSQPLSEKDTQRAESWLMSSXKAGYKGLVTFEDVAVEFTQEEWALLDPAQRTLYRDVMLENCRNLASLGNQVDKPRLISQLEQEDKVMTEERGILSGTCPDVENPFKAKGLTPKLHVFRKEQSRNMKMERNHLGATLNECNQCFKVFSTKSSLTRHRKYSILGERPYGCSECGKSYSSRSYLAVHKRIHNGVKPYECNNCGKTFSSRSYLTVHKRIHNGEKPYDCSYCGKTFSNSXYLRPHLRIHTGEKPYKCNQCFREFRNQSIFTRHKRVHTGEGHYVCNQCGKAFGTRSSLSSHYSIHTGEYPYECHDCGRTFRRRSNLTQHIRTHTGEKPYTCNECGKSFTNSFCLTIHRRIHNGEKSYECSDCGKSFNVLSSVKKHMRTHTGKKPYECNYCGKSFTIGQGDGFEIVLPPPQLQQLIKAFFLGNTHCLSDRLSVQCIHYSIRYLHLNIHYLHYSIHYLHYSICYLHYSIMDPPQQSPHPLQHPLQNPLQ

SEQ ID NO: 50501 - protein, 135 aa, Homo sapiens
FVLVVAVTVLAVLFRSSLAEFISERVEVVSPLSSWKRVVEGLSLLDLGVSPYSGAVFHEITDALTAIALYFAIQDFNKVVFKKQKLLLELDQYAPDVAELIRTPMEMRYIPLKVALFYLLNPYTILSCVAKSTCA

SEQ ID NO: 50502 - protein, 93 aa, Homo sapiens
RQYIPVKMKSKAFWIFSWEYAMMYVGSLVVIICLSFFLLSSWDFIPAVYGFMEHPIFFMFIQIAVIAIFKSYPTVGDVALYMAFFPVWNHLYR

SEQ ID NO: 50503 - protein, 156 aa, Homo sapiens; identical to SEQ ID NO: 42280
  misc_feature (1)...(156): Xaa = X or * as defined in Table 2

SEQ ID NO: 50504 - protein, 586 aa, Homo sapiens
  misc_feature (1)...(586): Xaa = X or * as defined in Table 2
FRMAAPLVLVLVVAVTVRAALFRSSLAEFISERVEVVSPLSSWKRVVEGLSLLDLGVSPYSGAVFHETPLIIYLFHFLIDYAELVFMITDALTAIALYFAIQDFNKVVFKKQKLLLELDQYAPDVAELIRTPMEMRYIPLKAALFYLLNPYTILSCVAKSTCAINNTLIAFFILTTIKGKALKGEYKGSAFLSAIFLALATYQSLYPLTLFVPGLLYLLQRQYIPVKMKSKAFWIFSWEYAMMYVGSLVVIICLSFFLLSSWDFIPAVYGFILSVPDLTPNIGLFWYFFAEMFEHFSLFFVCVFQINVFFYTIPLAIKLKEHPIFFMFIQIAVIAIFKSYPTVGDVALYMAFFPVWNHLYRFLRNIFVLTCIIIVCSLLFPVLWHLWIYAGSANSNFFXGITLTFNVGQLPHELFIMVPEGGGPGALMAAIERNVDRAVPGGSAERDPIERSTLHILLISDYFYAFLRREYYLTHGLYLTPQGIAPEAMLVLQSRPGWHRASWTLRGLVGPEAGPKLSSPELPAGECLGRRGSSPRVTSSLVPKRDPWLTDSKAYGEELGAPQLGPPPCGSAHQGAPSQTGRRRGR

SEQ ID NO: 50505 - protein, 102 aa, Homo sapiens; identical to SEQ ID NO: 36227
  misc_feature (1)...(102): Xaa = X or * as defined in Table 2

SEQ ID NO: 50506 - protein, 70 aa, Homo sapiens
  misc_feature (1)...(70): Xaa = X or * as defined in Table 2
XVSVAATPDGYADAERGDRFMMPAERRLPLSFVLDVLEGRAQHPGVLYVQKQCSNLPSELPQLLADLESH

SEQ ID NO: 50507 - protein, 38 aa, Homo sapiens
  misc_feature (1)...(38): Xaa = X or * as defined in Table 2
XPCAKEQAFLSMTKQVAAADLKQALQLDGDLQEDEIPL

SEQ ID NO: 50508 - protein, 142 aa, Homo sapiens
ESHVPWASEALGKMPDAVNFWLGEAAAVTSLHKDHYENLYCVVSGEKHFLFHPPSDRPFIPYELYTPATYQLTEEGTFKVVDEEAMEKVPWIPLDPLAPDLARYPSYSQAQALRCTVRAGEMLYLPALWFHHVQQVPGLHRG

SEQ ID NO: 50509 - protein, 188 aa, Homo sapiens
KEQVPLLKIEEPPSTAGRIAEFFTDLLTWRPLAQATHNFLRGLHFHKDYFQHPHFSTWKATTLDGLPNQLTPSEPHLCLLDVGYLINTSCLPLLQPTRDVDLILSLDYNLHGAFQVEKGGQPTREAQLQLLGRFCQEQGIPFPPISPSPEEQLQPRECHTFSDPTCPGAPAVLHFPLVSDSFREYSAP

SEQ ID NO: 50510 - protein, 438 aa, Homo sapiens
  DOMAIN (239)..(301): Spectrin repeat domain identified by PFam, accession name spectrin, E-value=1.4e-10, PFam score of 43.5
MEELDQTAQTLTGPEVPEQQRVVQERLREQLRALQELAATRLCSAHATGLDPTPAKGEWGSEGCLCVPLAVPYLDKPPTPLHFYRDWVCPNRPCIIRNALQHWPALQKWSLPYFRATVGSTEVSVAVTPDGYADAVRGDRFMMPAERRLPLSFVLDVLEGRAQHPGVLYVQKQCSNLPSELPQLLPDLESHVPWASEALGEWSYFDPGGLAMIGAWSHIHGSAPDAPGLRAAASQATLWQELQVEVKAHQGQVQRVLSSGRSLAASGHPQAQHIVEQCQELEGHWAELERACEARAQCLQQAVTFQQLQLLGRFCKEQGIPFPPISPSPKEQLQPRECHTFSDPTCPGAPAVLHFPLVSDSFREYSAPGVRRTPEEAAAGEVNLSSSDSPYHYTKVTYSQEDVDKLLHLTHYNVCNNQEQLLEALRQAVQRRRQRRPH

SEQ ID NO: 50511 - protein, 380 aa, Homo sapiens
  DOMAIN (269)..(283): C2 DOMAIN SIGNATURE domain identified by eMATRIX, accession number PR00360B, p-value=8.364e-09, raw score of 13.61
  DOMAIN (83)..(207): Spectrin repeat domain identified by PFam, accession name spectrin, E-value=3.7e-11, PFam score of 45.6
TFIMAEKMSDNSLDAGVMGSHEKVAQLRRARLEEAMALFGFCSSCGELQLWLEKQTVMLQRVQPQADTLEVMQLKYEAEFIREGQRLLQGGHPASEAIQERLEELGALWGELQDNSQKKVAKLQKACEALRLRRSMEELENWLEPIEVELRAPTVGQALPGVGELLGTQRELEAAVDKKARQAEALLGQAQAFVREGHCLAQDVEEQARRLLQSLRSCMKQPNLMSFYREKELQSWGLMGHAVTPSDCYVTLWLPTACSHRLQTRTVKNSSSPVWNQSFHFRIHRQLKNVMELKVFDQDLVTGDDPVLSVLFDAGTLRAGEFRRESFSLSPQARRCFHGSPSWKDARCCELLAGEGGCSDFLKTITALAFSPDGKDLVTG

SEQ ID NO: 50512 - protein, 1497 aa, Homo sapiens
  DOMAIN (1050)..(1064): SYNAPTOTAGMIN SIGNATURE domain identified by eMATRIX, accession number PR00399B, p-value=6.186e-09, raw score of 14.27
  DOMAIN (1048)..(1127): C2 domain identified by PFam, accession name C2, E-value= 0.0016, PFam score of 24.5
VHELQSLSEMLKPEVLSPTVKGKLLTGIKSPRSYTPKPNPVTHVISTGIQKIWIGATVGSTEVSVAVTPDGYADAVRGDRFMMPAERRLPLSFVLDVLEGRAQHPGVLYVQKQCSNLPSELPQLLPDLESHVPWASEALVHKHHYENLYCVVSGEKHFLFHPPSDRPFIPYELYTPATYQLTEEGTFKVVDEEAMEKVSVLFLGSREGEGQKPGSEEQAQKIWGVEAAVQRLGMLEAGILPQEGRFQALAEIADILRQEQYHSWADVARRGPPLKGCQRAASSPGLQLLWLQQELLFHLGEWARWGQLEALKREKAVQLAHSVEVCSFLQECGPTQVQLRDVLLQLEALQPGSSEDTCHALQLAQKKTLVLERRVHFLQSVVVKYGQRSGGIGRQSEWPFLHACQSTKISGLTQVSQTQESSLGIPGSSLYMVTLEKVLGITVSGGRGLACDPRSGLVAYPAGADRGEWLVSNGVLVVAGCKMPSAEQSRIAQLLRDTFSSVRQELEAVAGAVLSSPGSSPGAVGAEQTQALLEQYSELLRENDDLFMMPRIVNVTSLATEGGLVDMGGSKYPHEVPDSKPSDHLKDTVRGEDNSLEDKGRISSRGNRDGRVTLGPTQVFLANKDSGYPQIVDVSNMQKAQEFLPKKISGDMRGIQYKWKESESRGERVKSKDSSFHKLKMKDLKDSSIEMELRKVTSAIEEAALDSSELLTNMEDEDDTDETLTSLLNEIAFLNQQLNDDSVGLAELPSSMDTEFPGDARRAFISKVPPGSRATFQVEHLGTGLKELPDVQGESDSISPLLLHLEDDDFSENEKQLAEPASEPDVLKNVIDSEIKDFLLSNKKSYGWRKEYFWPPCRARIGFSVRDAWPTSTQQGPLTPAEFPRNSRSRRRSCRQCSRSWPRSPTFIFTSCESRSHNWSSPQELQKPNRAMASSNRALRSWGEVAQGWGRLGVQGSQHDGLPPPVPLPSIPCPRAFFLLAVHKDHYENLYCVVSGEKHFLFHPPSDRPFIPYELYTPATYQLTEEGTFKVVDEEAMEKAEVSRTCLLTVRVLQAHRLPSKDLVTPSDCYVTLWLPTACSHRLQTRTVKNSSSPVWNQSFHFRIHRQLKVQACCYHKEPRIPIGSTSYHSPSPRWDELCMGQHRHREQDTQGYLSWLPKQQAQEEQERGGWGQCKDDQIRKAGRQGGRVRGAWKLNFACRVSSEHRVQLVVPGSCEGPQEASVGTGTFRFHCPACWEQELSIRLQDAPEEQLKAPLSALPSGQVVRLVFPTSQEPLMRVELKKEAGLRELAVRLGFGPCAEEQAFLSRRKQVVAAALRQALQLDGDLQEDEIPVVAIMATGGGIRAMTSLYGQLAGLKELGLLDCVSYITGASGSTWALANLYEDPEWSQKDLAGPTELLKTQVTKNKLGVLAPSQLQRYRQELAERARLGYPSCFTNLWALINEGVVALMEPHDHKLSDQREALSHGQNPLPIYCALNTKGQSLTTFEFGGEWPKS

SEQ ID NO: 50513 - protein, 1040 aa, Homo sapiens
  DOMAIN (255)..(269): SYNAPTOTAGMIN SIGNATURE domain identified by eMATRIX, accession number PR00399B, p-value=6.186e-09, raw score of 14.27
  DOMAIN (256)..(340): C2 domain identified by PFam, accession name C2, E-value=9.4e -09, PFam score of 42.5
  misc_feature (1)...(1040): Xaa = X or * as defined in Table 2
DTPAWHGDANRTKAALEAARSDYLEFPPAARELCVPLAVPYLDKPPTPLHFYRDWVCPNRPCIIRNALQHWPALQKWSLPYFRATVGSTKVSVAVTPDGYADAVERGIRFMXLPVERRLPLSFVLDVLEGRAQHPGVLYVQKQCSNLPSELPQLLPDLESHVPWASEALGKMPDAVNFWLGEAVXVTFLHKDHYENLYCVGSGEKHFLFHPPSDRPFIPYELYTPATYQLTEEGTFKVVDEEAMEKAEVSRTCLLTVRVLQAHRLPSKDLVTPSDCYVTLWLPTACSHRLQTRTVKNSSSPVWNQSFHFRIHRQLKNVMELKVFDQDLVTGDDPVLSVLFDAGTLRAGEFRRESFSLSPQGEGRLEVEFRLQSLADRGEWLVSNGVLVARELSCLHVQLEETGDQKSSEHRVQLVVPGSCEGPQEASVGTGTFRFHCPACWEQELSIRLQDAPEEQLKAPLSALPSGQVVRLVFPTSQEPLMRVELKKEAGLRELAVRLGFGPCAEEQAFLSRRKQVVAAALRQALQLDGDLQEDEIPVVAIMATGGGIRAMTSLYGQLAGLKELGLLDCVSYITGASGSTWALANLYEDPEWSQKDLAGPTELLKTQVTKNKLGVLAPSQLQRYRQELAERARLGYPSCFTNLWALINEALLHDEPHDHKLSDQREALSHGQNPLPIYCALNTKGQSLTTFEFGEWCEFSPYEVGFPKYGAFIPSELFGSEFFMGQLKKRLPESRICFLEGIWSNLYAANLQDSLYWASEPSQFWDRWVSRNQANLDKEQVPLLKIEEPPSTAGRIAEFFTDLLTWRPLAQATQNFLRGRSIFHKDYFQHPHFSTWKATTLDGLPNQLTPSEPHLCLLDGGYTLINTSCLPLLQPTRDVDLILSLDYNLHGAFQQLQLLGRFCQEQGIPFPPISPSPEEQLQPWRSCHTFSDPTCPGAPAVLHFPLVSDSFREYSAPGVRRTPEEAAAGEVNLSSSDSPYHYTKVTYSQEDVDKLLHLTHYNVCNNQEQLLGRLCAPGSANGRRQRKAPTEWPGPLPTP

SEQ ID NO: 50514 - protein, 550 aa, Homo sapiens
  DOMAIN (128)..(142): 70 KD HEAT SHOCK PROTEIN SIGNATURE domain identified by eMATRIX, accession number PR00301A, p-value=2.895e-16, raw score of 14.84
  misc_feature (1)...(550): Xaa = X or * as defined in Table 2
AQSRRSRDRGQAFSNHHAAEHITCTPGSGSGSRVSSGQAARRRLSGRAGLWAAVTNPPPHPTWLEVSRSAAATARAALCRRSACLLPRTPHLSAMISASRAAAARLVGAAASRGLRAARHQIRSNQGTVVGIDLGTTNSCVAVMKKNVPFKIVRASNGDAWVEAHGKLYSPSQIGAFVLMKMKETADXXLFLSSEPPQPGQRAGFLQPSCCGAYYLYPWLRERQSSILWSGGAAAPQRKSGPLGRSDQPPPSPHVVGGFQKRCRHRSRSSLPSERLFAASYSSFIRHDKCQPSCSSPSRGAAASRGLRAARHQIRSNQGTVVGIDLGTTNSCVAVMKKNVPFKIVRASNGDAWVRLMGNCILRVRLEHLCDEDERDCRLIVALPEGMEEPEFDYQNDMGNSQDLERRRGCAAEPWEEGVGQSLALPLVSLCLKCRWYRSPCTQGQHPATFSGPAEGVISERSMLEHWHEEINQCKAYNEDVFSTMRTNPARISSEAMAPADIIDHSSQRPDFTSGKMLADEFGTASNIKSRVNAFQSWEPLHLYNKDSNL

SEQ ID NO: 50515 - protein, 171 aa, Homo sapiens
  DOMAIN (103)..(152): Heat shock hsp70 proteins family proteins domain identified by eMATRIX, accession number BL00297B, p-value=1.000e-40, raw score of 22.91
LALPGQDFAQGFASGLGPAESHPSRSRVSFQNYQDSWNGLSHEAFRLVSRRDYASEAIKGAVVGIDLGTTNSCVAVMEGKQAKVLENAEGARTTPSVVAFTADGERLVGMPAKRQAVTNPNNTFYATKRLIGRRYDDPEVQKDIKNVPFKIVRASNGDAWVEAHGKLYSPS

SEQ ID NO: 50516 - protein, 836 aa, Homo sapiens
  DOMAIN (330)..(382): Heat shock hsp70 proteins family proteins domain identified by eMATRIX, accession number BL00297C, p-value=1.000e-40, raw score of 9.51
  DOMAIN (208)..(817): Hsp70 protein domain identified by PFam, accession name HSP70, E-value=0, PFam score of 1261.8
  misc_feature (1)...(836): Xaa = X or * as defined in Table 2
MAPSSRSGAGNTSTPGGCARARAPPGNAGVHSGTQTGAVRDTAFISPSSPGLFLSSEPPQPGQRAGFLQPSCCGAYYLYPWLRERQSSILWSGGAAAPQRKSGPLGRSDQPPPSPHVVGGFQKRCRHRIAQLFAVGALVCCLVLLHLSAMISASRAAAARLVGAAASRGPTAARHQDSWNGLSHEAFRLVSRRDYASEAIKGAVVGIDLGTTNSCVAVMEGNQAKVLENAEGAKTTPSVVAFTADGERLGGMPAKRQAVTNPNNTFYATKRLIGRRYDDPEVQKDIKNVPFKIVRASNGDAWVEAHGKLYSPSQIGAFVLMKMKETAENYLGHTAKNAVITVPAYFNDSQRQATKDAGQISGLNVLRVINEPTAAALAYGLDKSEDKVIAVYDLGGGTFDISILEIQKGVFEVKSTNGDTFLGGEDFDQALLRHIVKEFKRETGVDLTKDNMALQRVREAAEKAKCELSSSVQTDINLPYLTMDSSGPKHLNMKLTRAQFEGIVTDLIRRTIAPCQKAMQDAEVSKSDIGEVILVGGMTRMPKVQQTVQDLFGRAPSKAVNPDEAVAIGAAIQGGVLAGDVTDVLLLDVTPLSLGIETHGAVFSKLINRKTNIPTKKSQVFSTAADGQTQVEIKVCQGEREMAGDNKLLGQFTLIGIPPAPRGVPQIEVTFDIDANGIVHVSAKDKGTGREQQIVIQSSGGLSKDDIENMVKNAEKYAEEDRRKKERVEAVNMAEGIIHDTETKMGEFQGPNYPADECNKLKEEISKMRELPGXKKTSENWEENIRPGQHPLFERGIDXSLFEMAYQKDGHLSGEGSGSSGTGGTKGKIQKGGKNQ

SEQ ID NO: 50517 - protein, 55 aa, Homo sapiens
LERERRKRSRKELLNFYAWQHRESKMEHLRQLRKKFEEDKQRIELLRAQRKFRPY

SEQ ID NO: 50518 - protein, 361 aa, Homo sapiens
  misc_feature (1)...(361): Xaa = X or * as defined in Table 2
ARAGAEPQLPATPALPGGKMVARSLAGLSSGXPGHPSPPISFPAIPIKFSEKQQASHYLYVRAHGIQQGTKWREALGWPSRMLTLGFPPPCSEESLSCLQSTCGLVQSVELKFPDLPHPCTSCLAFSVPCXSSRTVSAGHLQGLPRLPSCFPTEGAPSPGLGAGSPGALLFRDLVPDVGRSPQPLTSLSLQGFQVAYVVFQKPSGVSAALAVGPKCQAXGSPVSLAPFSSEWISDYADSVPDPGWRLREVPGAHRTMGSPSLQEEAKAKEEEGVPDEEGWVKVTRRGRRPVLPRTEAASLRVLERERRKRSRKELLNFYAWQHSRESKMEHSXGKCARSFEEDKQRIRACCGPKRKIPDRN

SEQ ID NO: 50519 - protein, 111 aa, Homo sapiens
SLQVQPFASLISKAPLSTPRLLINKEKAGQSDPFLGMIMGLGGGMDFDSKKAYAELLGWKKELEDLVRREHASIDAQSGAGVPNPSTSASPKKSPPPAKDEARTTEREKPQ

SEQ ID NO: 50520 - protein, 94 aa, Homo sapiens
  misc_feature (1)...(94): Xaa = X or * as defined in Table 2
QSDPFLGMIMGLGGGMDFDSKKAYRVRPRRGLGQPGMDRVRWERGHEGRXEEQAGASPPGNSDLLLHRRDVAWLGECDQGCLALAELLGWKVRS

SEQ ID NO: 50521 - protein, 88 aa, Homo sapiens
  DOMAIN (77)..(88): Sir2 family domain identified by PFam, accession name SIR2, E -value=0.0022, PFam score of 16.7
SHLSGLATPPHPFQDSDSDSEGGAAGGEADMDFLRNLFSQTLSLGSQKERLLDELTLEGVARYMQSERCRRVICLVGAGISTSAGIPD

SEQ ID NO: 50522 - protein, 366 aa, Homo sapiens
  DOMAIN (103)..(302): Sir2 family domain identified by PFam, accession name SIR2, E -value=1.5e-25, PFam score of 98.1
  misc_feature (1)...(366): Xaa = X or * as defined in Table 2
RDRAVGDSLKGFSTAPMAEPDPSHPLETQAGKVQEAQDSDSDSEGGAAGGEADMDFLRNLFSQTLSLGSQKERLLDELTLEGVARYMQSERCSQSSSCLVGAGISTSAGIPRLFASPSTGLLLNNLEKXPSFPNPEAIFXDSAIFKKHPEPFFALAKELYPGAVSRPTICSIISCGLLERDKGGLLLRCVKRREHXVTWERIAGLEQEDLVEAHGTFYTSHCVSASCRHEYPLSWMKEKIFSEVTPKCEDCQSLVKPDIVFFGESLGARFFSCYCSSDFLKVDLLLVMGTSLRDVAWLGECDQGCLALAELLGWKKELEDLVRREHASIDAQSGAGVPNPSTSASPKKSPPPAKDEARTTEREKPQ

SEQ ID NO: 50523 - protein, 118 aa, Homo sapiens
  misc_feature (1)...(118): Xaa = X or * as defined in Table 2
FGFNGCSKRIIKLQELSDLEERENEDSMVPLPKQSLKFFCALEVVLPSCDCRSPGIGLVEEPMDKVEEGPLSFLMKRKTAQKLAIQKALSDAFQKLLIVVLGQDCLDHPXSTSVSVSK

SEQ ID NO: 50524 - protein, 222 aa, Homo sapiens
  misc_feature (1)...(222): Xaa = X or * as defined in Table 2
IPLKMMNFLQSLKSPQLSHQLRLXLPQEVEPSLTQQNFPAQTPVPPMEAEPSPNQQEATVQASEPPKNIELSSQQMVPENIFPPTMENSNQLPEPPTEVVAQLPPRYEVTIPTQGQDQAQLSTLASVTLQPLDLGFIITPESTTEIELSPTMQETPTQPPKEFVPQPPVLSRESSEETGPLPVQQETSAESPEPTKDENPSPIQXEAAFSEISSQGSSWHQT

SEQ ID NO: 50525 - protein, 241 aa, Homo sapiens
  DOMAIN (14)..(24): Probable rabGAP domain proteins domain identified by eMATRIX, accession number PF00566A, p-value=7.333e-10, raw score of 12.64
  DOMAIN (1)..(182): TBC domain identified by PFam, accession name TBC, E-value= 1.8e-25, PFam score of 98.1
GIPAADREASLELIKLDISRTFPNLCIFQQGGPYHDMLHSILGAYTCYRPDVGYVQGMSFIAAVLILNLDTADAFIAFSNLLNKPCQMAFFRVDHGLMLTYFAAFEVFFEENLPKLFAHFKKNNLTPDIYLIDWIFTLYSKSLPLDLACRIWDVFCRDGEEFLFRTALGILKLFEDILTKMDFIHMAQFLTRLPEDLPAEELFASIATIQMQSRNKKWAQVLTALQKDSREMEKGSPSLRH

SEQ ID NO: 50526 - protein, 144 aa, Homo sapiens
  misc_feature (1)...(144): Xaa = X or * as defined in Table 2
CGGIPKMEESAEYEAARHKREKRMENINLAGSKRGKEDGKDSEFAAIENLPGFELLSDREKVLCSSLNLSPARYVTVKTIIIKDHLQKRQGIPCQKPPSXLPGQSPKEKDFEFPHRKRLDLQGRVLKLRRFESQGDAQTVCQPK

SEQ ID NO: 50527 - protein, 156 aa, Homo sapiens
GREGGRPSARWAWSLRPRASKAPAFMEYEDKAGRPSKPPSPKQNVRKNLDFEPLSTTALILEDRPANLPAKPAEEAQKHRQQYEEMVVQAKKRELKEAQRRKKQLEERCRVEESIGNAVLTWNNEILPNWETMWCSRKVRDLWWQGIPPSVRGKVS

SEQ ID NO: 50528 - protein, 360 aa, Homo sapiens
  misc_feature (1)...(360): Xaa = X or * as defined in Table 2
NQEWKRSPPITVAKATQGAYLNILKDTLRAQKEQKEGKEEVIHKGAKLHPNGYRMAQGSETLVARGGPCRSVEPSAASPQELRGWWEAQALKRWGLMGGVWVMEVDPSWLGAISAIVSSSASRLLKSVWHIPCPHFLLLRPQLKEAQRRKKQLEERCRVEESIGNAVLTWNNEILPNWETMWCSRKVRDLWWQGIPPSVRGKVWSLAIGNELNITHELFDICLARAKERWRSLSTGGSEVENEGLCVAVCAQQGHVGVMGFGSDEPSAVSPCEKGKSLAAWVLIFVDFRVGLQKSFQKRKERESTKLQQLWSWCLMLTYFAAFEVFFEENLPKLFAHFKKNNLTPDIYLIDWXFRLLVGC

SEQ ID NO: 50529 - protein, 165 aa, Homo sapiens
EDSEMAPPAPGPASGGFGEVYELFDVKNAFYIGSYQQCINEAQRVKLSSPERDVERDVFLYRAYLRRDSIVAELDREMSRSVDVTNTTFLLMAASIYLHDQNPDAALRALHQGDSLECTAMTVQILLKLDRLDLARKELKRMQDLDEDATLTQLATAWVSLATGG

SEQ ID NO: 50530 - protein, 209 aa, Homo sapiens
FFYKSVLAQKEVRCVLDEISPLGPPELKPVRMFADLLPHESRRDSSVPELAEKMSRSVDVPTPPSLLMAASIYLHDQNPDAALRALHQGDSLECTAMTMQDAYYIFQEMADKCSPTLLLLNGQAACHMAQGRWEAAEGLLQEALDKDSGYPETLVNLIVLSQHLGKPPEVTNRYLSQLKDAHRSHPFIKEYQAKENDFDRLVLQYAPSA

SEQ ID NO: 50531 - protein, 292 aa, Homo sapiens
RKFGVVLDEIKPSSAPELQAVRMFADYLAHESRRDSIVAELDREMSRSVDVTNTTFLLMAASIYLHDQNPDAALRALHQGDSLECTAMTVQILLKLDRLDLARKELKRMQDLDEDATLTQLATAWVSLATGGEKLQDAYYIFQEMADKCSPTLLLLNGQAACHMAQGRWEAAEGLLQEALDKPPHGCSCERKLVSPFMVETEAQKSPVCKKVPCHGPPWAGRALGASSLDSGYPETLVNLIVLSQHLGKPPEVTNRYLSQLKDAHRSHPFIKEYQAKENDFDRLVLQYAPSA

SEQ ID NO: 50532 - protein, 134 aa, Homo sapiens
MGPVGILQLLTTRGQADPGSGELARPFSGPPSGPWGHGGRPACPFEAAAGWASTLSAIFLEDVVGILQLLTNPLVPLVQRTQGGIRVLVVEDRWEAAHEQGKVVLVNVPSSWLNLLGPKLGPTMLVPSDFSWAE

SEQ ID NO: 50533 - protein, 132 aa, Homo sapiens
ELQRAMESKMGELPLDINIQEPRWDQSTFLGRARHFFTVTDPRNLLLSGAQLEASRNIVQNYRAGVVTPGITEDQLWRAKYVYDSAFHPDTGEKVVLIGRMSAQGSKDEGHCRRGRSECLCSLRKTPTVVFW

SEQ ID NO: 50534 - protein, 397 aa, Homo sapiens
  misc_feature (1)...(397): Xaa = X or * as defined in Table 2
MKHPNINSALQAPHPFVPGRPHLVAGVAPPALSNHPQARATAAAGKPHPRCAEAAGIGLACTAPGSHWLKMGELPLDINIQEPRWDQSTFLGRAPHFFTVTDPRNLLLSGAQLEASRNIVQNYRAGVVTPGITEDQLWRAKYVYDSAFHPDTGEKVVLIGRMSAQVPMNMTITGCMLTFYRQGSKDEGHCRRGRSECLCSLRKTPTVVFWQWVNQSFNAIVNYSNRRWXHFPSLVRQLGTAYVSATTGAVATALGLKSLTKHLPPLVGRFVPFAAVAAANCINIPLMRQRELQVGIPVADEAGQRLGYSVTAAKQGIFQVVISRICMAIPAMAIPPLIMDTLEKKDFLKRRPWLGAPLQVGLVGFCSIHISNLEPELRAQIHEQNPSVEVVYYNKGL

SEQ ID NO: 50535 - protein, 127 aa, Homo sapiens
  DOMAIN (68)..(78): GLYCOPROTEIN PROTEIN SPIKE E2 PRECURSOR PEPLOMER domain identified by eMATRIX, accession number PD00866L, p-value=5.418e- 10, raw score of 3.73
MVQTAAGDYSGNIEWASCTLCSAVRRSCCAPSEAVKSAAIPYWLLLTPQHLNVIKADFNPMPNRGTHNCCCCCCCCCWHLAANPEAGSRMHIGSSHPILFFKVEVSPDPDKWESPWGQGTWSCQHQA

SEQ ID NO: 50536 - protein, 393 aa, Homo sapiens
MFEQLDNNTSNERRKEPEEWPSERKTLLPAPRGCRSRTPPQAPESDSRFQPPPPLRVPAPPTHRISVHKLRAHDARFLGRLGFPLGPERARGCHVRVFAANAARRRLAAARGGGSICAHLWLSSAAAFQRVWVQNASVDVADLLATNGVLHILSQVLLPPRGDVPGGQGLLQQLDLVPAFSLFRELLQHHGLVPQIEAATAYTIFVPTNRSLGGPGQQQSPGEADADTVRHHVVLGEALSMETLRKGGHRNSLLGPAHWIVFYNHSGQPMFQGRQMKQANVSWWLVLPDNLKKRISNINRYLTYSLYSNVCRSLFEKHKLMFAFLLCVRIMMNEGKINQVLAETPRTDCLRGGPVAGPENRVEGKGKPGMKAPREQSGRGNNSLIKSSQGRAR

SEQ ID NO: 50537 - protein, 123 aa, Homo sapiens
MAGPRGLLPLCLLAFCLAGFSFVRGQDWPCHSWHPHPGRYLSNAAVEELDDGAAPQAGDVPERRAGRQVRGDLILLRGGLDEVLTRSLCWDLLGTLVIAVSPEKHHINSGPQMKIHIACAASE

SEQ ID NO: 50538 - protein, 1533 aa, Homo sapiens
  DOMAIN (357)..(371): LEUCINE-RICH REPEAT SIGNATURE domain identified by eMATRIX, accession number PR00019A, p-value=3.250e-11, raw score of 11.19
  DOMAIN (38)..(142): PX domain identified by PFam, accession name PX, E-value=1.9e -10, PFam score of 48.1
  misc_feature (1)...(1533): Xaa = X or * as defined in Table 2
ELAQNHSRPAPASAPGGGGGGDPNMATARTFGPEREAEPAKEARVVGSELVDTYTVYIIQVTDGSHEWTVKHRYSDFHDLHEKLVAERKIDKNLLPPKKIIGKNSRSLVEKREKDLEVYLQKLLAAFPGVTPRVLAHFLHFHFYETXVIHAALAEELFEKGEQLLGAGEVFAIGPLQLYAVTEQLQQGKPTCASGDAKTDLGHILDFTCRLKYLKVSGTEGPFGTSNIQEQLLPFDLSIFKSLHQVEISHCDAKHIRGLVASKPTLATLSVRFSATSMKEVLVPEAYXFDEREPEGTTLEGPVTAVIPTWQALTTLDLSHNSISEIDESVEIDSQRFEFLDLSHNGLLVVDNLQHLYNLVHLDLSYNKLSSLEGLHTKLGNIKTLNLGRATSXESLSGLHKLYSLVQPGISGDNRDSNRWEGGSGAXGSLPCLEHVSLLNNPLSIIPDYRTKVLAQFGERASEVCLDDTVTTEKELDTVEVLKAIQKAKEVKSKLSNPEKKGGEDSRLSAAPCIRPSSSPPTVAPASASLPQPILSNQGIMFVQEEALASSLSSTDSLTPEHQPIAQGCSDSLESIPAGQAASDDLRDVPGAVGGASPEHAEPEVQVVPGSGQIIFLPFTCIGYTATNQDFIQRLSTLIRQAIERQLPAWIEAANQREEGQGEQGEEEDEEEEEEEDVAENRYFEMGPPDVEEEEGGGQGEEEEEEEEDEEAEEERLALEWALGADEDFLLEHIRILKVLWCFLIHVQGSIRQFAACLVLTDFGIAVFEIPHQESRGSSQHILSSLRFVFCFPHGDLTEFGFLMPELCLVLKVRHSENTLFIISDAANLHEFHADLRSCFAPQHMAMLCSPILYGSHTSLQEFLRQLLTFYKVAGGCQERSQGCFPVYLVYSDKRMVQTAAGDYSGNIEWASCTLCSAVRRSCCAPSEAVKSAAIPYWLLLTPQHLNVIKADFNPMPNRGTHNCRNRNSFKLSRVPLSTVLLDPTRSCTQPRGAFADGHVLELLVGYRFVTAIFVLPHEKFHFLRVYNQLRASLQDLKTVVIAKTPGTGGSPQGSFADGQPAERRASNDQRPQEVPAEALAPAPVEVPAPAPAAASASGPAKTPAPAEASTSALVPEETPVEAPAPPPAEAPAQYPSEHLIQATSEENQIPSHLPACPSLRHVASLRGSAIIELFHSSIAEVENEELRHLMWSSVVFYQTPGLEVTACVLLSTKAVYFVLHDGLRRYFSEPLQDFWHQKNTDYNNSPFHISQCFVLKLSDLQSVNVGLFDQHFRLTGSTPMQVVTCLTRDSYLTHCFLQHLMVVLSSLERTPSPEPVDKDFYSEFGNKTTGKMENYELIHSSRVKFTYPSEEEIGDLTFTVAQKMAEPEKAPALSILLYVQAFQVGMPPPGCCRGPLRPKTLLLTSSEIFLLDEDCVHYPLPEFAKEPPQRDRYRLDDGRRVRDLDRVLMGYQTYPQALTLVFDDVQGHDLMGSVTLDHFGEVPGGPARASQGREVQWQVFVPSAESREKLISLLARQWEALCGRELPVELTG

SEQ ID NO: 50539 - protein, 1550 aa, Homo sapiens
  DOMAIN (682)..(710): Granins proteins domain identified by eMATRIX, accession number BL00422C, p-value=8.085e-10, raw score of 16.18
  DOMAIN (43)..(147): PX domain identified by PFam, accession name PX, E-value=1.9e -10, PFam score of 48.1
  misc_feature (1)...(1550): Xaa = X or * as defined in Table 2
MAAQRAAGATGGGGRGASAPGGGGGGDPNMATARTFGPEREAEPAKEARVVGSELVDTYTVYIIQVTDGSHEWTVKHRYSDFHDLHEKLVAERKIDKNLLPPKKIIGKNSRSLVEKREKDLEVYLQKLLAAFPGVTPRVLAHFLHFHFYEINGITAALAEELFEKGEQLLGAGEVFAIGPLQLYAVTEQLQQGKPTCASGDAKTDLGHILDFTCRLKYLKVSGTEGPFGTSNIQEQLLPFDLSIFKSLHQVEISHCDAKHIRGLVASKPTLATLSVRFSATSMKEVLVPEASEFDEWEPEGTTLEGPVTAVIPTWQALTTLDLSHNSVSEIDESVKLIPKIEFLDLSHNGLLVVDNLQHLYNLVHLDLSYNKLSSLEGLHTKLGNIKTLNLAGNLLESLSGLHKLYSLVNLDLRDNRIEQMEEVRSIGSLPCLEHVSLLNNPLSIIPDYRTKVLAQFGERASEVCLDDTVTTEKELDTVEVLKAIQKAKEVKSKLSNPEKKGVQDDPDCAPGELGAMREDEPCAGGEQGIMFVQEEALASSLSSTDSLTPEHQPIAQGCSDSLESIPAGQAASDDLRDVPGAVGGASPEHAEPEVQVVPGSGQIIFLPFTCIGYTATNQDFIQRLSTLIRQAIERQLPAWIEAANQREEGQGEQGEEEDEEEEEEEDVAENRYFEMGPPDVEEEEGGGQGEEEEEEEEDEEAEEERLALEWALGADEDFLLEHIRILKVLWCFLIHVQGSIRQFAACLVLTDFGIAVFEIPHQESRGSSQHILSSLRFVFCFPHGDLTEFGFLMPELCLVLKVRHSENTLFIISDAANLHEFHADLRSCFAPQHMAMLCSPILYGSHTSLQEFLRQLLTFYKVAGGCQERSQGCFPVYLVYSDKRMVQTAAGDYSGNIEWASCTLCSAVRRSCCAPSEAVKSAAIPYWLLVTPQHLNVIKGDFNPMPNRGTHNCRNRNSFKLSRVPLSTVLLDPTRSCTQPRGAFADGHVLELLVGYRFVTAIFVLPHEKFHFLRVYNQLRASLQDLKTVVIAKTPGTGGSPQGSFADGQPAERRASCTCDVNLHLGSAVNMVFFGGYSNDQRPQEVPAEALAPAPAEVPAPAPAAASASGPAKTPAPAEASTSALVPEETPVEAPAPPPAEAPAQYPSEHLIQATSEENQIPSHLPACPSLRHVASLRGSAIIELFHSSIAEVENEELRHLMWSSVVFYQTPGLEVTACVLLSTKAVYFVLHDGLRRYFSEPLQDFWHQKNTDYNNSPFHISQCFVLKLSDLQSVNVGLFDQHFRLTGSTPMQVVTCLTRDKLPXPHCFLQHLMVVLSSLERTPSPEPDDKDFYSEFGNKTTGKMENYELIHSSRVKFTYPSKEEIGDLTFTVAQKMAEPEKAPALSILLYVQAFQVGMPPPGCCRGPLRPQGHFLASPASEIFLLDEDCVHLPTCPSFAKEPPQRRQVTGLDDGRRVRDLDRVLMGYQTYPQALTLVFDDVQGHDLMGSVTLDHFGEVPGGPARASQGREVQWQVFVPSAESREKLISLLARQWEALCGRELPVELLG

SEQ ID NO: 50540 - protein, 75 aa, Homo sapiens
ERFRPPIARVIDVSNGKVHVAESCLEETGGLGVDIVLDAGLDPPDSHCLFLKGATLAFLNDEVWNLSNVQQGRYL

SEQ ID NO: 50541 - protein, 161 aa, Homo sapiens
  DOMAIN (62)..(90): Quinone oxidoreductase / zeta-crystallin proteins domain identified by eMATRIX, accession number BL01162B, p-value=5.675e- 10, raw score of 18.11
KVQAVGAAQRQSSTDEEITFVFQEKEDLPVTEDNFVKLQVKACALSQINTKLLAEMKMKKDLFPVGREIAGIVLDVGSKVSFFQPDDEVVGILPLDSEDPGLCEVVRVHEHYLVHKPEKVTWTEAAGSIRDGVRAYTALHYLSHLSPGKSVLIMDGASAFG

SEQ ID NO: 50542 - protein, 73 aa, Homo sapiens
GRVGDEPAVKLQLLPHKHDIITLLGVGGHWVTTEENLQLDPPDSHCLFLKGATLAFLNDEVWNLSNVQQGKYL

SEQ ID NO: 50543 - protein, 97 aa, Homo sapiens
HLSPGKSVLIMDGASAFGTIAIQLAHHRGAKVISTACSLEDKQCLERFRPPIARVIDVSNGKVHVAESCLEETGGLGVDIVLDAGGYIFQHSSYIFT

SEQ ID NO: 50544 - protein, 53 aa, Homo sapiens
QSFQLRILKDVMEKLSTGVFRPQLDEPIPLYEAKVSMEAVQKNQGRKKQVVQF

SEQ ID NO: 50545 - protein, 130 aa, Homo sapiens
  misc_feature (1)...(130): Xaa = X or * as defined in Table 2
VRLYSKDDEPAVKLQLLPHKHDIITLLGVGGHWVTTEENLQLDPPDSHCLFLKGATLAFLNDEVWNLSNVQQGKYLSXQSFQLRILKDVMEKLSTGVFRPQSDEHIPVFEARISLEIVEKNQGRXNKLHF

SEQ ID NO: 50546 - protein, 393 aa, Homo sapiens
  DOMAIN (259)..(287): Quinone oxidoreductase / zeta-crystallin proteins domain identified by eMATRIX, accession number BL01162B, p-value=6.961e- 10, raw score of 18.11
MPRAAIAQTPAPTPAPAAAARGPGRRLAALSSPHLRAAEHDGRCSSETGCHGVLDSLASPTPPFRSDERPDQWEQGAGSLTKDWKVAVVKVQAVGAAQRQVSPGKRVLCLGKRAFKRKVERCPTEPCSPGEDGGSRRTLTWDLFGPRPSLAEAAEGHFFLPHHFAVFGKQLVVIRCMWLLSQIGPLHYAKRRNHLERDVTMKGLYFQQSSTDEEITFVFQEKEDLPVTEDNFVKLQVKACALSQINTKLLAEMKMKKDLFPVGREIAGIVLDVGSKVSFFQPEDEVVGILPLDSEDPGLCEVVRVHEHYLARVIDVSNGKVHVAESCLEETGGLGVDIVLDAGVRLYSKDDEPAVKLQLLPHKHDIITLLGVGGHSGNNRRKPSGEETEAQRC

SEQ ID NO: 50547 - protein, 394 aa, Homo sapiens
  DOMAIN (95)..(123): Quinone oxidoreductase / zeta-crystallin proteins domain identified by eMATRIX, accession number BL01162B, p-value=5.675e- 10, raw score of 18.11
  DOMAIN (52)..(394): Zinc-binding dehydrogenases domain identified by PFam, accession name adh_zinc, E-value=5.8e-08, PFam score of 13.7
  misc_feature (1)...(394): Xaa = X or * as defined in Table 2
PTRPDQWEQGAGSLTKDWKVAVVKVQAVGAAQRQVTMKGLYFQQSSTDEEITFVFQEKEDLPVTEDNFVKLQVKACALSQINTKLLAEMKMKKDLFPVGREIAGIVLDVGSKVSFFQPDDEVVGILPLDSXKTPGLCESLLRVHEPLLGFINPEKVTWTEAAGSISGMGVRAYYSFLHLSYLHLLSWGKSVLIMGGSASAFGTIAIQLAHHRGAKVISTACSLEDKQCLERFRPPIARVIDVSNGKVHVAESCLEETGGLGVDIVLDAGVRLYSKDDEPAVKLQLLPHKHDIITLLGVGGHWVTTEENLQLDPPDSHCLFLKGATLAFLNDEVWNLSNVQQGKYLCILKDVMEKLSTGVFRPQLDEPIPLYEAKVSMEAVQKNQGRKKPSWFQF

SEQ ID NO: 50548 - protein, 37 aa, Homo sapiens
  misc_feature (1)...(37): Xaa = X or * as defined in Table 2
FFKFSFFNGCXSIKRQSQGQALDRDIICFVDICTKDC

SEQ ID NO: 50549 - protein, 465 aa, Homo sapiens
  misc_feature (1)...(465): Xaa = X or * as defined in Table 2
MKEEELTRQIVLVQEAGKGVVRTKDGACAEVWQALEELEKGLCAGIVRVEGMAAAPPSYCFVAFPPRAKDGLVVFGKNSARPRDEVQEVVYFSAADHEPESKVECTYISIDQVPRTYAIMISRPAWLWGAEMGANEHGVCIANEAINTREPAAEIEALLGMDLVRLGLERGETAKEALDVIVSLLEEHGQGGNYFEDANSCHSFQSAYLIVDRDEAWVLETIGKYWAAEKVTEGVRCICSQLSLTTKMDAEHPELRSYAQSQGWWTGEGEFNFSEVFSPVEDHLDCGAGKDSLEKQEESITVQTMMNTLRDKASGVCIDSEFFLTTASGVSVLPQNRSSPCIHYFTGTPDPSRSIFKPFIFVDDVKLVPKTQSPCFGDDDPAKKEPRFQEKPDRRHELYKAHEWARAIIESDQEQGRKLRSTMLELEKQGLXAMEEILTSSEPLDPAEVGDLFYDCVDTEIKFFK

SEQ ID NO: 50550 - protein, 118 aa, Homo sapiens
  DOMAIN (10)..(58): L-lactate dehydrogenase proteins domain identified by eMATRIX, accession number BL00064B, p-value=1.000e-40, raw score of 23.57
  DOMAIN (2)..(118): lactate/malate dehydrogenase domain identified by PFam, accession name ldh, E-value=2.8e-52, PFam score of 185.4
QTPKIVADKDYSVTANSKIVVVTAGVRQQEGESRLNLVQRNVNVFKFIIPQIVKYSPDCIIIVVSNPVDILTYVTWKARFRYLMAEKLGIHPSSCHGWILGAHGDSSVAVWSGVNLAG

SEQ ID NO: 50551 - protein, 107 aa, Homo sapiens; identical to SEQ ID NO: 49257
  DOMAIN (6)..(20): L-LACTATE DEHYDROGENASE SIGNATURE domain identified by eMATRIX, accession number PR00086E, p-value=8.364e-18, raw score of 11.21
  DOMAIN (1)..(103): lactate/malate dehydrogenase domain identified by PFam, accession name ldh, E-value=3.4e-35, PFam score of 125.9

SEQ ID NO: 50552 - protein, 354 aa, Homo sapiens
  DOMAIN (103)..(151): L-lactate dehydrogenase proteins domain identified by eMATRIX, accession number BL00064B, p-value=1.000e-40, raw score of 23.57
  DOMAIN (43)..(352): lactate/malate dehydrogenase domain identified by PFam, accession name ldh, E-value=6.9e-177, PFam score of 601.0
LCLLRTTVTEVSRAFSLLCKMATLKEKLIAPVAEEEATVPNNKITVVGVGQVGMACAISILGKSLADELALVDVLEDKLKGEMMDLQHGSLFLQTPKIVADKDYSVTANSKIVVVTAGVRQQEGESRLNLVQRNVNVFKFIIPQIVKYSPDCIIIVVSNPVDILTYVTWKLSGLPKHRVIGSGCNLDSARFRYLMAEKLGIHPSSCHGWILGEHGDSSVAVWSGVNVAGVSLQELNPEMGTDNDSENWKEVHKMVVESAYEVIKLKGYTNWAIGLSVADLIESMLKNLSRIHPVSTMVKGMYGIENEVFLSLPCILNARGLTSVINQKLKDDEVAQLKKSADTLWDIQKDLKDL

SEQ ID NO: 50553 - protein, 288 aa, Homo sapiens; identical to SEQ ID NO: 49544
  DOMAIN (113)..(138): L-LACTATE DEHYDROGENASE SIGNATURE domain identified by eMATRIX, accession number PR00086B, p-value=2.385e-25, raw score of 13.67
  DOMAIN (108)..(286): lactate/malate dehydrogenase domain identified by PFam, accession name ldh, E-value=3.6e-80, PFam score of 279.7

SEQ ID NO: 50554 - protein, 59 aa, Homo sapiens
NLMCFPQNSWWKEEFFLLFLVFLGRYCEDGICPVSIYPNNPEQGQVGPGFSCKCTKSLR

SEQ ID NO: 50555 - protein, 447 aa, Homo sapiens
  DOMAIN (159)..(184): L-LACTATE DEHYDROGENASE SIGNATURE domain identified by eMATRIX, accession number PR00086B, p-value=2.385e-25, raw score of 13.67
  DOMAIN (109)..(447): lactate/malate dehydrogenase domain identified by PFam, accession name ldh, E-value=2.1e-130, PFam score of 446.6
  misc_feature (1)...(447): Xaa = X or * as defined in Table 2
MEKPKRLRWLWGPAPSSLLAEPAPEETHAADFVFSARLLQRSPEPSLSWGGRALAEEQKAEGSSCGSAERLVAFAAKTRPYLSLCKMATLKEKLIAPVAEEEATVPNNKITVVGVGQVGMACAISILGKSRAMEHTTAGAPYTPRQQTCQCNMMSLADELALVDVLEDKLKGEMMDLQHGSLFLQTPKIVADKDYSVTANSKIVVVTAGVRQQEGESRLNLVQRNVNVFKFIIPQIVKYSPDCIIIVVSNPRDILTYGTWKLSGLPKHRVIGSGCNLDSARFRYLMAEKLGIHPSSCHGWILGEHGDSSVAVWSGVNVAGVSLQELNPEMGTDNDSENWKEVHKMVVESAYEVIQAXKGYTHWAIGLSVAEILNESMLKNLSRIHPVSTMVKGMYGIENEVFLSLPCILNAGGLTSVINPKVKDDEVAQLKKSADTLWDIQKDLKDL

SEQ ID NO: 50556 - protein, 124 aa, Homo sapiens
  DOMAIN (80)..(115): Troponin domain identified by eMATRIX, accession number PF00992A, p-value=4.358e-11, raw score of 16.67
  misc_feature (1)...(124): Xaa = X or * as defined in Table 2
MSFSLRVAILHRREKALETSVTIGRKKPKSAACVIFRRFPGAPLIPYPLITKEDINAIEMEEDKRDLISREISIFRDTHNKLEEEKGLKDKERQEIEKERRERERERERERDRREREREREREX

SEQ ID NO: 50557 - protein, 55 aa, Homo sapiens
PSGTLRGPVCLLHSISSHLGRPGGEGGGLVLCPPPLPMPLCYPSVSPVQKERKGH

SEQ ID NO: 50558 - protein, 99 aa, Homo sapiens
TKMTVNNLHPRVTEEDIVGQPMKCNLHMNGNVITSDQPILLRLSDSPSMKKESELPRRVNSASSSNPPAEVDPDTILKALFKSSGASVTTQPTEFKIKL

SEQ ID NO: 50559 - protein, 156 aa, Homo sapiens
  DOMAIN (30)..(94): RNA recognition motif. domain identified by PFam, accession name rrm, E-value=4.7e-09, PFam score of 43.5
MSRTLVNKEEPPKELPAAEPVLSPLEGTKMTVNNLHPRVTEEDIVELFCVCGALKRARLVHPGVAEVVFVKKDDAITAYKKYNNRCLDGQPMKCNLHMNGNVITSDQPILLRLSDSPSMKKESELPRRVALFPQGKAYDQWAIGLETPDCGKGCQG

SEQ ID NO: 50560 - protein, 81 aa, Homo sapiens
MQRGGCLKDPAFSRGRGAAFPLCVLSFSLSCAECPTPALFPFWVSLLGGGCVVSPPGSHLAWALNHTRVLCSRQLSSGWGL

SEQ ID NO: 50561 - protein, 243 aa, Homo sapiens
HRQKDARFRIKGKVQDAREMLNSRKQQTTVPQKPRQVADAREKISLKRSSPAAFINPPIGTVTPALKLTKTIQVPQQKAMAPLHPHPAGMRINVVNNHQAKQNLYDLDEDDDGIASVPTKQMKFAASGGFLHHMAGLSSSKLSMSKALPLTKVVQNDAYTAPALPSSIRTKALTNMSRTLVNKEEPPKELPAAEPVLSPLEGTKMTVNNLHPRVTEEDIVELFCVCGALKRARLVHPGVAEVG

SEQ ID NO: 50562 - protein, 584 aa, Homo sapiens
  misc_feature (1)...(584): Xaa = X or * as defined in Table 2
MEIASFVGPNVNTVGNLRPAQSAAGDGDEVQSVHSQRQDCQATGSLSNGENNEKNAFTTYQQETKNTTTPQSVYFLGVNKMSSQHREGSRGTSPPLPVLACFELAVARVGPRTPEVVRRSLAAEGAGSRGLDCFRLARRIKMADISLDELIRKRGAAAKGRLNARPGVGGVRSRVGIQQGLLSQSTRTATFQQRFDARQKIGLSDARLKLGVKDAREKLLQKDARFRIKGKVQDARRDVXTFRKQQTTVPQKPRQVADARERIQLGRGRSPAAFLNPPIGTGTPALKLTTTIQRMHVDPVGWILTTECFQVPQQKAMAPLHPHPAGMRINVVNNHQAKQNLYDLDEDDDGIASVPTKQMKFAASGGFLHHMAGLSSSKLSMSKALPLTKVVQNDAYTAPALPSSIRTKALTNMSRTLVNKEEPPKELPAAEPVLSPLEGNKMTVNNLHPRVTEEDIVEVFCVCGGLRRRARLVPSGGXPKVVFCEKRDDAITAYKKYNNRCLDGQPMKCNLHMNGNVITSDQPILLRLSDSPSMKKESELPRRVNSASSSNPPAEVDPDTILKALFKSSGASVTTQPTEFKIKL

SEQ ID NO: 50563 - protein, 305 aa, Homo sapiens
MGSSDHPVSDRASLQSQQQSKAQQCFQEWYCKNCRIRETQSDTLQNCVSYLRISLPTPHHCVQDHTVGHIRQAMKASQKVIHQKKAEMRLWPQKNKETEADKELRDGKITDKFGALDMTPKSYHVPLASYPVLYDIHVESILVHVAKVASMDKYQSTQQTVTDYNESDTEFWDKMQAEWEEMARRNWISENQEAQNQVTISASEKGYYFHTENPFKDWPGAFEEGLKRLKEGDLPVTILFMEAAILQDPGDAENSEGGLYVCMNTFLAFGREHVERHFRKTGQSVYMHLKRHVREVRAALSENWP

SEQ ID NO: 50564 - protein, 1076 aa, Homo sapiens
  DOMAIN (263)..(281): Ubiquitin carboxyl-terminal hydrolases family 2 proteins domain identified by eMATRIX, accession number BL00972A, p-value= 4.176e-16, raw score of 11.93
  DOMAIN (756)..(870): UBA domain identified by PFam, accession name UBA, E-value= 1.3e-30, PFam score of 115.1
LDTDDDLNSDDYEYEDEAKLVIFPDHYEIALPNIEELPALVSECARLLARCAWLCVSLKLSTLLTDDTGLLTVRNKEEVLARSAKVTIACDAVLSSKSPYRKQDPDTWENELPVSKYANNLTQLDNGVRIPPSGWKCARCDLRENLWLNLTDGSVLCGKWFFDSSGGNGHALEHYRDMGYPLAVKLGTITPDGADVYSFQEEEPVLDPHLAKHLAHFGIDMLHMHGTENGLQDNDIKLRVSEWEVIQESGTKLKPMYGPGYTGLKNLGNSCYLSSVMQAIFSIPEFQRAYVGNLPRIFDYSPLDPTQDFNTQMTKLGHGLLSGQYSKPPVKSELIEQVMKEEHKVCVRAFAMLTCSLSSSCSQPQQNGISPRMFKAFVSKSHPEFSSNRQQDAQEFFLHLVNLVERNRIGSENPSDVFRFLVEERIQCCQTRKVRYTERVDYLMQLPVAMEAATNKVAKGSMQKDVNGLIPPVGATLKTAPEQPFSRGIWLCKGRQISNSGPAQKPSGKTVQRGCFSFPQGKSDCKVFDLLFHPDELIAYELTRREAEANRRPLPELVRAKIPFSACLQAFSEPENVDDFWSSALQAKSAGVKTSRFASFPEYLVVQIKKFTFGLDWVPKKFDVSIDMPDLLDINHLRARGLQPGEEELPDISPPIVIPDDSKGRAKQVTFYRGSNFLDLGSFGDRRPGTRTRARSYLASHATRLSWHVRGLLVAPDAVESWPAGSHSMGSDGHLELTVPEEPASDASDIDESSVMQLAEMGFPLEACRKAVYFTGNMGAEVAFNWIIVHMEEPDFAEPLTMPGYGGAASAGASVFGASGLDNQPPEEIVAIITSMGFQRNQAIQALRATNNNLERALDWIFSHPEFEEDSDFVIEMENNANANIISEAKPEGPRVKDGSGRRYSDEEVVTKLSGLLVVEPGAQLALPSGSCARAVGGAARQFRATRLHSSALGRSMGLGTAEQGAVPLGEAWAMQEPTTNSVLAREHCAQPRFLPAPLPPPAPLPPHLASRGSWLHSQPAQRGAPTVQRWAEGLLKRGQSRCHGRGGAESEQGLPARCHLSPPGPTSNIGGHIST

SEQ ID NO: 50565 - protein, 900 aa, Homo sapiens
  DOMAIN (840)..(865): Ubiquitin carboxyl-terminal hydrolases family 2 proteins domain identified by eMATRIX, accession number BL00972D, p-value= 1.000e-19, raw score of 22.55
  DOMAIN (243)..(318): Zn-finger in ubiquitin-hydrolases and other domain identified by PFam, accession name zf-UBP, E-value=6.1e-31, PFam score of 115.1
  misc_feature (1)...(900): Xaa = X or * as defined in Table 2
AEFRGIPRRRRRQTPRSGSGSARSAPVRAEAMQRRGALFGMPGGSGGRKMAAGDIGELLVPHMPTIRVPRSGDRVYKNECAFSYDSPNSEGGLYVCMNTFLAFGREHVERHFRKTGQSVYMHLKRHAREKVRGASGGALPKRRNSKIFLDLDTDDDLNSDDYEYEDXAFLVIFPDHYEIALPNIEELPALVTIACDAVLSSKSPYRKQDPHTWENELPVSKYANNLTQLDNGVRIPPSGWKSARCDLRENLWLNLTDGSVLCGKWFFDSSGGNGHALEHYRDMGYPLAVKLGTITPDGADVYSFQEEEPVLDPHLAKHLAHFGIDMLHMHGTENGLQDNDIKLRVSEWEVIQESGTKLKPMYGPGYTGLKNLGNSCYLSSVMQAIFSIPEFQRAYVGNLPRIFDYSPLDPTQDFNTQMTKLGHGLLSGQYSKPPVKSELIEQVMKEEHKPQQNGISPRMFKAFVSKSHPEFSSNRQQDAQEFFLHLVNLSREGTRIGSENPSDGFSFFWWKNRIQCCQTRKVRYTERVDYLMQLPVAMEAAPNKDELIAYELTRREAEANRRPLPELVRAKIPFSACLQAFSSEPENVDDFWSSALQAKSAGVKTSRFASFPEYLVVQIKKFTFGLDWVPKKFDVSIDMPDLLDINHLRARGLQPGRGKELPDISPPIVIPDGLQKVRLDGTIXXDPSDIDGSSVMQLAEMGFPLEACRKAVYFTGNMGAEVAFNWIIVHMEEPDFAEPLTMPGYGGAASAGASVFGASGLDNQPPEEIVAIITSMGFQRNQAIQALRATNNNLERALDWIFSHPEFEEDSDFVIEMENNANANIISEAKPEGPRVKDGSGTYELFAFISHMGTSTMSGHYICHIKKEGRWVIYNDHKVCASERPPKDLGYMYFYRRIPS

SEQ ID NO: 50566 - protein, 106 aa, Homo sapiens
  DOMAIN (15)..(28): PROTEIN ZINC-FINGER METAL-BINDI domain identified by eMATRIX, accession number PD00066, p-value=7.923e-15, raw score of 13.92
  DOMAIN (1)..(103): Zinc finger, C2H2 type domain identified by PFam, accession name zf-C2H2, E-value=1.5e-21, PFam score of 85.0
EFGKTFSVKRTLLQHQRIHTGEKPYTCSECGKAFSDRSVLIQHHNVHTGEKPYECSECGKTFSHRSTLMNHERIHTEEKPYACYECGKAFVQHSHLIQHQKVHRKL

SEQ ID NO: 50567 - protein, 682 aa, Homo sapiens
  DOMAIN (79)..(118): PROTEIN ZINC FINGER ZINC-FINGER METAL-BINDING NU domain identified by eMATRIX, accession number PD01066, p-value=5.412e-27, raw score of 19.43
  DOMAIN (234)..(599): Zinc finger, C2H2 type domain identified by PFam, accession name zf-C2H2, E-value=5.9e-84, PFam score of 292.3
  misc_feature (1)...(682): Xaa = X or * as defined in Table 2
GAGAPRDWRLRRRGGAALCLKVLFDVRSFPREAAALTPHRLLQFPRSSESPGDQMMAAARLLPVPAGPQPLSFQAKLTFEDVAVLLSQDEWDRLCPAQRGLYRNVMMETYGNVVSLGLPGCKPDIIFHLELRGISLGPVPEWGXEEPGPVEXLLENVETKGESQNTDLSPKPLISEQTVILGKTPLGRIDQENNETKXSFCLSPNSVDHREVQVLSQSMPLTPHQAVPSGERPYMCVECGKCFGRSSHLLQHQRIHTGEKPYVCSVCGKAFSQSSVLSKHRRIHTGEKPYERNRACISLYSEPHLAHLSLIHTGEKPHXCLECPKAFTQLSHLIQHQRIHTGERPYVCPLCGKAFNHSTVLRSHQRVHTGEKPHRCNECGKTFSVKRTLLQHQRIHTREKPYTCSECGKAFNDRSVLIQHHNVHTREKPYECSECGKTFSHRSTLMNHERIHTEEKPYACYECGKAFVQHSHLIQHQRVHTGEKPYVCGECGHAFSARRSLIQHERIHTGEKPFQCTECGKAFSLKATLIVHLRTHTGEKPYECNSCGKAFSRTQLLIQHQRIHTGEKPYECGECGGAFNQHGHLIQHQKSAQKSCDPWLTQECPFSQKLHVEPTSSLQPKRSLCXLYRKLFFGDSVSQNNSRKKHLACCSCGKTSETTCFIFLNHLEVHVGEXSYNCREFW

SEQ ID NO: 50568 - protein, 106 aa, Homo sapiens
GTRPWLRVNAYLIHDTADWKDLNLKFVLQAVMESEMKFDKDHDGLIENGGYADQTYDGWVTTGPSAYCGGLWLAAVAVMVQMAALCGAQDIQDKFSSILSRGQEAY

SEQ ID NO: 50569 - protein, 811 aa, Homo sapiens
  DOMAIN (147)..(155): GLYCOPROTEIN PRECURSOR CELL SI domain identified by eMATRIX, accession number PD00015A, p-value=6.400e-09, raw score of 8.90
MVLSARQTEAPDVGNKAVVVVLERYLQWWYRKTHVEKKTPFIDMINSVPLRQIYGCPLGGIGGGTITRGWRGQFCRWQLNPGMYQHRTVIADQFTVCLRREGQTVYQQVLSLERPSVLRSWNWGLCGYFAFYHALYPRAWTVYQLPGQNVTLTCRQITPILPHDYQDSSLPVGVFVWDVENEGDEALDVSIMFSMRNGLGGGDDAPGAATTVTHITAFDPDSTGQQVWQDLLQDGQLDSPTGQSTPTQKGVGIAGAVCVSSKLRPRGQCRLEFSLAWDMPRIMFGAKGQVHYRRYTRFFGQDGDAAPALSHYALCRYAEWEERISAWQSPVLDDRSLPAWYKSALFNELYFLADGGTVWLEVLEDSLPEELGRNMCHLRPTLRDYGRFGYLEGQEYRMYNTYDVHFYASFALIMLWPKLELSLQYDMALATLREDLTRRRYLMSGVMAPVKRRNVIPHDIGDPDDEPWLRVNAYLIHDTADWKDLNLKFVLQVYRDYYLTGDQNFLKDMWPVCLAVMESEMKFDKDHDGLIENGGYADQTYDGWVTTGPSAYCGGLWLAAVAVMVQMAALCGAQDIQDKFSSILSRGQEAYERLLWNGRYYNYDSSSRPQSRSVMSDQCAGQWFLKACGLGEGDTEVREEEEQPERKMGFPWRWEVFPTQHVVRALQTIFELNVQAFAGGAMGAVNGMQPHGVPDKSSVQSDEVWVGVVYGLAATMIQEGLTWEGFQTAEGCYRTVWERLGLAFQTPEAYCQQRVFRSLAYMRPLSIWAMQLALQQQQHKKASWPKVKQGTGLRTGPMFGPKEAMANLSPE

SEQ ID NO: 50570 - protein, 97 aa, Homo sapiens
  misc_feature (1)...(97): Xaa = X or * as defined in Table 2
GELAGTQCTRGACPHSPXPLHRQHTTVTHITAFDPDSTGQQVWQDLLQDGQLDSPTGDGGSDWEMVGREVVPVLGPGVGGLVISRPCFHVRDPYPWG

SEQ ID NO: 50571 - protein, 179 aa, Homo sapiens
  DOMAIN (101)..(109): GLYCOPROTEIN PRECURSOR CELL SI domain identified by eMATRIX, accession number PD00015A, p-value=6.400e-09, raw score of 8.90
  misc_feature (1)...(179): Xaa = X or * as defined in Table 2
GGGTITRGWRGQFCRWQLNPGMYQHRTVIADQMRTLRSREVXXHAQGHKFTVCLRREGQTVYQQVLSLERPSVLRSWNWGLCGYFAFYHALYPRAWTVYQLPGQNVTLTCRQITPILPHDYQVRPPHLYLPLPSLPQDLPLLETAWPARRGSHACNPNTLGGKAGGSRDQEIETILANT

SEQ ID NO: 50572 - protein, 55 aa, Homo sapiens
MYQHRTVIADQFTVCLRREGQTVYQQVLSLERPSVLRSWNWGLCGYFAFYHALYP

SEQ ID NO: 50573 - protein, 247 aa, Homo sapiens
  misc_feature (1)...(247): Xaa = X or * as defined in Table 2
RVGVSRRPEVRNWATRDCRAQERMTHCLLHGMGRAGAASLTPKPMSLISAYCGGLWLAAVAVMVQMAALCEGTGQSRISFLLSSAGAKKPMRDCCGMVSSGSLSSLKAAERTPGALFFSSSTPGRYYNYDSSSRPQSRSVMSDQVCWTVGVPEGLWPXEKGDTEVREEEEQPERKMGFPWRWEVFPTQHVVRALQTIFELNVQAFAGGAMGAVNGMQPHGVPDKSSVQSDEVWVGVVYGLAATMIQE

SEQ ID NO: 50574 - protein, 207 aa, Homo sapiens
TVRCNSQEAYERLLWNGRYYNYDSSSRPQSRSVMSDQCAGQWFLKACGLGEGDTEVFPTQHVVRALQTIFELNVQAFAGGAMGAVNGMQPHGVPDKSSVQSDEVWVGVVYGLAATMIQEGLTWEGFQTAEGCYRTVWERLGSGPFQTPGGHTARQRVFPFNWPTLRATEALWGHCSLALQQQAAQKRPPGQKVQTGAQGLRDRGLCF

SEQ ID NO: 50575 - protein, 889 aa, Homo sapiens
  DOMAIN (288)..(296): GLYCOPROTEIN PRECURSOR CELL SI domain identified by eMATRIX, accession number PD00015A, p-value=6.400e-09, raw score of 8.90
  misc_feature (1)...(889): Xaa = X or * as defined in Table 2
NTSSFKLSPTTGPPGRYLTTTGARIWNRLARYLVSEGSGLGAIEVMGTQDPGNMGTGVPASEQISCAKEDPQVYCPEETGGTKDVQVTDCKSPEDSRPPKETDCCNPEDSGQLMVSYEGKAMGYQVPPFGWRICLAHEFTEKRKPFQANNVSLSYMIKHIGMGLRYLQWRDRKTHVEKKTPFIDMNKSVPPIQSYFVPLGGLRGGTSTRGWRGQFCRWQLNPGMYQHRTVIADQFTVCLRREGQTVYQQVLSLERPSVLRSWNWGLCGYFAFYHALYPRAWTVYQLPGQNVTLTCRQITPILPHDYQDSSLPVGVFVWDVENEGDEALDVSIMFSMRNGTGWWRRCPRGFVGMSPSVWSVGVQTVRGLLLHSSNPSKPLHDGLWLARSSRAATTVNPHCTAFDPGRTGAAVWQDLLQDGQLDSPTGQRTPTQKGVGIAGAVCVSSKLRPRGQCRLEFSLAWDMPRIMFGAKGQVHYRRYTRVFGAGGDAPPALSHYALCRYAEWEERISAWQSPVLDDRSLPAWYKSALFNELYFLADGGTVWLEVLEDSLPEERAETSVTSAPTLRDYRRFGXLEGQEYRMYNTYDVHFYASFALIMLWPKLELSLQYDMALATLREDLTRRRYLMSGVMGTCEKEGTFIPHDIGGPRWMEPWASAFNAYLIHDTADWKDLNLKFVACRFIRDYLPHGXFKISWKGHVWPVCLAVMESEMKFDKDHDGLIGKWKAMQTQTYDADWVTTGPSAYCGGLWLAAVAVMVQMAALCGAQDMQNKFSSILSRGQEAYDRLLWNGRYYNYDSSSRPQSRSVMSDQCAGQWFLKACGLXEGDTEVFPTQHVVRALQTIFELNVQAFAGGAMGAVNGMQPHGVHNKSSVQSDEVWVGVVYGAGSFP

SEQ ID NO: 50576 - protein, 78 aa, Homo sapiens
  misc_feature (1)...(78): Xaa = X or * as defined in Table 2
MRLKKHRWYKKILKSQDPIIFSVGWRRFQTILLYYIEDHNGRQXASKXIPHSTCIVEQPFWAWIFRIAATRSLSLXLG

SEQ ID NO: 50577 - protein, 86 aa, Homo sapiens
  misc_feature (1)...(86): Xaa = X or * as defined in Table 2
KPVGEKDTWSGMRTTGQLRPAHGVRLKANKDSLYKPILRQKKHFNSLHIPKALQKALPFKNKPKTQAKAGKVPKDRRRXTVSNITV

SEQ ID NO: 50578 - protein, 95 aa, Homo sapiens
TFKNHDKVVVQTSTKIFLKPSIKITGSRPYPKVKSAGDLIVRLYLLKKEHTWLYMAFKLELQLCYKSPPPSQSKISHVEICTFSEHCLESLVFQL

SEQ ID NO: 50579 - protein, 64 aa, Homo sapiens
  misc_feature (1)...(64): Xaa = X or * as defined in Table 2
PDFRIAATXVVLDLDKSIKIVKKLKLTGFPYKIFKNTSFIKACISIYSHIYKSPYCLRKGMKYL

SEQ ID NO: 50580 - protein, 421 aa, Homo sapiens
  DOMAIN (136)..(151): RIBOSOMAL PROTEIN P2 SIGNATURE domain identified by eMATRIX, accession number PR00456E, p-value=6.810e-09, raw score of 3.06
MAANRKDFIHRRCGPELSQSEAVPQGLCRAERSSALAMLSGSVPRRTQLRPCKGTQRRCRRGGEADSGGEAVGGGAAERRSAAARRRGGRRRGGGEAVGGGAAERRSAAARRRRGGRRRRGGGEAGGGGAAEARRAAAARRAAAARRAAAARRAAAARRAAAARRIAESGGEAHSRGEAHSGGEAHSGGAGAERRRPRLHSPALKTHPGQSSEGHVEYKLNHVEFEDQDDEARVQYEGFRPGMYVRVEIENVPCEFVQNFDPLYPIILGGLGNSEGNVGHVQMRLKKHLWYKKILKSQDPIIFSVGWRRFQTILLYYIEDHNGRQRLLKYTPQHIHCGAAFWDIVFMRTWYLVSIPAFYNPVTSLLKPVGEKDTWSGMWTTGQLRLAHGVRLKTTKDSLYKNIHMIVETDTYSDHEEINTS

SEQ ID NO: 50581 - protein, 449 aa, Homo sapiens
  DOMAIN (246)..(273): Protamine P1 proteins domain identified by eMATRIX, accession number BL00048, p-value=1.000e-09, raw score of 6.39
  misc_feature (1)...(449): Xaa = X or * as defined in Table 2
KEELYGDFEDLETGDVHKGKSGPDTQNEDVEKKEEIDPDEEESAKKKHLDKKRKLKEMFDVEYDEGESTYFDDLKGEMQKQAQVNRHTRFPPRAPRHVQLNHAEFEDQDDEARVQYEGFRPGMYVCVEIENVPCEFVXNLDPRYPIILGGLGNSEGNVGYVQVGPFAAYLVPEALWISPPSIILPSHPPQMRLKKHRWYKKILKSRDPIIFSVGWRRFQTIPLCYIEDHNGRQRLLKYTPQHVHRGAAFRSSSSSSSSSSSSSSSSSSSSSSSSSSSSSSSSSSSSRIAATGVVLDLDKSIKVVKKLKLTGFPYKIFKNTSFIKGMFNSALEVAKFEDAVIRTVSGIRGQIKRALXAPEGAFQDSLEDKLRMSDIVFMRTWYPVSIPAFYNPVTSLLKPVGEKDTWSGMWTTGQLRLAHGVRLKTNKDSLYKVLVVCVLVEMKPVLYRQ

SEQ ID NO: 50582 - protein, 1284 aa, Homo sapiens
  DOMAIN (437)..(471): Vesiculovirus phosphoprotein domain identified by eMATRIX, accession number PF00922A, p-value=1.724e-09, raw score of 19.17
  misc_feature (1)...(1284): Xaa = X or * as defined in Table 2
AKDQKKHRKKNSGPKAAKKKKRLLQDLQLGDEEDAWKRNPKAFAFQSAVWMARSFHRTQDLKTKKHHIPVVDRTPLEPPPIVVVVMGPPKVGKSTLIXCLIRNFTRQKLTEIRGPVTIVSGKKLRLTIIDCGCDINMMIDLGEVADLVLMLIDASFGFEMETFEFLNICQVHGFPKIMGVLTHLDSFKHNKQLKKTKKRLKHRFWTEVYPGAKLFYLSGMVHGEYQNQEIHNLGHFITVMKFRPLTWQTSHPYILADSXRMEDLTNPEDIQTNIKCDLQVSLYGYLRGAHFKDKSQIHMPGVGDFAVSDISFLPDPCALPEQQKKRCLNEKEKLVYAPLSGVGGVLYDKDAVYVDLGGSHVFQVSDEVGPTHELVQSLISTHSTIDAKMASSRVTLFSDSKPLGSEDIDNQGLMMPKEEKQMDLNTGRMRRKAIFGDEDESGDSDDEEDDEMSEDDGLENGSSDEEAEEEENAEMTDQYMAVKGIKRRKLELEEDSEMDLPAFADSDDDLERSSAEEGEAEEADESSEEEDCTAGEKGISGSKAAGEGSKAGLSPANCQSDRVNLEKSLLMKKAALPTFDSGHCTAEEVFASEDESEESSSLSAEEEDSENEEAIRKKLSKPSQVSSGQKLGPQNFIDETSDIENLLKEEEDYKEENNDSKETSGALKWKEDLSRKAAEAFLRQQQAAPNLRKLIYGTVTEDNEEEDDDTLEELGGLFRVNQPDRECKHKADSLDCSRFLVEAPHDWDLEEVMNSIRDCFVTGKWEDDKDAAKVLAEDEELYGDFEDLETGDVHKGKSGPNTQNEDIEKEVKEEIDPDEEESAKKKHLDKKRKLKEMFDAEYDEGESTYFDDLKGEMQKKAQLNHVEFEDQDDEARVQYEGFRPGMYVRIEIENVPCEFVQNFDPHYPIILGGLGNSEGNVGYVQMRLKKHRWYKKILKSRDPIIFSVGWRRFQTIPLYYIEDHNGRQRLLKYTPQHMHCGAAFWGPITPQGTGFLAIQSVSGIMPDFRIAATGVVLDLDKSIKIVKKLKLTGFPYKIFKNTSFIKGMFNSALXVAKFEGAVIRTVSGIRGQIKKALRAPEGVFRASFEDKLLMSDIVFMRTWYPVSIPAFYNPVTSLLKPVGEKDTWSGMRTTGQLRLAHGVRLKANKDSLYKPILRQKKHFNSLHIPKALQKALPFKNKPKYQAKAGKGAKRTARRPAVIREPHERKILALLDALSTVHSQKMKKAKEQRHLHNKEHFRAKQKEEEEKLKRQKDLRKKLFRIQGQKERRNQKSSLKGGXGPK

SEQ ID NO: 50583 - protein, 137 aa, Homo sapiens
  DOMAIN (52)..(95): Gamma-glutamyltranspeptidase proteins domain identified by eMATRIX, accession number BL00462A, p-value=1.880e-09, raw score of 20.89
DPRVRGRVGGAGSTQLEVSASASCGALGPADMNPIVVVHGGGAGPISKDRKERVHQGMVRAATVGYGILREGGSAVDAVEGAVVALEDDPEFNAGCGSVLNTNGEVEMDASIMDGKDLSAGAVSAVQRIANPIKLAR

SEQ ID NO: 50584 - protein, 57 aa, Homo sapiens
RELSSPWKTIPSSTQTPHCFLTDQGAAQFAAAMGVPEIPGEKLVTERNKKRLEKEKH

SEQ ID NO: 50585 - protein, 452 aa, Homo sapiens
  DOMAIN (253)..(299): HYDROLASE N4- PRECURSOR PROTEIN SIGNAL BE domain identified by eMATRIX, accession number PD02894A, p-value=7.873e-28, raw score of 21.96
  DOMAIN (328)..(396): Uteroglobin family domain identified by PFam, accession name Uteroglobin, E-value=3.9e-24, PFam score of 93.6
MEDEAMSQGYRQLVEARKDRFSSGASRRNSTLQTQFEFLTTRTAQNRCDQSGGGLSGFEPASGSGGTGRLRGWLDPAGGLGVRVLRCPGVSRGPCTRAVSLGWLWTTLSPSCCLGPADMNPIVVVHGGGAGPISKDRKERVHQGMVRAATVGYGILREGGSAVDAVEGAVVALEDDPEFNAEAFLLNVCPLIFQMSSIPHIEEEKSRAEKRESKDYGGKGGTFNSVLWTLAFPSQGCGSVLNTNGEVEMDASIMDGKDLSAGAVSAVQCIANPIKLARLVMEKTPHCFLTDQGAAQFAAAMGVPEIPGEKLVTERNKKRLEKEKHEKASAEICPSFQRVIETLLMDTPSSYEAAMELFSPDQDMREAGAQLKKLVDTLPQKPRESIIKLMSSSPLPLYQTIYSTSQTLLNITDSTCPTEPVILPQSVPISVILKHIPLRWWAIRLDEYCFIG

SEQ ID NO: 50586 - protein, 338 aa, Homo sapiens
  DOMAIN (218)..(251): HYDROLASE N4- PRECURSOR PROTEIN SIGNAL BE domain identified by eMATRIX, accession number PD02894B, p-value=6.063e-27, raw score of 13.93
  DOMAIN (41)..(338): Asparaginase domain identified by PFam, accession name Asparaginase_2, E-value=4.6e-60, PFam score of 212.9
  misc_feature (1)...(338): Xaa = X or * as defined in Table 2
GLGVRVLRCPGVYRGPCTRAAYLGWLWTTLSPYCCLRSADMNPIVLVHGGGAGPISKDRKERVHHGMVRATTVGYGILREGGSAVDAVQGAVVALEDDPEFNAGCGSVLNTNGEVEMDASIMDGKDLSAGAVSAVQCIANPIKLARLVMENFPHCFLTDQGAAHFAGAMGVPEIPGKKLVTERNKKRLEKEKHEKGAHKTDCQKNLGTVGAVALDCKGNVAYATSTGGIVNKMVGRVGDSPSLGAGGYADHDFXAVSTTGHGESFLKVNLARLTLFHIEQGKTLEEAADPIGCGXMKSRVKGLGGLIVVSKTGDWVAKWTSTSMPWAAAKDGKLPLRN

SEQ ID NO: 50587 - protein, 472 aa, Homo sapiens
  DOMAIN (162)..(444): CNH domain identified by PFam, accession name CNH, E-value= 6.9e-08, PFam score of 28.0
MAPEVAAVEKNGGYNQLCDIWAVGITAIELGELQPPMFDLHPMSPQENGSHHTFVAQPGLSRALAVELLDKVNNPDNHAHYTEADDDDFEANYYSDLCYINWLLPDLDLQGLSSDPNFMLQWNPFVDGANTGKSTSKRAIPPPLPPKPRISSYPEDNFPDEEKASTIKHCPDSESRAPQILRRQSSPSCGPVAETSSIGNGDGISKLMSENTEGSAQAPQLPRKKDKRDFPVVRNPYTGHKYLCGALQSGIVLLQWYEPMQKFMLIKHFDFPLPSPLNVFEMLVIPEQEYPMVCVAISKGTESNQVVQFETINLNSASSWFTEIGAGSQQLDSIHVTQLERDTVLVCLDKFVKIVNLQGKLKSSKKLASELSFDFRIESVVCLQDSVLAFWKHGMQGKSFKSDESNFPPCDSRVSKEEAQLPFPTPSSYGADSSNQTYAHKSQSEREQHKEVRAVLNHCSGLDGGEESGLCG

SEQ ID NO: 50588 - protein, 91 aa, Homo sapiens
CLQDSVLAFWKHGMQGKSFKSDESNFPPCDSRVSKEEAQLPFPTPSSYGADSSNQTYAHKSQSEREQHKEVRAVLNHCSGLDGGEESGLCG

SEQ ID NO: 50589 - protein, 855 aa, Homo sapiens
  DOMAIN (132)..(163): Protein kinases ATP-binding region proteins domain identified by eMATRIX, accession number BL00107A, p-value=7.188e-21, raw score of 18.39
  DOMAIN (22)..(270): Eukaryotic protein kinase domain identified by PFam, accession name pkinase, E-value=3.2e-71, PFam score of 250.0
  misc_feature (1)...(855): Xaa = X or * as defined in Table 2
VKMEAPLRPAADILRRNPQQDYELVQRVGSGTYGDVYKARNVHTGELAAVKIIKLEPGDDFSLIQQEIFMVKECKHCNIVAYFGSYLSREKLWICMEYCGGGSLQDIYHVTGPLSELQIAYVCRETLQGLAYLHTKGKMHRDIKGANILLTDHGDVKLADFGVAAKITATIAKRKSFIGTPYWMAPEVAAVEKNGGYNQLCDIWAVGITAIELGELQPPMFDLHPMRALFLMSKSNFQPPKLKDKTKWSSTFHNFVKIALTKNPKKRPTCLKDFXHHTFVAQPGLSRALAVELLDKVNNPDNHAHYTEADDDDFEPHAIIRHTIRSTNRNARAERTASEINFDKLQFEPPLRKETEARDEMGLSSDPNFMLQWNPFVXWWQITGKSTSKRAIPPPLPPKPRISSYPEDNFPDEEKASTIKHCPDSESRAPQILRRQSSPSCGPVAETSSIGNGDGISKLMSENTEGSAQAPQLPRKNDKRDFPKPAINGLPPTPKVLMGACFSKVFDGCPLKINCATSWIHPDTKDQYIIFGTEDGIYTLNLNELHEATMEQLFPRKCTWLYVINNTLMSLSEGKTFQLYSHNLIALFEHAKKPGLGCPIFQTHRFPDRILPRKFALTTKIPDTKGCHKCCIVRNPYTGHKYLCGALQSGIVLLQWYEPMQKFMLIKHFDFPLPSPLNVFEMLVIPEQEYPMVCVAISKGTESNQVVQFETINLNSASSWFTEIGAGSQQLDSIHVTTSWERDTVLVCLDNLVKIVNLQGKLKSSKKLASELSFDFRIESVVCLQDSVLAFWKHGMQGKSFQVQMEVTPRGISDGNQEFSRLLGSDRVVVLESRPTENPTAHSNLYILAGHENSY

SEQ ID NO: 50590 - protein, 8 aa, Homo sapiens
MPDKAYAW

SEQ ID NO: 50591 - protein, 116 aa, Homo sapiens
  DOMAIN (80)..(116): TGF-beta family proteins domain identified by eMATRIX, accession number BL00250B, p-value=5.286e-24, raw score of 27.37
  DOMAIN (77)..(116): Transforming growth factor beta like domain identified by PFam, accession name TGF-beta, E-value=1.3e-18, PFam score of 60.1
FDVTELCGQWLSRGGEIEGFRLSAHCSCDSRDNTLQVDINGFTTGRRGDLATIHGMNRPFLLLMATPLERAQHLQSSRAPCCVPQALEPLPIVYYVGRKPKVEQLSNMIVRSCKCS

SEQ ID NO: 50592 - protein, 236 aa, Homo sapiens
  DOMAIN (163)..(199): TGF-beta family proteins domain identified by eMATRIX, accession number BL00250A, p-value=8.000e-31, raw score of 21.24
  DOMAIN (163)..(236): Transforming growth factor beta like domain identified by PFam, accession name TGF-beta, E-value=7.8e-36, PFam score of 112.5
MRLLPLLLPLLWLLVLTPGRPAAGLSTCKTIDMELVKRKRIEAIRGQILSKLRLASPPSQGEVPPGPLPEAVLALYNSTRDRVAGESAEPEPEPEADYYAKEVTRVLMVETHNGELGGAGEPGGGPPGGAGVPGPRVGSDWQKKLAGGRGHPGAKGTSTEKNCCVRQLYIDFRKDLGWKWIHEPKGYHANFCLGPCPYIWSLDTQYSKPLPIVYYVGRKPKVEQLSNMIVRSCKCS

SEQ ID NO: 50593 - protein, 227 aa, Homo sapiens
  DOMAIN (33)..(226): TGF-beta propeptide domain identified by PFam, accession name TGFb_propeptide, E-value=8.3e-36, PFam score of 132.4
MPPSGLRLLPLLLPLLWLLVLTPGPPAAGLSTCKTIDMELVKRKRIEAIRGQILSKLRLASPPSQGEVPPGPLPEAVLALYNSTRDRVAGESAEPEPEPEADYYAKEVTRVLMVETHNEIYDKFKQSTHSIYMFFNTSELREAVPEPVLLSRAELRLLRRLKLKVEQHVELYQKYSNNSWRYLSKPAGWHQRTRKSGLSFDVTGVVRQWLSRGGEIEGFRLSAPLLL

SEQ ID NO: 50594 - protein, 110 aa, Homo sapiens
  misc_feature (1)...(110): Xaa = X or * as defined in Table 2
XLYRIMGNGFAGCVHFPHTAPCEVRVLMLLYSSKKKIFMGLIPYDQSGFVNGIRQVITNHKQVQQQKLEQQQRGMGGQQAPPGLGPILEDQARPSQNLLQLRPPQPQPQX

SEQ ID NO: 50595 - protein, 89 aa, Homo sapiens
GARAHAPVLVQEEDLHGPHPLRPERLPSVPSGRSSPPASRPVGPGGDQLRPSPDRQQQVSGMEWCPWSGRSPGLSPTVGPRGGCHPTST

SEQ ID NO: 50596 - protein, 478 aa, Homo sapiens
  DOMAIN (389)..(433): Synapsins proteins domain identified by eMATRIX, accession number BL00415N, p-value=2.445e-09, raw score of 4.29
MATWGLTALPLQGQTHRVCLLICNSPPYCCLLLRAPRTLDAQLRICAADWGGLVPSSHTAVVRGIHFSIVSPRSCLRFGFCLRRQPPRPCGAAAASDRCEPGPEAHVLVRGLVLPGSRDLSAAQDPLAPPSHHLLPSPSGLHCGPWLRPGSHGTAGAPSMKPKPASVDANTKLTRSLPCQVYVNHGENCRPPWAFVPELKDGPVPFHQQGLESLKGLYRIMGNGFVIQGMGGRGAGCVHFPHTAPCEVRVLMLLYSSKKKIFMGLIPYDQSGFVNGIRQVITNHKQVQQQKLEQQQRGMGGQQAPPGLGPILEDQARPSQNLLQLRPPQPQPQGTVGASGATGQPQPQGTAQPPPGAPQGPPGAASGPPPLDPSFGPRTLGPTLSCKPPPQPTTATRGSCAAASAAPGPGQPQLGPPLLHPPPAQSGPHNFPLGLHCQDRYPAGNRFGTWQGPDTDILGVEKEDAQPFGFNSKAQKEL

SEQ ID NO: 50597 - protein, 504 aa, Homo sapiens
MSFSQDSWCQHYQAPLIDRRRKDGARPARTRQPLPRPVGPRPPPPRGGAAPAVHAAESGLAGRAVHDGGFSVVTSAALFAILKLGQLKSPTTFTCSGRSGSDGEPHLACGGPHGCGLAMAAPGDARGIPYLSKHRADRMRRLGDFLNQESFDLALLEEGLAFSGIIGSGLCVFSKHPIQELTQHIYTLNGYPYMIHHGDWFSGKAVGLLVLHLSGMVLNAYVTHLHAEYNRQKDIYLAHRVAQAWELAQFIQCVSLGLKWEVGWDPGAEGEQGPSHGEELVMEELPPHQPGSPSHTSKKADVVLLCGDLNMHPEDLGCCLLKEWTGLHDAYLETRDFKGSEEGNTMVPKNCYVSQQELKPFPFGVRIDYVLYKAVSGFYISCKSFETTTGFDPHRGTPLSDHEALMATLFVRHSPPQQNPSSTHGPAERSPLMCVLKEAWTELGLGMAQARWWATFASYVIGLGLLLLALLCVLAAGGGAGEAAILLWTPSVGLVLWAGGQWLI

SEQ ID NO: 50598 - protein, 551 aa, Homo sapiens
  misc_feature (1)...(551): Xaa = X or * as defined in Table 2
SGRDRRGRAWRKRNREPPTRGRSPDPQGPSARPLPSLGARISAADRLSGLAARLIGNSRPVAGANAGVGPDLSHAGLVPTCARRLRRKNGLGRRRRRPPPSPPRPSLESSSRLTTLGTSQPLKFNFFPCDLRIFQTFNCWGIPVLXAKHRADRMRRFGRPFXTQESFDLALLEEVWSEHDFQYLRQKLSPTYPAAHHFRSGIIGSGLCVFSKHPIQELTQHIYTLNGYPYMIHHGDWFSGKAVGLLVLHLNGMELNAYVTHLHAEYNRQKDIYLTHLVGQAWELAQFIHHTSKKADVVLLCGDLNMHPEDLGCCLLKEWTGLHDAYLETRDFKGSEEGNTMVPKNCYVSQQELKPFPFGVRIDYVLYKAVSGFYISCKSFETTTGFDPHSGTPLSDHEALMATLFVRHSPPQQNPSSTHGPAERSPLMCVCLKEALDGSLGLGMAQARWWATFASYVIGLGLLLLALLCVLAAGGGAGEAAILLWTPSVGLVLWAGAFYLFHVQEVNGLYRAQAELQHVLGRAREAQDLGPEPQLYALLLGQQEGDRTKEQ

SEQ ID NO: 50599 - protein, 123 aa, Homo sapiens
RLRCQKGIPPSLRGRAWQYLSGGKVKLQQNPGKFDQLDMSPGDPTWLDVIERDLHRQFPFHEMFVSRGGHGQQDLFRVLDAYTLYRPEGSYCKTQAPIAAVLLMHMPAEQAFWCLVQICEKYL

SEQ ID NO: 50600 - protein, 144 aa, Homo sapiens
  misc_feature (1)...(144): Xaa = X or * as defined in Table 2
CAAGIRHELRRRARLGWRTATERMGRACPRPGKACREPGRAXARALTPQPPTNSALSGLTRRPTASPSPHRQVRLDRGLAGRQGRAGGSTPGGAEAEGVQVAGHAQAMVVAAARDACPPQHVPPKDSAPKDSAPQDLAPQVSAH

SEQ ID NO: 50601 - protein, 169 aa, Homo sapiens
HASGRLTWPLEAHAAAAVGMAKSNGENGPRAPAAGESLSGTRESLAQGPDAATTDELSSLGSDSEANGFAERRIDKFGFIVGSQGAEGALEEVPLEVLRQRESKWLDMLNNWDKWMAKKHKKIRLRCQKGIPPSLRGRALEYLAGGQVKLQQNPGKFDELDMSPGDPKW

SEQ ID NO: 50602 - protein, 1092 aa, Homo sapiens
  DOMAIN (141)..(901): TBC domain identified by PFam, accession name TBC, E-value= 1.3e-79, PFam score of 277.9
  misc_feature (1)...(1092): Xaa = X or * as defined in Table 2
MAKSNGENGPRAPAAGESLSGTRESLAQGPDAATTDELSSLGSDSEANGFAERRIDKFGFIVGSQGAEGASILGQTVPSPHGRVGEGPPIRSYTASSTGTGNRLEEVPLEVLRQRESKWLDMLNNWDKWMAKKHKKIRLRCQKGIPPSLRGRAWQYLSGGKVKLQQNPGKFDELDMSPGDPKWLDVIERDLHRQFPFHEMFVSRGGHGQQDLFRVLKAYTLYRPEEGYCQAQAPIAAVLLMHMPAEQAFWCLVQICEKYLPGYYSEKLEAIQLDGEILFSLLQKVSPVAHKHLSRQKIDPLLYMTEWFMCAFSRTLPWSSVLRVWDMFFCEEKPQKASLYLLPIPHAGVKIIFRVGLVLLKHALGSPEKVKACQGQYETIERLRSLSPKIMQEAFLVQEVVELPVTERQIEREHLIQLRRWQETRGELQCRSPPRLHGAKAILDAEPGPRPALQPSPSIRLPLDAPLPGCKAKPKPPKQAQIEQRIQMKGRGQLEKPPAPNQAMVVAAAGDACPPQHVPPKDFRPPRTSGPQDLGSPGSSAHHRFPGRALTSQESXGTRESLAQGPDAATTDELSSLGSDSEANGFAERRIDKFGFIVGSQGAEGASILGQTVPSPHGRVGEGPPIRSYTASSTGTGNRLEEVPLEVLRQRESKWLDMLNNWDKWMAKKHKKIRLRCQKGIPPSLRGRAWQYLSGGKVKLQQNPGKFDELDMSPGDPKWLDVIERDLHRQFPFHEMFVSRGGHGQQDLFRVLKAYTLYRPEEGYCQAQAPIAAVLLMHMPAEQAFWCLVQICEKYLPGYYSEKLEAIQLDGEILFSLLQKVSPVAHKHLSRQKIDPLLYMTEWFMCAFSRTLPWSSVLRVWDMFFCEEKPQKASLYLLPIPHAGVKIIFRVGLVLLKHALGSPEKVKACQGQYETIERLRSLSPKIMQEAFLVQEVVELPVTERQIEREHLIQLRRWQETRGELQCRSPPRLHGGQSYLGCRTWSPACPTTFTIHPPAPRCPPPWLQSQAQATQAGPDRAADTDEGERAAGEAPSPKSSHGGGRCREMHVPHSMCPRRTSGPQGLQALQDLGSPGSSAHHRFPGRALTSQES

SEQ ID NO: 50603 - protein, 81 aa, Homo sapiens
MTVHNKLMKGHLEQPRHSVHPCVGQPCPGPDPLQEVHLEVGHGGSRGLVHGRLWRQDGVLAVTCAQEGVIRVKPQVSESKL

SEQ ID NO: 50604 - protein, 104 aa, Homo sapiens
MSSPLAPKNGQGCGDRGDPPGDLRCGLVTTVLNLEPMDEDLFKGRHYWVPGKRLFGGHIVGQALVAAAKSVSEDVHVHSLHCYFVRAGDPKLPVLYQVERTRTG

SEQ ID NO: 50605 - protein, 106 aa, Homo sapiens
EDGQGCETLIDQYLRDPNLQKRYPLALNRIAAQEVPIEIKPVNPSPLSQLQRMEPKQMFWVRARGYIGGSRGLVHGRLWRQDGVLAVTCAQEGVIRVKPQVSESKL

SEQ ID NO: 50606 - protein, 43 aa, Homo sapiens
MSSPQAPKDGQGCGDRGDPPGDLRSVLVTTVLNLEPLDEDLFR

SEQ ID NO: 50607 - protein, 245 aa, Homo sapiens
MSEATSVVDVDPGPRPIDMTGHVSAERSPPPDGQWGSQLLARQLQDFWKKSRNTLAPQRLLFEVTSANVVKDPPSNTWFVDSTVMLNTTDDRLRSNLRLKYRSHLTGNRLQSQKCDRRGRWRSRLLHRLRHALAGDGPGEAAASPEAEQFPESSELEDDDAEGLSSRLSGTLSFTSAEDDEDDEDEDDEEAGPDQLPLGDGTSGEDAERSPPPDGQWGSQLLARQLQDFWKKSRNTLAPQRLLFE

SEQ ID NO: 50608 - protein, 331 aa, Homo sapiens
  misc_feature (1)...(331): Xaa = X or * as defined in Table 2
MSSPQAPEDGQGCGDRGAPPGDLRSVLVTTVLNLEPLDEDLFRGRHYWVPAKRLFGGQIVGQAMVAAATSVSEDVHVHSLHCYFVFRAGDPKSLPVLYQVERTRTGVEAFRLRSVKGPXNMGKPIFICQASFQQAQPSPMQHQFSMPTLLPTTEELVXIVRTLFDQYLRDPNLQKRYPLALNRIAAQEVPIEIKPVNPSPLRPAAEEWEPKQMFWVRARGYIGKSTPWKMHCCVAAYISDYAFLGTALAALTQWPSTRCHFHGPPLDHNPMWFHAPFRADHWMLYECESPWAGGSRGLVHGRLWRQDGVLAVTCAQEGVIRVKPQVSESKL

SEQ ID NO: 50609 - protein, 363 aa, Homo sapiens
  DOMAIN (91)..(112): ER LUMEN PROTEIN RETAINING RECEPTOR SIGNATURE domain identified by eMATRIX, accession number PR00660B, p-value=8.920e- 23, raw score of 13.72
  DOMAIN (60)..(285): ER lumen protein retaining receptor domain identified by PFam, accession name ER_lumen_recept, E-value=1.8e-63, PFam score of 224.3
  misc_feature (1)...(363): Xaa = X or * as defined in Table 2
LRRQLQPLLPLPKSPPRSGAHLGSLFRSPQPSYPVRPPGSAGTPPPACLPPAQPCQGSPAMNLFRFLGDLSHLLAIILLLLKIWKSRSCAGISGKSQVLFAVVFTARYLDLFTNYISLYNTCMNVVYIACSFTTVWLIYTKFKATYDGNHDTFRSGSSRVVVPQAILGVSWSNHDFTPLEILWTFSIYLGVSGPSLPQLFHGXGKTGRGRETHSPATYLFCAKAFNPHALSLSNWIWRYHFEGFFDLIAIVAGPGPRQSSYCDFFYLYYSPKFLKGERKFEFCRHRPRFLSISSPRAAAGRAGGKAGRKMKSFSHPRGDFFKNPTSLCSPIPPSCPGLKGNSARIPGLWGAQRLGAVCSFLAF

SEQ ID NO: 50610 - protein, 334 aa, Homo sapiens
  DOMAIN (82)..(316): Galactosyltransferase domain identified by PFam, accession name Galactosyl_T, E-value=6.7e-43, PFam score of 155.9
  misc_feature (1)...(334): Xaa = X or * as defined in Table 2
TPTTSGRTRKMWPRPGTXPPANCSANINLTHQPWFQVLEPQFRQFLFYRHCRYFPMLLNHPEKCRGDVYLLVVVKSVITQHDRREAIRQTWARAAVRGWGPSAVRTLFLLGTASKQEERTHYQQLLAYEDALYGDILQWGFLDTFFNLTLKEIHFLKWLDIYCPHVPFIFKGDDDVFVNPTNLLEFLADRQPQENLFVGDVLQHARPIRRKDNKYYIPGALYGKASYPPYAGGGGFLMAGSLARRLHHACDTLELYPIDDVFLGMCLEVLGVQPTAHEGFKTFGISRNRNSRMNKEPCFFRAMLVVHKLLPPELLAMWGLVHSNLTCSRKLQVL

SEQ ID NO: 50611 - protein, 452 aa, Homo sapiens
  DOMAIN (297)..(316): FLAVIN-CONTAINING MONOOXYGENASE (FMO) SIGNATURE domain identified by eMATRIX, accession number PR00370E, p-value=7.429e- 22, raw score of 11.96
  DOMAIN (1)..(452): Flavin-binding monooxygenase-like domain identified by PFam, accession name FMO-like, E-value=7.6e-175, PFam score of 594.3
  misc_feature (1)...(452): Xaa = X or * as defined in Table 2
CCVDEGLEPTCFERTEDIGGVWRFKVSEIFLGLEQVVLLFQGESQLMSCFSDFPMPEDFPNFLHNSKLLEYFRIFAKKFDLLKYIQFQVLYFWGNGFLCISSAHIXIENTQSNGKEQSAVFDAVMVCSGHHILPHIPLKSFPGETRWDSQLFGVGFQVLYMXFEGKRILVIGMGNSGSDIAVELSKNAAQVXCSLLTMYLEGRKWGCHTGDWDSVFHTRFRSMLRNVLPRTAVKWMIEQQMNRWFNHENYGLEPQNKXSYFAFLMVYSLVSKVVXRCLKVKSTVKELTETSAIFEDGTVEENIDVIIFATGYSFSFPFLEDSLVKVENNMVSLYKYIFPAHLDKSTLACIGLIQPLGSIFPTAELQARWVTRVFKGLCSLPSERTMMMDIIKRNEKRIDLFGESQSQTLQTNYVDYLDELALEIGAKPDFCSLLFKDPKLAVRLYFGPCNSY

SEQ ID NO: 50612 - protein, 66 aa, Homo sapiens
REKKLALMLSGLIEEKSKLLEKFSLVQKEATCEKLNRSNSELEDEILCLEKELKEEKSKHSEQDEL

SEQ ID NO: 50613 - protein, 93 aa, Homo sapiens
GLRVPLSPSSPRSRLRSGPLRLPGADSGSGPEAVCSPPFIVAPTGRGYCGDHESSFGACRASCINESANARGEAVCVLGARVVFLFTSETGNS

SEQ ID NO: 50614 - protein, 170 aa, Homo sapiens
RLRSGPLRLPGADSGSGPKAVCSPPFIVAPTGRGYCGDHESSFGAMEEPGVTPQPYLGLLLEELRRVSPGAMSVTWPEGSREPPGEGSSRPALGSKPPWSEVPKPVLVCCPAPARFEAVVRLVGRLSGFCVMEEDLGLWEGREKKLALMLSGLIEEKSKLLEKFSLVQKE

SEQ ID NO: 50615 - protein, 1086 aa, Homo sapiens
  DOMAIN (75)..(98): Guanine-nucleotide dissociation stimulators CDC24 family sign domain identified by eMATRIX, accession number BL00741B, p-value= 1.000e-09, raw score of 14.27
  DOMAIN (1)..(126): RhoGEF domain identified by PFam, accession name RhoGEF, E- value=0.0068, PFam score of -15.9
FLSDLEENFENNIFSFQVCDVVLNHAPDFRRVYLPYVTNQTYQERTFQSLMNSNSNFREVLEKLESDPVCQRLSLKSFLILPFQRITRLKLLLQNILKRTQPGSSEEAEATKAHHALEQLIRDCNNNVQSMRRTEELIYLSQKIEFECKIFPLISQSRWLVKSGELTALEFSASPGLRRKLNTRPVHLHLFNDCLLLSRPRESVTGVAGQGTRGEGDEERGGSEREREGSEKLRWISALAMPREELDLLECYTAEHGSGGLATCGNYASYNSRWDLRKDTAKPYQQALKNIVVASQCYCGDRQSSLDAMEEPGATPQPYLGLVLEELRRVVAALPESMRPDENPYGFPSELVVCAAVIGFFVVLLFLWRSFRSVRSRLYVGREKKLGEMLSGLIEEKCKLLEKFSLIPKEYEGYEVQSSLEDASFEKAAAEEARSLEATCEKLNRSNSELEDEILCLEKDLKQEKSKHSQQDELMADISKSIQSLEDESKSLKSTNKLEAKIICKTFKMSEERRAIAIKDALNENSQLQTSHKQLFQQEAEVWKGQVSELNKQKITFEDSKVHAEQVLNDKENHIKTLTGHLPMMKDQAAVLEEDTTDDDNLELEVNSQWENGANLDDPLKGALKKLIHAAKLNVSLKSLEGERNHIIIQLSEVDKTKEELTEHIKNLQTQQASLQSENIYFESENQKLQQKLKIMTEFYQENEMKLYRKLTVEENYRIEEEEKLSRVEEKISRATEGLETYRKLAKDLEEELERTVHFYQKQVISYEKRGHDNWLAARTAERNLSDLRKENAHNKQKLTETELKFELLEKDPNALDVSNTAFGREHSPCSPSPLGRPSSETRAFPSPQTLLEDPLRLSPVLPGGGGRGPSSPGNPLDHQITNERGEPSYDRLIDPHRAPSDTGSLSSPVEQDRRMMFPPPGQSYPDSTLPPQREDRFYSNSERLSGPAEPRSFKMTSLDKMDRSMPSEMESSRNDAKDDLGNLNVPDSSLPAENEATGPGLIPPPLAPISGPLFPVDTRGPFMRRGPPFPPPPPGTMFGASRGYFPPRDFPGPPHAPFAMRNIYPPRGLPPYLHPRPGFYPNPTF

SEQ ID NO: 50616 - protein, 777 aa, Homo sapiens
  DOMAIN (358)..(412): Kinesin light chain repeat proteins domain identified by eMATRIX, accession number BL01160B, p-value=9.847e-09, raw score of 19.54
TGRGYCGDHESSFGAMEEPGATPQPYLGLLLEELRRVVAALPEGMRPDSNLYGFPWELVICAAVVGFFAVLFFLWRSFRSVRSRLYVGREKKLALMLSGLIEEKSKLLEKFSLVQKEYEGYEVESSLKDASFEKEATEAQSLEATCEKLNRSNSELEDEILCLEKELKEEKSKHSEQDELMADISKRIQSLEDESKSLKSQVAEAKMTFQIFQMNEERLKIAIKDALNENSQLQESQKQLLQEAEVWKEQVSELNKQKVTFEDSKVHAEQVLNDKESHIKTLTERLLKMKDWAAMLGEDITDDDNLELEMNSESENGAYLDNPPKGALKKLIHAAKLNASLKTLEGERNQIYIQLSEVDKTKEELTEHIKNLQTQQASLQSENTHFENENQKLQQKLKVMTELYQENEMKLHRKLTVEENYRLEKEEKLSKVDEKISHATEELETYRKRAKDLEEELERTIHSYQGQIISHEKKAHDNWLAARNAERNLNDLRKENAHNRQKLTETELKFELLEKDPYALDVPNTAFGRGSRGPGNPLDHQITNERGESSCDRLTDPHRAPSDTGSLSPPWDQDRRMMFPPPGQSYPDSALPPQRQDRFCSNSGRLSGPAELRSFNMPSLDKMDGSMPSEMESSRNDTKDDLGNLNVPDSSFPAKKEATGPGFVPPPLAPVRGPLFPVDARGPFLRRGPPFPPPPPGAMFGASRDYFPPRDFPGPPPAPFAMRNVYPPRGFPSLPSPPRPDFFPPPPHSEGRSEFPSGLIPPSNEPATEHPEPQQET

SEQ ID NO: 50617 - protein, 881 aa, Homo sapiens
  DOMAIN (514)..(568): Kinesin light chain repeat proteins domain identified by eMATRIX, accession number BL01160B, p-value=8.551e-09, raw score of 19.54
  misc_feature (1)...(881): Xaa = X or * as defined in Table 2
GLRVPLSPSSPRSRLRSGPLRLPGADSGSGPKAVCSPPFIVAPTGRGYCGDHESSFGAMEEPGATPQPYLGLLLEELRRVVAALPEGMRPDSNLYGFPWELVICAAVVGFFAVLFFLWRSFRSVRSRLYVGREKKLALMLSGLIEEKSKLLEKFSLVQKEYEGYEVESSLKDASFEKEATEAQSLEATCEKLNRSNSELEDEILCLEKELKEEKSKHSEQDELMADISKRIQSLEDESKSLKSQVAEAKMTFQIFPMNEERLKIAIKDALNENSQLQESQKQLLQEAEVWKEQVSELNKQKVTFEDSKVHAEQVLNDKESHIKTLTERLLKMKDWAAMLGEDITDDDNLELEMNSESENGAYLDNPPKGALKKLIHAAKLNASLKTLEGERNQIYIQLSEVDKTKEELTEHIKNLQTEQASLQSENTHFENENQKLQQKLKVMTELYQENEMKLHRKLTVEENYRLEKEEKLSKVDEKISHATEELETYRKRAKDLEEELERTIHSYQGQIISHEKKAHDNWLAARNAERNLNDLRKENAHNRQKLTETELKFELLEEDPYALDVPNTAFGREHSPYGPSPLGWPSSETRAFLSPPTLLEGPLTLSPLLPGGGGRGSRGPGNPLDHQITNERGESSCDRLTDPHRALSDTGFLSPPWDQDRRMMFPPPGQSYPDSALPPQRQDRFCSNSGRLSGPAELRSFNMPSLDKMDGSMPSEMESSRNDTKDDLGNLNVPDSSLPAENEATGPGFVPPPLAPVRGPLFPVDASGPFLGKRPPFPPPPPGAMFGASRDYFSTRGISQGPPPAPFAMRKCLIPPRGFSPSLTFPPRTGGFFPPPPHFXRXEVNFPXVLIPTSNEPATEHPEPQQENLTIFLALFKSNFD

SEQ ID NO: 50618 - protein, 110 aa, Homo sapiens
LCASSCPFICPPIRPSVCPPAAPLLLGCRAMARGYGATVSLVLLGLGLALAVIVLAVVLSRHQAPCGPQAFAHAAVAADSKVCSDIGREPADAAGPGQVPARGGGCPGGA

SEQ ID NO: 50619 - protein, 586 aa, Homo sapiens
  DOMAIN (202)..(257): Gamma-glutamyltranspeptidase proteins domain identified by eMATRIX, accession number BL00462C, p-value=3.455e-39, raw score of 27.41
  DOMAIN (59)..(585): Gamma-glutamyltranspeptidase domain identified by PFam, accession name G_glu_transpept, E-value=6.2e-214, PFam score of 724.1
MARGYGATVSLVLLGLGLALAVIVLAVVLSRHQAPCGPQAFAHAAVAADSKVCSDIGRAILQQQGSPVDASIAALVCTSVVNPQSMGLGGGVIFTIYNVTTGKVEVINARETVPASHAPSLLDQCAQALPLGTGAQWIGVPGELRGYAEAHRRHGRLPWAQLFQPTIALLRGGHVEAPVLSRFLHNSILRPSLQASTLRQLFFNGTEPLRPQDPLPWPALATTLETVATEGVEVFYTGRLGQMLVEDIAKEGSQLTLQDLAKFQPEVVDALEVPLGDYTLYSPPPPAGGAILSFILNVLRGFNFSTESMARPEGRVNVYHHLVETLKFARGQRWRLGDPRSHPKLQNASRDLLGETLAQLIRQQIDGRGDHQLSHYSLAEAWGHGTGTSHVSVLGEDGSAVAATSTINTPFGAMVYSPRTGIILNNELLDLCERCPRGSGTTPSTVSGDRVGGAPGRCWPPVPGEPSPSSMEPSILINKAQGSNLVIGCAGGELIISAVAQAIMSKLWLGFDLRAAIAAPILHVNNKGCVEYEPNFSQEVQRGLQDRGQNQTQRPFFLNVVQAVSQEGACVYAVSDLRKSGEAAGY

SEQ ID NO: 50620 - protein, 633 aa, Homo sapiens
  DOMAIN (200)..(255): Gamma-glutamyltranspeptidase proteins domain identified by eMATRIX, accession number BL00462C, p-value=3.455e-39, raw score of 27.41
  DOMAIN (88)..(581): Gamma-glutamyltranspeptidase domain identified by PFam, accession name G_glu_transpept, E-value=8e-180, PFam score of 610.8
  misc_feature (1)...(633): Xaa = X or * as defined in Table 2
LCASSCPFICPPIRPSVCPPAAPLLLGCRAMARGYGATVSLVLLGLGLALAVIVLAVVLSRHQAPCGPQAFAHAAVAADSKVCSDIGRAILQQQGSPVDATIAALVCTSVVNPQSMGLGGGVIFTIYNVTTGAQWIGVPGELRGYAEAHRRHGRLPWAQLFQPTIALLRGGHVVAPVLSRFLHNSILRPSLQASTLRQLFFNGTEPLRPQDPLPWPALATTLETVATEGVEVFYTGRLGQMLVEDIAKEGSQLTLQDLAKFQPEVVDALEVPLGDYTLYSPPPPAGGAILSFILNVLRGFNFSTESMARPEGRVNVYHHLVETLKFAKGQRWRLGDPRSHPKLQNASRDLLGETLAQLIRQQIDGRGDHQLSHYSLAEAWGHGTGTSHVSVLGEDGSAVAATSTIYTPFGAMVYSPRTGIILNNELLDLCERCPRGSGTTPSPVSGDRVGGAPGRCWPPVPGERSPSSMVPSILINKAQGSKLVIGGAGGELIISAVAQAIMSKLWLGFDLRAAIAAPILHVNSKGCVEYEPNFSQETVSCFVALAVLKLLASSDPATLAPKWLRLXEVQRGLQDRGQNPDPEGPFFLDVVPACVSQEGACVXRPSRTXRKSGEAAGLLKTLLCPELEVLAPP

SEQ ID NO: 50621 - protein, 439 aa, Homo sapiens
  misc_feature (1)...(439): Xaa = X or * as defined in Table 2
RCYLQFLALLLTSTSARAAAAIAAAEEPAGSPSVMTRAGDHNRQRGCCGSLADYLSSAKFHLXLGHSLSTWGDRMWHFAVSVFLVELYGNSLLLTAVYGLVVAGSVLVLGAIIGDWVDKNARLKVAQTSLVVQNVSVILCGIILMMVFLHKHELLTMYHGWVLTSCYILIITIANIANLASTATAITIQRDWIVVVAGEDRSKLANMNATIRRIDQLTNILAPMAVGQIMTFGSPVIGCGFISGWNLVSMCVEYVLLWKVYQKTPALAVKAGLKEEETELKQLNLHKDTEPKPLEGTHLMGVKDSNIHELEHEQEPTCASQMAEPFRTFRDGWVSYYNQPVFLGWHGSCFPLYDCPGLXLHHHRVRLHSGTEWFHPQYFDGSISYNWNNGNCSFYLATSKMWFGSDRSDLRIGTAFLFDLVCDLCIHAWKPPGLVRFSF

SEQ ID NO: 50622 - protein, 165 aa, Homo sapiens
  DOMAIN (85)..(105): ADENOSINE KINASE SIGNATURE domain identified by eMATRIX, accession number PR00989E, p-value=5.091e-21, raw score of 15.91
  DOMAIN (112)..(125): pfkB family carbohydrate kinase domain identified by PFam, accession name pfkB, E-value=0.00029, PFam score of 16.5
AACITGDNRSLIANLAAANCYKKEKHLDLEKNWMLVEKARVCYIAEAATFAREQGFETKDIKEIAKKTQALPKMNSKRQRIVIFTQGRDDTIMATESEVTAFAVLDQDQKEIIDTNGAGDAFVGGFLSQLVSDKPLTECIRAGHYAASIIIRRTGCTFPEKPDFH

SEQ ID NO: 50623 - protein, 525 aa, Homo sapiens; identical to SEQ ID NO: 39752
  DOMAIN (127)..(142): ADENOSINE KINASE SIGNATURE domain identified by eMATRIX, accession number PR00989B, p-value=1.563e-18, raw score of 7.71
  DOMAIN (250)..(418): Ribosomal protein S2 domain identified by PFam, accession name Ribosomal_S2, E-value=1e-74, PFam score of 261.6

SEQ ID NO: 50624 - protein, 365 aa, Homo sapiens
  DOMAIN (172)..(199): ADENOSINE KINASE SIGNATURE domain identified by eMATRIX, accession number PR00989D, p-value=1.947e-31, raw score of 12.81
  DOMAIN (100)..(327): pfkB family carbohydrate kinase domain identified by PFam, accession name pfkB, E-value=0.00082, PFam score of 15.1
  misc_feature (1)...(365): Xaa = X or * as defined in Table 2
SLKSTDGVKCGLSINIFHKRRENILFGMGNPLLDISAVVDKDFLDKYSLKPNDQILAEDKHKELFDELVKKFKVEYHAGGSTQNSIKVAQWMIQQPHKAATFFGCIGIDKFGEILKRKAAEAHVDAHYYEQNEQPTGTCAACITGDNRSLIANLAAANCYKKEKHLDLEKNWMLVEKARVCYIAGFFLHVSPESVLKVAHHASENNRIFTLNLSAPFISQFYKESLMKVMPYVDILFGKXDRSWPTFAREQGFETKDIKEIAQKDTSPCPKMNSKGQRIRDLHPKGRDDTIMATESEVTAFAGLGIKTQKEIIDTNEAGDAFVGGFLSQLVSDKPLTECIRAGHYAASIIIRRTGCTFPEKPDFH

SEQ ID NO: 50625 - protein, 67 aa, Homo sapiens
TLQQAEYEFLSFVRQQTPPGLCPLAGNSVHEDKKFLDKYMPQFMKHLHYRIIDVSTVKELCRRWYPD

SEQ ID NO: 50626 - protein, 96 aa, Homo sapiens
CWSGRLRDWGRGCWSRVMLGGSLGSRLLRGVGGSHGRFGARGVREGGAAMAAGESMAQRMVWVDLEMTGLDIEKDQIIEMACLITDSDLNILAEGT

SEQ ID NO: 50627 - protein, 77 aa, Homo sapiens
TWVKEAQNDGLCVCYIFIFNCQMTGLDIEKDQIIEMACLITDSDLNILAEVRDAHVIQSYFLKGTGNITIIFSSFFI

SEQ ID NO: 50628 - protein, 173 aa, Homo sapiens
QRRLRDWGRGCWSRVMLGGSLGSRLLRGVGGSHGRFGARGVREGGAAMAAGESMAQRMVWVDLEMTGLDIEKDQIIEMACLITDSDLNILAEGNSVHEDKKFLDKYMPQFMKHLHYRIIDVSTVKELCRRWYPEEYEFAPKKAASHRALDDISESIKELQFYRNNIFKKKISC

SEQ ID NO: 50629 - protein, 68 aa, Homo sapiens
  misc_feature (1)...(68): Xaa = X or * as defined in Table 2
EFGTRRHVPPCLINFFKDQGSPXLARLVSNSWPQVIHPPWPPTVLGLRGVGHCPWPRLGNSSWVWGGH

SEQ ID NO: 50630 - protein, 462 aa, Homo sapiens
  DOMAIN (307)..(340): Osteonectin domain proteins domain identified by eMATRIX, accession number BL00612B, p-value=6.779e-09, raw score of 11.35
  misc_feature (1)...(462): Xaa = X or * as defined in Table 2
MRSQKTSLYFSLEAKFYCSLRNERIASCDIINDAGIQTKTLMKRSHVAYALKKPVEQGDSFELESKGFMAITIAVCIEQNLRHSSSLFICMSSTGQSGTTNNASSLIPSYVFTPPHFNLLDKQGRTAGKSHCGEDRKEHNNACHQEEEAPDVNPLHGLQASGSPGKTQRIKSQALEGTRLYSHSEETRSGLIRLLRLRQRRLRDWGRGCWSRDMLGGSLGSRLLRGVGGSHGRFGARGVRKRGAAMAAGESMAQRMVWVDLEITGLDIXKVQIIEMACLITDSDLIILAEGPNLIIKQPDELLDSMSDWCKEHHGKSGLTKAVKESTNYHCQQAEYEFPALWYDQPDSLPGLCPTCQEIKFHEDKKFPXQNTCPQFMKHLHYRIIDVSHCXKELCQTAGYPEEYEFAPKKAAFSIGPLDDISENLKKVPFFPENNHLPRKKIRMKRKEGKLXKMGENEKTVS

SEQ ID NO: 50631 - protein, 22 aa, Homo sapiens
MRSGSSSFTFQSRFLSQVVQWL

SEQ ID NO: 50632 - protein, 225 aa, Homo sapiens
  misc_feature (1)...(225): Xaa = X or * as defined in Table 2
GIEGWRGEADTLPAEGQDGGRRVSKGDIFSGGAETAQGWGVMGPFQAAPSKRAGREHRGGQRRVQHVGWYPRPGSDKGHGKGTQDSRVPQLPPHPPPIHLVSRHRGKLRHGFLRPMPEPRGLESGKTGNCFGELQHRTSPXGRSGPREGGPRNIAQQGGCRGSACGRRSHEALRPRVWCGEGPQWTWCAVCPNRSAPGAGLADRQHPGESRAWGETRLGEAGGAE

SEQ ID NO: 50633 - protein, 66 aa, Homo sapiens
MLPPLLKKYTDSGQFLYLAVESAATICPVSPPNPLKIGLFIISVVVIVFFVVDTLGARVVVLRVVI

SEQ ID NO: 50634 - protein, 84 aa, Homo sapiens
  misc_feature (1)...(84): Xaa = X or * as defined in Table 2
PATVIITVNTTWSAALISRESALRSFPVKAAALSPSREGGSVTATPNVRSMTSAVPIMRVSVQSKRXPEEQNXQETYPQTTSCR

SEQ ID NO: 50635 - protein, 523 aa, Homo sapiens [sequence omitted]

SEQ ID NO: 50636 - protein, 503 aa, Homo sapiens [sequence omitted]

SEQ ID NO: 50637 - protein, 2400 aa, Homo sapiens
  DOMAIN (351)..(362): 8 kw CHO2 ALPHA ANTIGEN PARAMYOSIN domain identified by eMATRIX, accession number DM00588A, p-value=5.950e-09, raw score of 10.87
  misc_feature (1)...(2400): Xaa = X or * as defined in Table 2
QASGSCWSSPFFSASTPSAAATGVPGPTDMAAVLQQVLERTELNKLPKSVQNKLEKFLADQQSEIDGLKGRHEKFKVESEQQYFEIEKRLSHSQERLVNETRECQSLRLELEKLNNQLKALTEKNKELEIAQDRNIAIQSQFTRTKEELEAEKRDLIRTNERLSQELEYLTEDVKRLNEKLKESNTTKGELQLKLDELQASDVSVKYREKRLEQEKELLHSQNTWLNTELKTKTDELLALGREKGNEILELKCNLENKKEEVSRLEEQMNGLKTSNEHLQKHVEDLLTKLKEAKEQQASMEEKFHNELNAHIKLSNLYKSAADDSEAKSNELTRAVEELHKLLKEAGEANKAIQDHLLEVEQSKDQMEKEMLEKIGRLEKELENANDLLSATKRKGAILSEEELAAMSPTAAAVAKIVKPGMKLTELYNAYVETQDQLLLEKLENKRINKYLDEIVKEVEAKAPILKRQREEYERAQKAVASLSVKLEQAMKEIQRLQEDTDKANKQSSVLERDNRRMEIQVKDLSQQIRVLLMELEEARGNHVIRDEEVSSADISSSSEVISQHLVSYRNIEELQQQNQRLLVALRELGETREREEQETTSSKITELQLKLESALTELEQLRKSRQHQMQLVDSIVRQRDMYRILLSQTTGVAIPLHASSLDDVSLASTPKRPSTSQTVSTPAPVPVIESTEAIEAKAALKQLQEIFENYKKEKAENEKIQNEQLEKLQEQVTDLRSQNTKISTQLDFASKRYEMLQDNVEGYRREITSLHERNQKLTATTQKQEQIINTMTQDLRGANEKLAVAEIRAENLKKEKEMLKLSEVRLSQQRESLLAEQRGQNLLLTNLQTIQGILERSETETKQRLSSQIEKLEHEISHLKKKLENEVEQRHTLTRNLDVQLLDTKRQLDTETNLHLNTKELLKNAQKEIATLKRHLSNMEVQVASQSSQRTGKGQPSNKEDVDDLVSQLRQTEEQVNDLKERLKTSTSNVEQYQAMVTSLEESLNKEKQVTEEVRKNIEVRLKESAEFQTQLEKKLMEVEKEKQELQDDKRRAIESMEQQLSELKKTLSSVQNEVQEALQRASTALSNEQQARRDCQEQAKIAVEAQNKYERELMLHAADVEALQAAKEQVSKMASVRQHLEETTQKAESQLLECKASWEERERMLKDEVSKCVCRCEDLEKQNRLLHDQIEKLSDKVVASVKEGVQGPLNVSLSEEGKSQEQILEILRFIRREKEIAETRFEVAQVESLRYRQRVELLERELQELQDSLNAEREKVQVTAKTMAQHEELMKKTETMNVVMETNKMLREEKERLEQDLQQMQAKVRKLELDILPLQEANAELSEKSGMLQAEKKLLEEDVKRWKARNQHLVSQQKDPDTEEYRKLLSEKEVHTKRIQQLTEEIGRLKAEIARSNASLTNNQNLIQSLKEDLNKVRTEKETIQKDLDAKIIDIQEKVKTITQVKKIGRRYKTQYEELKAQQDKVMETSAQSSGDHQEQHVSVQEMQELKETLNQAETKSKSLESQVENLQKTLSEKETEARNLQEQTVQLQSELSRLRQDLQDRTTQEEQLRQQITEKEEKTRKAIVAAKSKIAHLAGVKDQLTKENEELKQRNGALDQQKDELDVRITALKSQYEGRISRLERELREHQERHLEQRDEPQEPSNKVPEQQRQITLKTTPASGERGIASTSDPPTANIKPTPVVSTPSKVTAAAMAGNKSTPRASIRPMVTPATVTNPTTTPTATVMPTTQVESQEAMQSEGPVEHVPVFGSTSGSVRSTSPNVQPSISQPILTVQQQTQATAFVQPTQQSHPQIEPANQELSSNIVEVVQSSPVERPSTSTAVFGTVSATPSSSLPKRTREEEEDSTIEASDQVSDDTVEMPLPKKLKSVTPVGTEEEVMAEESTDGEVETQVYNQDSQDSIGEGVTQGDYTPMEDSEETSQSLQIDLGPLQSDQQTTTSSQDGQGKGDDVIVIDSDDEEEDDDENDGEHEDYEEDEEDDDDDEDDTGMGDEGEDSNEGTGSADGNDGYEADDAEGGDGTDPGTETEESMGGGEGNHRAADSQNSGEGNTGAAESSFSQEVSREQQPSSASERQAPIRAPQSPRRPPHPLPPRLTIHAPPQELGPPVQRIQMTRRQSVGRGLQLTPGNRVGMQQHFFDDEDRTVPKYFQTLVVPHRTDGFAEAIHSPQVAGVPRFRFGPPEDMPQTSSSHSDLGQLASQGELSLGLGMYETPLFLAHEEESGGRSVPTTPLQVAAPVTVFTESTTSDASEHASQSVPMVTTSTGTLSTTNETATGDDGDEVFVEAESEGISSEAGLEIDSQQEEEPVQAFDESDLPSPPQPDLPSXSSVDTSSSQPKTFRRGRLPATFXQGVRGRQFNRQRGVSHPMGGRGGINRGNIN

SEQ ID NO: 50638 - protein, 2415 aa, Homo sapiens
  DOMAIN (382)..(393): 8 kw CHO2 ALPHA ANTIGEN PARAMYOSIN domain identified by eMATRIX, accession number DM00588A, p-value=5.950e-09, raw score of 10.87
  misc_feature (1)...(2415): Xaa = X or * as defined in Table 2
GWTRFPRVPPRESPAGGRARATERGDRGGGPGVWVLLVFAFLLRFYPVGRCHWGPWAPPTWAAVLQQVLERTELNKLPKSVQNKLEKFLADQQSEIDGPXRGGHGEIXRWESEQQYFEIEKRLSHSQERLVNETRECQSLRLELEKLNNQLKALPEKNKELEIAQDRNIAIQSQFTRTKEELEAEKRDLIRTNERLSQELEYLTEDVKRLNEKLKESNTTKGELQLKLDELQASDVSVKYREKRLEQEKELLHSQNTWLNTELKTKTDELLALGREKGNEILELKCNLENKKEEVSRLEEQMNGLKTSNEHLQKHVEDLLTKLKEAKEQQASMEEKFHNELNAHIKLSNLYKSAADDSEAKSNELTRAVEELHKLLKEAGEANKAIQDHLLEVEQSKDQMEKEMLEKIGRLEKELENANDLLSATKRKGAILSEEELAAMSPTAAAVAKIVKPGMKLTELYNAYVETQDQLLLEKLENKRINKYLDEIVKEVEAKAPILKRQREEYERAQKAVASLSVKLEQAMKEIQRLQEDTDKANKQSSVLERDNRRMEIQVKDLSQQIRVLLMELEEARGNHVIRDEEVSSADISSSSEVISQHLVSYRNIEELQQQNQRLLVALRELGETREREEQETTSSKITELQLKLESALTELEQLRKSRQHQMQLVDSIVRQRDMYRILLSQTTGVAIPLHASSLDDVSLASTPKRPSTSQTVSTPAPVPVIESTEAIEAKAALKQLQEIFENYKKEKAENEKIQNEQLEKLQEQVTDLRSQNTKISTQLDFASKRYEMLQDNVEGYRREITSLHERNQKLTATTQKQEQIINTMTQDLRGANEKLAVAEVRAENLKKEKEMLKLSEVRLSQQRESLLAEQRGQNLLLTNLQTIQGILERSETETKQRLSSQIEKLEHEISHLKKKLENEVEQRHTLTRNLDVQLLDTKRQLDTETNLHLNTKELLKNAQKEIATLKQHLSNMEVQVASQSSQRTGKGQPSNKEDVDDLVSQLRQTEEQVNDLKERLKTSTSNVEQYQAMVTSLEESLNKEKQVTEEVRKNIEVRLKESAEFQTQLEKKLMEVEKEKQELQDDKRRAIESMEQQLSELKKTLSSVQNEVQEALQRASTALSNEQQARRDCQEQAKIAVEAQNKYERELMLHAADVEALQAAKEQVSKMASVRQHLEETTQKAESQLLECKASWEERERMLKDEVSKCVCRCEDLEKQNRLLHDQIEKLSDKVVASVKEGVQGPLNVSLSEEGKSQEQILEILRFIRREKEIAETRFEVAQVESLRYRQRVELLERELQELEDSLNAEREKVQVTAKTMAQHEELMKKTETMNVVMETNKMLREEKERLEQDLQQMQAKVRKLELDILPLQEANAELSEKSGMLQAEKKLLEEDVKRWKARNQHLVSQQKDPDTEEYRKLLSEKEVHTKRIQQLTEEIGRLKAEIARSNASLTNNQNLIQSLKEDLNKVRTEKETIQKDLDAKIIDIQEKVKTITQVKKIGRRYKTQYEELKAQQDKVMETSAQSSGDHQEQHVSVQEMQELKETLNQAETKSKSLESQVENLQKTLSEKETEARNLQEQTVQLQSELSRLRQDLQDRTTQEEQLRQQITEKEEKTRKAIVAAKSKIAHLAGVKDQLTKENEELKQRNGALDQQKDELDVRITALKSQYEGRISRLERELREHQERHLEQRDEPQEPSNKVPEQQRQITLKTTPASGERGIASTSDPPTANIKPTPVVSTPSKVTAAAMAGNKSTPRASIRPMVTPATVTNPTTTPTATVMPTTQVESQEAMQSEGPVEHVPVFGSTSGSVRSTSPNVQPSISQPILTVQQQTQATAFVQPTQQSHPQIEPANQELSSNIVEVVQSSPVERPSTSTAVFGTVSATPSSSLPKRTREEEEDSTIEASDQVSDDTVEMPLPKKLKSVTPVGTEEEVMAEESTDGEVETQVYNQDSQDSIGEGVTQGDYTPMEDSEETSQSLQIDLGPLQSDQQTTTSSQDGQGKGDDVIVIDSDDEEEDEEDDDDDEDDTGMGDEGEDSNEGTGSADGNDGYEADDAEGGDGTDPGTETEESMGGGEGNHRAADSQNSGEGNTGAAESSFSQEVSREQQPSSASERQAPRAPQSPRRPPHPLPPXLSIHAPPQELGPPVHRIQMTRRQSVGRGLQLTPGIGGMQLQHFFDDEDRTVPSSPTLVVPHRTDGFAEAIHSPQVAGVPRFRFGPPEDMPQTSSSHSDLGPAASAQGGLGMYETPLFLAHEEESGGRSVPTTPLQVAAPVTVFTESTTSDASEHALLNLFPMVTYIPLALYPTTNETATGDDGDEVFVEAESEGISSEAGLEIDSQQEEEPVQASDESDLPSTSQDPPSSSSVDTSSSQPKPFRRVRLQTTLRQGVRGRQFNRQRGVSHAMGGRGGINRGNIN

SEQ ID NO: 50639 - protein, 144 aa, Homo sapiens
QRGGIRGNGDPFPWVGLSVGLSVPTTGSERRLSGDLSSMPGPGTLSVRVSPPQPILSRGRPDSNKTENRRITHISAEQKRRFNIKLGFDTLHGLVSTLSAQPSLKERAGLQEEAQQLRDEIEELNAAINLCQQQLPATGVPITH

SEQ ID NO: 50640 - protein, 59 aa, Homo sapiens
  misc_feature (1)...(59): Xaa = X or * as defined in Table 2
GFRRVSLEFXFPGVRWGMRKLGAPDLAPFSQMXSGGRAPCVASXPPCRGLRLMRTGSRR

SEQ ID NO: 50641 - protein, 804 aa, Homo sapiens
  DOMAIN (611)..(632): Myc-type 'helix-loop-helix' dimerization domain proteins. domain identified by eMATRIX, accession number BL00038B, p-value= 6.538e-13, raw score of 16.97
  DOMAIN (577)..(632): Helix-loop-helix DNA-binding domain identified by PFam, accession name HLH, E-value=8.7e-06, PFam score of 32.7
  misc_feature (1)...(804): Xaa = X or * as defined in Table 2
MAGALAGLAAGLQVPRVAPSPDSDSDTDSEDPSLRRSAGGLLRSQVIHSGHFMVSSPHSDSLPRRRDQEGSVGPSDFGPRSIDPTLTRLFECLSLAYSGKLVSPKWKNFKGLKLLCRDKIRLNNAIWRAWYIQYVKRRKSPVCGFVTPLQGPEADAHRKPEAVVLEGNYWKRRIEVVMREYHKWRIYYKKRVSGGGPGRPQSFPPAAAGYRPPRKIPGKGILTPELAPLGPSIQSRADSATVWPQRLLAASLPRGRLRKPSREDDLLAPKQAEGRWPPPEQWCKQLFSSVVPVLLGDPEEEPGGRQLLDLNCFLSDISDTLFTMTQSGPSPLQLPPEDAYVGNADMIQPDLTPLQPSLDDFMDISDFFTNSRLPQPPMPSNFPEPPSFSPVVDSLFSSGTLGPEVPPASSAMTHLSGHSRLQARNSCPGPLDSSAFLSSDFLLPEDPKPRLPPPPVPPPLLHYPPPAKQETVPEFPCTFLPPTPAPTPPRPPPGPATLAPSRPLLVPKAERLSPPAPSGSERRLSGDLSSMPGPGTLSVRVSPPQPILSRGRPDSNKALLGSFLGSPNSLLPETENRRITHISAEQKRRFNIKLGFDTLHGLVSTLSAQPSLKVSKATTLQKTAEYILMLQQERAGLQEEAQQLRDEIEELNAAINLCQQQLPATGVPITHQRFDQMRDMFDDYVRTRTLHNWKFWVVSSLKPMAGGLQGLWQGSSLTWAQFSILIRPLFESFNGMVSTASVHTLRQTSLAWLDQYCSLPALRPTVLNSLRQLGTSTSILTDPGRIPXEQATRAVTEGTLGKPL

SEQ ID NO: 50642 - protein, 23 aa, Homo sapiens
GEGPTTHPHMPEVPPHRGEGLCL

SEQ ID NO: 50643 - protein, 150 aa, Homo sapiens
  DOMAIN (20)..(130): Clathrin adaptor complex small chain domain identified by PFam, accession name Clat_adaptor_s, E-value=3.7e-06, PFam score of 11.3
FCLHILQVPHTLAGHSPCAHGRPPLPRFHDRLPEEIQQQIVRETFHLVLKRDDNICNFLEGGSLIGGSDYKLIYRHYATLYFVFCVDSSESELGILDLIQLEQFKKDNEETGFGSGTRALEQALEKTKANIKWVKENKEVVLQWFTENSK

SEQ ID NO: 50644 - protein, 376 aa, Homo sapiens
MAQPLCPPLSESWMLSAAWGPTRRPPPSDKDCGRSLVSSPDSWGSTPADSPVASPARPGTLRDPAPPPQKLTHRELEELSIRLVCSPWGRANCGLVVGEACLCKSPGSKVLIFSKNGSVCLMDVAKREIICAFAPPGAFPLEVPWKPVFAVSPDHPCFLLRGDYSHETASTDDAGIQYSVFYFNFEACPLLENISKNCTIPQRDLDNMAFPQALPLEKRCERFLQKRLPVASDTPCGIRQVTLSELQFSQFLKEELSWVVLRYLLPLTFQKCSGSALRALLSRGAVSHSWKDEKNPGKVHYILQEVVMGGMVLETNMNEIVAQIEAQNRLEKSEGGLSAAPARAVSAVKNINLPEIPRNINIGDLNIKVPNLSQFV

SEQ ID NO: 50645 - protein, 23 aa, Homo sapiens
  DOMAIN (5)..(19): Clathrin adaptor complexes small chain proteins domain identified by eMATRIX, accession number BL00989A, p-value=1.462e- 10, raw score of 11.66
MIQAILVFNNHGKPRLVRFYQRF

SEQ ID NO: 50646 - protein, 203 aa, Homo sapiens
  DOMAIN (79)..(130): Clathrin adaptor complexes small chain proteins domain identified by eMATRIX, accession number BL00989B, p-value=1.675e- 13, raw score of 26.51
  DOMAIN (8)..(166): Clathrin adaptor complex small chain domain identified by PFam, accession name Clat_adaptor_s, E-value=1.2e-28, PFam score of 108.6
  misc_feature (1)...(203): Xaa = X or * as defined in Table 2
ENRGWQSMIQAILVVNNHGKPRLVRFYQRFPEEIQQQIVRETFHLVLKRDDNICNFLEGGSLXLGGSDYKLIYRHYATLYFVFCVDSSESELGILDLIQVFVGNSWISCFENVVXIWIXTFHMDKVHYILQEVVMGGMVLETNMNEIVAQIEAPNRLEKSEGGLSAAPARAVSAVKNINLPEIPRNINIGDLNIKVPNLSQFV

SEQ ID NO: 50647 - protein, 124 aa, Homo sapiens
  DOMAIN (31)..(41): Ank repeat proteins domain identified by eMATRIX, accession number PF00023B, p-value=6.727e-09, raw score of 14.20
  DOMAIN (30)..(124): Ank repeat domain identified by PFam, accession name ank, E- value=5.6e-06, PFam score of 33.3
SLHLAAILGETSTVEKLYAAGAGLCVAERRGHTALHLACRVGAHACARALLQPRPRRPREAPDTYLAQGPDRTPDTNHTPVALYPDSDLEKEEEESHTPLHVAVIHKDVEMVRLLRDAGADLDK

SEQ ID NO: 50648 - protein, 361 aa, Homo sapiens
  DOMAIN (231)..(244): REPEAT PROTEIN ANK NUCLEAR ANKYR domain identified by eMATRIX, accession number PD00078B, p-value=2.174e-09, raw score of 13.14
  DOMAIN (122)..(304): Ank repeat domain identified by PFam, accession name ank, E- value=4.4e-15, PFam score of 63.5
  misc_feature (1)...(361): Xaa = X or * as defined in Table 2
SRQSPATGGRLRWAPDAALAMAVVACLGQAADSDKWGDSRLSSLGPDAAAPGGPGLGAELGPGLSWAPLVFGYVTEDGDTFSAGTEYMDLQNDLRQVSHEGWCRAWGPGFPVXLPTACPLLLQTALHLAAILGETSTVEKLYAAGAGLCVAERRGHTALHLACRVGAHACARALLQPRPRRPREAPDTYLAQGPDRTPDTNHTPVALYPDSDLEKEEEESEEDWKLQLEVENYEGHTPLHVAVIHKDVEMVRLLRDAGADLDKPEPTCGRSPLHLAVEGPRQADVLELLLRAGANPAARMYGGRTPLGSAMLRPNPILARLLRAHGAPEPEGEDEKSGPCSSSSDSDSRLSPSAWSPLPPG

SEQ ID NO: 50649 - protein, 143 aa, Homo sapiens
  misc_feature (1)...(143): Xaa = X or * as defined in Table 2
LRLRKLKAIMLAFGRGKTRNSEESSDSQEVIWKDTWMFTALGHCGISMFGLWDRELTLTNYELFISSSPTPSXVPQRLCYVVSTFLMYLSLDHLYTGEMKAFLHVLDTQSVNSDFAFFVRLSFQYFYKLLCVLWQGTVNKEFI

SEQ ID NO: 50650 - protein, 665 aa, Homo sapiens
  DOMAIN (134)..(351): RasGEF domain identified by PFam, accession name RasGEF, E- value=0.0012, PFam score of -41.5
  misc_feature (1)...(665): Xaa = X or * as defined in Table 2
METFVIGWQPAVTVWTIGVAPPPTLEITSQHEIWVAQHPNYIISVKQESPAPMPWTAVALDSHRSMNTIVNCAREGSTLHAPYESLMPDDLRWNSFILKSSPSPHSRSMEKLSSMKLVPGAKYIRDHCLVKEALTIHKSPILLAAIDLLGNLSGFTDYQSYVIHGCLENNPTLERSIALFNGISKWVQLMVLSKPTPQQRAEVITKFINVAKGATAELNLWQHPKIIMLSQVVPGVFSQEHSLIRSLHANLHFTVCFPEDPLAMVAGMVQESTCPCEILQLPTTGQLANWNEMTELVSSNGNYCNYRKPFPTCDGLKIPILGVHLKDWIAVHVNFPDWTEEIKVNIVKMHQLSVTLSELVSLQNASHHLEPNMDLINLLTVDGLQPADLMHAISLFRTSHRPQGLFLXIKGTSPAEHSDRSCQHFRVXKCSSWESWHGGWLSLEEXMSSFLLRSFXKIYCSRKNVACQTRAVCTNLDALLSSSQMSNNHHPFSLPAQDEVFEFPGVTAGHRDLDSRAITLVTGSSRKISVRLQRATTSQATQTEPVWSEAGWGDSGSHTFPKMKSKFHDKAAKDKGFAKWENEKPRVHAGVDVVDRGTEFELDQDEGEETRQDGEPAEAVSVGAVAAPGMSEKELLQVDGRTPTRVLRMADLVGISEFRGEPAFV

SEQ ID NO: 50651 - protein, 139 aa, Homo sapiens
MGKDFMTKTPKAIATKAKINKWDLINLRSFCTAKEISIGMNRQPAEGEKIFAIYPSDKGQEFRQRRHWPQRFPGRKLTPQRSRNSTPQLCTISGDVYEFKLTRGGLEMVNTECELDRIEGCKVLILGVSVRVLPKEINI

SEQ ID NO: 50652 - protein, 30 aa, Homo sapiens; identical to SEQ ID NO: 43210

SEQ ID NO: 50653 - protein, 667 aa, Homo sapiens
  DOMAIN (202)..(235): Nuclear hormones receptors DNA-binding region proteins domain identified by eMATRIX, accession number BL00031A, p-value=5.179e- 29, raw score of 19.55
  DOMAIN (18)..(198): Oestrogen receptor domain identified by PFam, accession name Oest_recep, E-value=3.1e-136, PFam score of 466.0
  misc_feature (1)...(667): Xaa = X or * as defined in Table 2
AFCPAGTRSAPCPRPRTMTMTLHTKASGMALLHQIQGNELEPLNRPQLKIPLERPLGEVYLDSSKPAVYNYPEGAAYEFNAAAAANAQVYGQTGLPYGPGSEAAAFGSNGLGGFPPLNSVSPSPLMLLHPPPQLSPFLQPHGQQVPYYLENEPSGYTVREAGPPAFYRPNSDNRRQGGRERLASTNDKGSMAMESAKETRYCAVCNDYASGYHYGVWSCEGCKAFFKRSIQELPTLCXIGWYWYQNRDIDQWNRTEPSEIIPHIYNHLIFDKRDKNKKWGKDSLFNKXCWENWLAICRKLKLDHFLTPYTKINSRWIKDLNVRTKTIKTLEENLGNTIQDIGMGKDFMSKTPKAMATKAKIDKWDLIKLKSFCSLLGYLKTENTAKETTIRLNRQPTEWEKIFAIYSSDKGLISRIYKELKQIYKKKGNPINKWVKDMNRHFSKEDIYAANRHMKKCSSSLAIREMQIKTTMRYHLTPVRMVIIRKSGNDRCWRGCGEIGTLLHCWWDCKLVQPLWKTVWRFLRDLQLEIPFDPAIPLLGIYPKDYKSCCYKDTCTRMFIAALFTIAKTWNQPKYPTTIGXIKKMWHIYTMEYYAAIKKDEFISLVGTWMKLETIILSKLTQEQKTKHHMFSFITGSRTMRTHGCREGNITHWGLLRDSVNMVTQAH

SEQ ID NO: 50654 - protein, 300 aa, Homo sapiens
  DOMAIN (198)..(242): Ribosomal protein S2 proteins domain identified by eMATRIX, accession number BL00962D, p-value=3.898e-15, raw score of 22.51
  DOMAIN (88)..(269): Ribosomal protein S2 domain identified by PFam, accession name Ribosomal_S2, E-value=7.5e-36, PFam score of 130.5
RVPAMATSSFALPRILGAGARAPSRWLGFLGKATPRPARPSRRTLGSATALMIRESEDSTDFNDKILNEPLKHSDFFNVKELFSVRSLFDARVHLGHKAGCRHRFMEPYIFGSRLDHDIIDLEQTATHLQLALNFTAHMAYRKGIILFISRNRQFSYLIENMARDCGEYAHTRYFMGGMLTNARLLYGPTVRLPDLIIFLHTLNNIFEPHVAVRDAAKMNIPTVGIVDTNCNPCLITYPVPGNDDSPLAVHLYCRLFQTAITRAKEKRQQVEALYRLQGQKEPGDQGPAHPPGADMSHSL

SEQ ID NO: 50655 - protein, 387 aa, Homo sapiens
  DOMAIN (178)..(232): Ribosomal protein S2 proteins domain identified by eMATRIX, accession number BL00962B, p-value=1.257e-14, raw score of 36.15
  DOMAIN (107)..(261): Ribosomal protein S2 domain identified by PFam, accession name Ribosomal_S2, E-value=2.6e-16, PFam score of 61.5
MATSSAALPRILGAGARAPSRWLGFLGKATPPACSAEPQDAWKRDGPYDPRVGGQHRSFLGLLGSRLPTSVSQKALGSRDFNDKILNEPLKHSDFFNVKELFSVRSLFDARVHLGHKAGCRHRYEPFAAPVERSHGYQEGWAWAQGAISIGGWQVFPEHRKRRSKVEPWVLQCLESVKRDSRGFMEPYIFGSRLDHDIIDLEQTATHLQLALNFTAHMAYRKGIILFISRNRQFSYLIENMARDCGEYAHTRYFRGGMLTNARLLFGPTVRLPDLIIFLHTLNNIFEPHVAWASWTPTATPASSPTLYPAMTDSPLAVHLYCRLFQTAITRAKEKRHMVDVTVQTSTVPPQNQWAERTNVAMCDCSVGNKSTRRVNDMCKNGPLACN

SEQ ID NO: 50656 - protein, 176 aa, Homo sapiens
  DOMAIN (80)..(96): RIBOSOMAL PROTEIN S10 FAMILY SIGNATURE domain identified by eMATRIX, accession number PR00971B, p-value=2.742e-13, raw score of 11.31
  misc_feature (1)...(176): Xaa = X or * as defined in Table 2
AHPLLRSSPEETSRSRKPRCATTNGFLRIPEKTTPWSPEVAIHRNRITPNKPPTVKSLEKVFCXLDKEAQKEKESQKXKGPVRMPTKTLRITTRKTPCGEGSKDRWDRFQIEISQSRLHXLCTSPFXDLFKQITFHQYLSPGVXGEKSPFADALSQISIHTIDDQFVKKKKKKKKW

SEQ ID NO: 50657 - protein, 189 aa, Homo sapiens
  DOMAIN (5)..(189): Ribosomal L18ae protein family domain identified by PFam, accession name Ribosomal_L18ae, E-value=5.2e-34, PFam score of 126.4
  misc_feature (1)...(189): Xaa = X or * as defined in Table 2
RPRGTLREYKVVGRCPAHSHKCHTPPLYRMRNFAPNHVVAKSRAFWYFVSQLKKDEESLPGEIVYCGQGVXESSPCGSKNFGIWLRYDSRSGTHNMYREXPGPXPTAGGCSPSCYPRHGVARHAGPEAHFHFRFIERLEEIAGQQNCRRPGCSKQFPRISRFKFPLAPPGSLRRQDKPRFTTKRPNTFF

SEQ ID NO: 50658 - protein, 86 aa, Homo sapiens
  DOMAIN (16)..(27): KINASE PROTEIN DOMAIN TRANSFERASE domain identified by eMATRIX, accession number PD00584A, p-value=8.714e-12, raw score of 11.82
  DOMAIN (14)..(84): PH domain identified by PFam, accession name PH, E-value=6.1e -12, PFam score of 47.7
VTAYHAATMNEVSVIKEGWLHKRGEYIKTWRPRYFLLKSDGSFIGYKERPEAPDQTLPPLNNFSVAECQLMKTERPRPNTFVIRCL

SEQ ID NO: 50659 - protein, 860 aa, Homo sapiens
  DOMAIN (289)..(320): Protein kinases ATP-binding region proteins domain identified by eMATRIX, accession number BL00107A, p-value=4.000e-22, raw score of 18.39
  DOMAIN (198)..(433): Eukaryotic protein kinase domain identified by PFam, accession name pkinase, E-value=3.5e-91, PFam score of 316.3
MGFHHVGQAGLELLTSGEYIKTWRPRYFLLKSDGSFIGYKERPEAPDQTLPPLNNFSVAGLSSEKLLPLGSPPTPQAGLDATSELLHTSRLVPIAALSMEPSLSECQLMKTERPRPNTFVIRCLQWTTVIERTFHVDSPDEREEWMRAIQMVANSLKQRAPGEDPMDYKCGSPSDSSTTEEMEVAVSKARAKVTMNDFDYLKLLGKGTFGKVILVREKATGRYYAMKILRKEVIIAKALKYAFQTHDRLCFVMEYANGGELFFHLSRERVFTEERARFYGAEIVSALEYLHSRDVVYRDIKLENLMLDKDGHIKITDFGLCKEGISDGATMKTFCGTPEYLAPEVLEDNDYGRAVDWWGLGVVMYEMMCGRLPFYNQDHERLFELILMEEIRFPRTLSPEAKSLLAGLLKKDPKQRLGGGPSDAKEVMEHRFFLSINWQDVVQKKLLPPFKPQVTSEVDTRYFDDEFTAQSITITPPDRYDSLGLLELDQRTHFPQFSYSASIREAPRSAALRLNMSARPCQCCGTPVRASDCVCRRDAGTRGCKGRCLASPATPSWRMLSLAASLDAEPSSAAVPDGFPAGPTVSPRRLARPPGLEEALSALGLQGEREYAGDIFAEVMVCRVLPLRALPRAVTPEMRALVVDWLVQVHEYLGLAGDTLYLAVHLLDSYLSAGRVRLHRLQLLGVACLFVACKMEECVLPEPAFLCLLSADSFSRAELLRAERRILSRLDFRLHHPGPLLCLGLLAALAGSSPQVMLLATYFLELSLLEAEAAGWEPGRRAAAALSLAHRLLDGAGSRLQPELYSPEELGTLEPCMARAALRGPAPGRAAVFLKYARPQRQGTSLAAACLLRRLQSEPP

SEQ ID NO: 50660 - protein, 87 aa, Homo sapiens
EYIKTWRPRYFLLKSDGSFIGYKERPEAPDQTLPPLNNFSVAGLSSEKLLPLGSPPTPQAGLDATSELLHTSRLVPIAALSMEPSLS

SEQ ID NO: 50661 - protein, 99 aa, Homo sapiens
  misc_feature (1)...(99): Xaa = X or * as defined in Table 2
ALALLSPWVVDGTRHRGAGGGAHPGGSGRTGAHRGGGRLRHGGLQVPSPAPREGSXGPARNRAQRRAVDRTQXECSSKEVYTXRLVPPPPLGHSHSSPE

SEQ ID NO: 50662 - protein, 137 aa, Homo sapiens
  DOMAIN (1)..(64): Eukaryotic protein kinase domain identified by PFam, accession name pkinase, E-value=2.3e-13, PFam score of 52.1
DRLPFYNQDHERLFELILMEEIRFPRTLSPEAKSLLAGLLKKDPKQRLGGGPSDAKEVMEHRFFLSSLKVEHECTSMSVLWDSCACLGLRVSAGRRHTWAVCACVFCVRAACPPVCMVCGLGPHPWPEHFIPVGEGC

SEQ ID NO: 50663 - protein, 409 aa, Homo sapiens
MARATGTAFQEEPAWEKESGGQKRPLTTLVEPAFFDDRHLIHGGSVVRCHLARDSSGQQDMQEAPWTGHSLQDKRGADDREKTGLRQSGILNKKATYCVCTVWGLEASPGGLTEALIPTPRPSLLSSGTSNQQTEGRRGHCFVSGSQNGGEEGARQRQLGPYLEPGAWPGSTETKAPLPFPAWGYLRTAGRELRWRPEKWQLALGTPWASAFSRAPGELVGRTRYCLACDSGRLPRSRQKEGRTFVAPWCSQQKSQTPQLRIQGPSGPRLCCPAFQRPRDIASQGPCNAAALKYPLWAQGSAYCLAPSEQPNTWLPLFQREAKAARARDLRPAVPEPPTPSVGSCAARASRMSAAPCSTVPSPIDHPRAEECECMARDWQAAPPAAPVRDPLGEASWAPEAGGDVNLYV

SEQ ID NO: 50664 - protein, 503 aa, Homo sapiens
  DOMAIN (345)..(361): Protein kinases ATP-binding region proteins domain identified by eMATRIX, accession number BL00107B, p-value=8.200e-14, raw score of 13.31
  DOMAIN (166)..(448): Eukaryotic protein kinase domain identified by PFam, accession name pkinase, E-value=1.5e-28, PFam score of 106.9
  misc_feature (1)...(503): Xaa = X or * as defined in Table 2
VTAYHAATMNEVSVIKEGWLHKRGEYIKTWRPRYFLLKSDGSFIGYKERPEAPDQTLPPLNNFSVAECQLMKTERPRPNTFVIPCPQLTNIIRGTLHTLVSPNQREEWNPPYQVVPQQPSRGGPKARTPWNNKCGSPKXLSHDXENGSGGSASHGRKVTMNDSTYLNLLGKGTFGKVILFRKKATGRXFAMKIFRKKVINAKDXVAHNIQPRAGVLPEHPGNPFLQLRXKYAFPDPTTRPVPLXMEYANGGELFFHLSRERVFTEERARFYGAEIVSASEVTWHSRGRGNTRDNQSWKTLMLEQKMAHIKITDFGLCKRGASSDGATMKTFCETPEYLAHEILEDNDYGRAVDWWGLGVVMYEMMCGRLPFYNQDHERLFELILMEEIRFPRTLSPEAKSLLAGLLXKDPKQRLGGGPSDAKEVMEHRFFLSINWQDVVQKKLLPPFKPQVTSEVDTRYFDDEFTAQSITITPPDRYDSLGLLEAGPADPASPQFSYSASIRE

SEQ ID NO: 50665 - protein, 224 aa, Homo sapiens
  misc_feature (1)...(224): Xaa = X or * as defined in Table 2
LSCRMRMLVLGQNPTLDSIDRSGVRSKCRIFNKLRESFHYNSAELTISVNMSYNCCSGNFSSRSCGDYLRYPASSRGFSYPSNLVYSTDLCSPSTCQLGSSLYRGCQEICWEPTSCQTSYVEVQAPAKTSCYRPKNLPCSASPCKTTYSGSLGFGSSSCRSLGYGXGSCYSVGCGSSGFRSLGYGGCGFPSLGYGVGFCRPTYLASRSCQSSCYRPTCGSGFYY

SEQ ID NO: 50666 - protein, 368 aa, Homo sapiens
  DOMAIN (32)..(232): von Willebrand factor type C domain identified by PFam, accession name vwc, E-value=5.1e-06, PFam score of 33.4
  misc_feature (1)...(368): Xaa = X or * as defined in Table 2
RSHSNAVPSVWNLTLPLDSGPHQSPASTTGPCTNTERSSVPMSCSPPACPTQCVLCSCTEGQIYCGLTTCPEPGCPAPLPLPDSCCQACKDEASEQSDEEDSVQPLHVVRHPQDPCSSDAGRKRGPGTPAPTGLSAPLSFIPRHFRPKGAGSTTVKIVLKEKHKKACVHGGKTYSHGEVWHPAFRAFGPLPCILCTCEDGRQDCQRVTCPTEYPCRHPREKWPGKCCKICPEDKADPGHSEISSTRCPKAPGRVLVHTSVSPSPDNLRRFALEHEASDLVEIYLWKLVKDEETXGSGEVKYLAQGHTARIFHLTQIKKVRKQDFPERGTALPTARWPPRRSLERLPSPDPGAEGHGQSRQSDQDITKT

SEQ ID NO: 50667 - protein, 324 aa, Homo sapiens
  DOMAIN (30)..(63): Ribosomal protein S4e proteins domain identified by eMATRIX, accession number BL00528A, p-value=5.000e-36, raw score of 16.12
  DOMAIN (89)..(255): Ribosomal family S4e domain identified by PFam, accession name Ribosomal_S4e, E-value=3e-05, PFam score of 6.7
  misc_feature (1)...(324): Xaa = X or * as defined in Table 2
KSGARSLQPQFLRAPEDGGPLSLPNAAMARGPKKHLKRVAAPKHWMLDKLTGVFAPRPSTGPHKLRECLPLIIFLKDQTLSNALTGDEVKKICMQRFIKIDGKVRTDITYPAGFMDVISIDKTGREFPVLYLIDTQGVRFCLXHRIYTLREGQSTSLCKVRKILLWAPKGIPHLVTHDARTIRYPDPLIQGEMNTHSRLIXKTGKITXFPSKFDHLVTCVMVTGGANLGRNWVLITQQRRSTLGSFXPLVHVKDANGNKLLATSDFSNIFVVIGKGNKPWISLPRGKGIPPHHLLEERDKRLAAKQSSWVKWGPWVTWSDLLVP

SEQ ID NO: 50668 - protein, 459 aa, Homo sapiens
  DOMAIN (103)..(127): ENTEROBACTERIAL VIRULENCE OUTER MEMBRANE PROTEIN SIGNATURE domain identified by eMATRIX, accession number PR00316B, p-value= 4.600e-21, raw score of 13.96
MRNVCIAVAVFAALAVTVTPARAEGGHGTFTVGYFQVKPGTLPSLSGGDTGVSHLKGINVKYRYELTDSVGVMASLGFAASKKSSTVMTGEDTFHYESLRGRYVSVMAGPVLQISKQVSAYAMAGVAHSRWSGSTMDYRKTEITPGYMKETTTARDESAMRHTSVAWSAGIQINPAASVVVDIAYEGSGSGDWRTDGFIVGISGVLKDGTGKPVQNCTIQLKARRNSTTVVVNTVGSENPDEAGRYSMDVEYGQYSVILQVDGFPPSHAGTITVYEDSQPGTLNDFLCAMTEDDARPEVLRRLELMVEEVARNASVVAQSTADAKKSAGDASASAAQVAALVTDATDSARAASTSAGQAASSAQEASSGAEAASAKATEAEKSAAAAESSKNAAATSAGAAKTSETNAAASQQSAATSASTAATKASEAATSARDAVASKEAAKSSETNASSSADYAAS

SEQ ID NO: 50669 - protein, 726 aa, Homo sapiens
  DOMAIN (549)..(726): Transposase domain identified by PFam, accession name Transposase_15, E-value=9.6e-96, PFam score of 331.5
MQMTKQPPIAKADLQKTQGNRAPAAVKNSDVISFINQPSMKEQLAAALPRHMTAERMIRIATTEIRKVPALGNCDTMSFVSAIVQCSQLGLEPGSALGHAYLLPFGNKNEKSGKKNVQLIIGYRGMIDLETSQLKQGQRIHMPMRMVAFHEMPNLALTMSPALATAIFWLTSIPMRNVPDPADEGALQKWWSVLPDGYGFEEDWAEVYTSKNLPPESYPVGAPIPWPSDTVPSGYALMQGQAFDKSAYPKLAAAYPSGVIPDMRGWTIKGKPASGRAVLSQEQDGIKSHTHSASASSTDLGTKTTSSFDYGTKSTNNTGAHTHSVSGSTNSAGAHTHSLANVNTASANSGAGSASTRLSVVHNQNYATSSAGAHTHSLSGTAASAGAHAHTVGIGAHTHSVAIGSHGHTITVNAAGNAENTVKNIAFNYIYRYCTARYSGWLRGCFNSDESSWHLVEDHRELITDTHDETVSAPVATAGAFISNINGHGFGRVKLHASSPRQRRVAVATVITSGQHVVRFPLGKNMTAVIEPFYPKAGNGRRPYPLETMLRIHCMQHWYNLSDGAMEDALYEIASMRLFARLSLDSALPDRTTIMNFRHLLEQHQLARQLFKTINRWLAEAGVMMTQGTLVDATIIEAPSSTKNKEQQRDPEMHQTKKGNQWHFGMKAHIGVDAKSGLTHSLVTTAANEHDLNQLGNLLHGEKQFVSADAGYQGAPQREELAEVDA

SEQ ID NO: 50670 - protein, 30 aa, Homo sapiens
VIDGFPPTLPQTSRQTLLGSQPPSASPPTV

SEQ ID NO: 50671 - protein, 734 aa, Homo sapiens
  DOMAIN (21)..(62): Tropomyosins proteins domain identified by eMATRIX, accession number BL00326D, p-value=2.400e-35, raw score of 8.76
  DOMAIN (1)..(518): Tropomyosins domain identified by PFam, accession name Tropomyosin, E-value=6.8e-61, PFam score of 192.2
  misc_feature (1)...(734): Xaa = X or * as defined in Table 2
MDQTVKSLMASEEEYSTKEEKYEKEMKLLEEKLKEAETRAEFVERSVAKLEKTTDDLEETLASAKEETWRFIRPGTRPYWNSATCFLLPGHKMAAEVHKLNPNVSEHDQERWHDAFGNGGADNHSKLQASTRRGGPLSQELLQSLAASLAAGGLTALSAEFTIGKGELMAHDVLWGCAPDEYDDLISGTCSHLPKGKTHDVLTGSDDGRHSNTSLAWGAGVQFNPTESVAIDIAYEGPGSGDWRTDGFIVGGLFCGVNMAVKISGVLKDGTGKPVQNXTIQLKAKRNSTTVVVNTLASENPDEAGRYSMDVEYGQYSVILLVEGFPPSHAGTITVYEDSQPGTLNDFLCAMTESDARPEALGRFGLYWWKEVARNASAVGQNTAAAKKSASDASTSAREAATHAVDAGGFKNAQARTSSPDKAGSAGFKQGFPRGGNGINKRATXRIKKVACRXSLMASEEEYSTKEEKYEKEMKLLEEKLKEAETRAEFVERSVAKLEKTTDDLEETLASAKEETWRFIRPGTRPYWNSATCFLLPGHKMAAEVHKLNPNVSEHDQERWHDAFGNGGADNHSKLQASTRRGGPLSQELLQSLAASLAAGGLTALSAEFTIGKGELMAHDVLWGCAPDEYDDLISGTCSHLPKGKTHDVLTGSDDGRHSNTSLAWGAGVQFNPTESVAIDIAYEGPGSGDWRTDGFIVGGLFCGVNMAVKISESPERRNRKTGPELNNPAESKT

SEQ ID NO: 50672 - protein, 51 aa, Homo sapiens
  DOMAIN (2)..(36): Tropomyosins proteins domain identified by eMATRIX, accession number BL00326A, p-value=9.308e-37, raw score of 14.01
AMDAIKKKMQMLKLDKENAIDRAEQAEADKKQAEDRCKPSWRRSSRPSRRS

SEQ ID NO: 50673 - protein, 117 aa, Homo sapiens
  misc_feature (1)...(117): Xaa = X or * as defined in Table 2
RQVITTLYIPYRRRHLSPPDPEQPLNHKQNRKVNHGGTEFQVVVLPFPKMKINCYRRNQFFLFFFSTVKVPVGWSMVPLQAATAGARLXNSDISPLKSQQTQDKFPSSKPPHIYIKK

SEQ ID NO: 50674 - protein, 19 aa, Homo sapiens
PTRPAIWSKEKDKHKGHPL

SEQ ID NO: 50675 - protein, 261 aa, Homo sapiens
  misc_feature (1)...(261): Xaa = X or * as defined in Table 2
GPRGLVSMAGGSVEVTPSTFTCYLRPPSASPPTPPSHPGLLPRSPALCSLHTGARTLPLFGGGRCSSAVLPPRPGPRAGSGSGQRERFHRFQPTYPYLQHEIDLPPTISLSDGEEPPPXQVPCHLQVRDPKQQLELNRESVGAPPNRTIFDSDLMDSARLGGPCPPSSNSGISAPTCYGSGGRMEGPPPTYSEVIGHLPGGPSFQHQQSSGPPSLLEGTRLHPHTHSRPXRSAAIWSKEKDKQKGHPSLGSPGGPGLGLRR

SEQ ID NO: 50676 - protein, 82 aa, Homo sapiens
ESVSATEDLAPDAAQGEDNSEIKELLRENEPLPACNGPAQAQPSPTTERAKSQEEVLPSSTTPSPGGALSPSGQPSSSVDAA

SEQ ID NO: 50677 - protein, 130 aa, Homo sapiens
MAEGKAGGAAVLFSKQVQKKLSRAQEKAEGHKLYKDLKNFLSAVKVMHESSKRVSETLQEIYSSEWDGHEELKAIVWNNDLLWEDYEEKLADQAVRTMEIYVAQFSEIKERIAKRGRKLVDYDSARHHLE

SEQ ID NO: 50678 - protein, 253 aa, Homo sapiens
VPQAKGNNVVITSYMTNRGFFEDKKATFAPSFLMNIKGNKTSVVKNSILEQGQLTWLQVAKRAGLGGGQSGRTVLRERVRIEIASTHIALQHAIVTGDAVGMDDIPQEARQYRHNQAYAYSIQGDGAEDDDERIAFASHTIQECRSQGPGGYPFKIYSSRKDRIPISQSLLESHFTVHEETAPDLETTGFLTLLSILGKNNDLLWEDYEEKLADQAVRTMEIYVAQFSEIKVLNVQNQGWVVDDPSRLENILG

SEQ ID NO: 50679 - protein, 300 aa, Homo sapiens
  DOMAIN (212)..(255): 1 kw MIND INHIBITOR DIVISION CONTROL domain identified by eMATRIX, accession number DM01756B, p-value=4.822e-15, raw score of 22.91
  DOMAIN (177)..(290): ParA family ATPase domain identified by PFam, accession name ParA, E-value=1e-15, PFam score of 65.7
MHESSKRVSETLQEIYSSEWDGHEELKAIVWVFRNPKKQGRLPHPDMEIRGRVEQRVGYTIEQINHMRDVFGTRLRRAEDVFPPVIGVAAHKGGVYKTSVSVHLAQDLALKGLRVLLVEGNDPQGTASMYHGWVPDLHIHAEDTLLPFYLGEKDDVTYAIKPTCWPGLDIIPSCLALHRIETELMGKFDEGKLPTDPHLMLRLAIETVAHDYDVIVIDSAPNLGIGTINVVCAADVLIVPTPAELFDYTSALQFFDRNSFPMPYSYVFVVLLPNSRIGCYVTIFQNISNLRDVFYREMSK

SEQ ID NO: 50680 - protein, 721 aa, Homo sapiens
  DOMAIN (358)..(379): GLUTELIN SIGNATURE domain identified by eMATRIX, accession number PR00211B, p-value=4.721e-10, raw score of 0.86
MSKLNHNLSEVMSKLEKQHSSKVFVVKRLSSSSRRSLVISPPVRTSTVSSPLTSPTSPSTLSSKSKSESVSATEDLAPDAAQGEDNSEIKELLEDEEIGKEGSEASSSEEEEPLLTCNGPSQAQPSPIIESARSQEEVPPSSPALSPGGALSPSGHPLSSAAEVVLRTRTAGDALQKAFTDKEELLKQQASNLHEQKKAGVIFEAEEVITLLTSVLKTSSASRTSLSSRHQFAPGATVLYKGDKRVLNLDSPSSRLRTHRPLPKPRPGHRPEAVPDGWVQRSLSFTGPPAMTIMYSCIANGRAVLAELTLTGGSYQVPPDPRHRPHGFRPSRVVPPEPAPKDAALRGGPEPARGTQAPAPREIPPPRETPPPQEAPPQREAGVPAAAALRTSTVSSPLTSPTSPSTLSSKSKSESVSATEDLAPDAAQGEDNSEIKELLEDEEIGKEGSEASSSEEEEPLLTCNGPSQAQPSPIIESARSLSMKKTTSGDNHTLRDPHYVEDKGHKYLVFEANTGTENGYQGEESLFNKAYYGGGTNLVRKESQKLQQSAKKRDAELANGALGIIELNNDYTLKKVMKPLITSNTVTDEIERANVFKMNGKWYLFTDSRGSKMTIDGINSNDIYMLGYVSNSLTGPYKPLNKTGLVLQMGLDPNDVTFTYSHFAVPQAKGNNVVITSYMTNRGFFEDKKATFAPSFLMNIKGNKTSVVKNSILEQGQLTVN

SEQ ID NO: 50681 - protein, 630 aa, Homo sapiens
  DOMAIN (160)..(192): ABC transporters family proteins domain identified by eMATRIX, accession number BL00211B, p-value=8.714e-27, raw score of 13.37
  DOMAIN (42)..(234): ABC transporter domain identified by PFam, accession name ABC_tran, E-value=1.8e-26, PFam score of 101.4
MLGRKLKDQYPHLDKAPGDIRLKVDNLCGPGVNDVSFTLRKGEILGVSGLMGAGRTELMKVLYGALPRTSGYVTLDGHEVVTRSPQDGLANGIVYISEDRKRDGLVLGMSVKENMSLTALRYFSRAGGSLKHADEQQAVSDFIRLFNVKTPSMEQAIGLLSGGNQQKVAIARGLMTRPKVLILDEPTRGVDVGAKKEIYQLINQFKADGLSIILVSSEMPVLQKLGKAVETKDERFEQSASNFYQQQGEKENACFVRWLGWPLLCRVGPLIISIATGFFLKSLLSPRSAGCIGRPLNWFPRGLNGCLVFPGSLGPLSQTKSEADASPCSEKVSSGSPVDNVVEWVAPIGGAEGVREGSRVYAQQMDAEGTTRSQKPPAWPETRGAPRKTFAAFLNIPRKGGGARGFPGIAPPVATQRRGAPWCPKKRPPHSSRAAIPQLHCRFVSQCLGFPVSQALHGKQTCEDTVRQGKHHMRMENWSAACTGQGTQKIASQPPGARKRTLFGSQNVLLMGPSLAGPHLVPFVLPIGKSTEPEARGMSPLHPKPLMNKTYDYFTFEKANITKRWSIPSCWPQKHLHTPYQCHTPGGHYQAISSNWQISLQYRSGGSRYHTCGGTLIRQNWVMTAAHCVD

SEQ ID NO: 50682 - protein, 960 aa, Homo sapiens
  DOMAIN (50)..(67): WILM'S TUMOUR PROTEIN SIGNATURE domain identified by eMATRIX, accession number PR00049B, p-value=5.800e-09, raw score of 14.50
  DOMAIN (835)..(960): Similarity to lectin domain of ricin domain identified by PFam, accession name Ricin_B_lectin, E-value=2.9e-09, PFam score of 44.2
MKQQLPVSYLQVIFNHWASRISGARGAGWGPVRLGRLCADRALDGESRPGGGGQSGVPASEASQKAAHGRRLPVPARLLRCAHSALEPGRGSASSPRNSTTSDNDQPPDYSFSKRCDSHSLGFSLVWESRNLTLPPTSKLLHFSAFHFFIYKCRAEGHKLYKDLKNFLSAVKVMHESSKRVSETLQFIYYSEWYGHEELKAIVWNNDLLWEDYEEKLADQAVRTMEIYVAQFSEIKERIAKRGRKLVDYDSARHHLEAVQNATKKDEAKTAKAEEEFNKAQTVFEDLNQELLEELPILYNSRIGCYVTIFQNISNLRDVFYREMSKLNHNLYEVMSKLEKQHSNKVFVVKGLSSPSTLSLKSESESVSATEDLAPDAAQGEDNSEIKELLEEEEIEKEGSEASSSEEDEPLPACNGPAQAQPSPTTERAKSQEEVLPSSTTPSPGGALSPSGQPSSSATEVVLRTRTASEGSEQPKKRASIQRTSAPPKPPEKPVRTPEAKENENIHNQNPEELCTSPTLMTSQVTLMQEVGSRSLGRGGSKLLTFHPKLCDSVSCKCPEHLKEKLEQYVKQLQVVRVVRQEERKGLITARLLGASVAQAEVLTFLDAHCECFHGWLEPLLARIAEDKTVVVSPDIVTIDLNTFEFAKPVQRGRVHSRGNFDWSLTFGWETLPPHEKQRRKDETYPIKSPTFAGGLFSISKSYFEHIGTYDNQMEIWGGENVEMSFRVWQCGGQLEIIPCSVVGHVFRTKSPHTFPKGTSVIARNQVRLAEVWMDSYKKIFYRRNLQAAKMAQEKSFGDISERLQLREQLHCHNFSWYLHNVYPEMFVPDLTPTFYGAIKNLGTNQCLDVGENNRGGKPLIMYSCHGLGGNQYFEYTTQRDLRHNIAKQLCLHVSKGALGLGSCHFTGKNSQVPKDEEWELAQDQLIRNSGSGTCLTSQDKKPAMAPCNPSDPHQLWLFV

SEQ ID NO: 50683 - protein, 594 aa, Homo sapiens
  misc_feature (1)...(594): Xaa = X or * as defined in Table 2
MPGARTSSSGASENHRARGQGGGPQGVGRMAEGKAGGAAGLFAKQVQKKFSRAQEKVLQKLGKAVETKDERFEQSANNFYQQQAEGHKLYKDLKNFLSAVKVMHESSKRVSETLQEIYSSEWDGHEELKAIVWNNDLLWEDYEEKLADQAVRTMEIYVAQFSEIKERIAKRGRKLVDYDSARHHLEAVQNAKKKDEAKTAKAEEEFNKAQTVFEDLNQELLEELPILYNSRIGCYVTIFQNISNLRDVFYREMSKLNHNLYEVMSKLEKQHSNKVFVVKGLSSSSRRSLVISPPVRTATVSSPLTSPTSPSTLSLKSESESVSATEDLAPDAAQGEDNSEIKELLEEEEIEKEGSEASSSEEDEPLPACNGPAQAQPSPTTERAKSQEEVLPSSTTPSPGGALSPSGQLSSSATEVVLRTRTASEGSERPKKTASIQRTSAPPRRPPPPRATASPRPCSGNIPSSPTASGGGSATSPRASLGTGTASPRTSLEIXPNPEPPEKPVRTPEAKENENIHNQNPEELCTSPTLMTSQVASEPGEAKKMEDKEKDNKLISADSSEGQDQLQVSMVPENNNLTAPEPQEEVSTSENPQL

SEQ ID NO: 50684 - protein, 548 aa, Homo sapiens
  DOMAIN (79)..(97): ALPHA-AMYLASE SIGNATURE domain identified by eMATRIX, accession number PR00110A, p-value=6.211e-18, raw score of 18.00
  DOMAIN (20)..(513): Alpha amylase domain identified by PFam, accession name alpha -amylase, E-value=3.4e-51, PFam score of 183.5
  misc_feature (1)...(548): Xaa = X or * as defined in Table 2
QLQSKMKLFWLLFTIGFCWAQYSSNTQSKGRTSIVHLFEWRWVDIALECERYLAPKGFGGVQVSPPNENVAIYNPFRPWWERYQPVSYKLCTRSGNEDEFRNMVTRCNNVGVRIYVDAVINHMCGNAVSAGTSSTCGSYFNPWKLRTFPAIPYPGWDFNDGKCKTGSGDIENYNDATQVRDCRLTGLLDLALEKDYVRSKIAEYMNHLIDIGVAGFRLDASKHMWPGDIKAILDKLHNLNSNWFPAGSKPFIFQEVIDLRVGEPNLKASDYFGNGRVTEFKYGAKLGTVIRKWDGEKMSYLKKWGEGWGFMPSDRALVFVDNHDNQRGHGAGGASILTFWDARLYKMAVGFMLAHPYGFTRVMSSYRWAKHSFKKGNDVNDWVGPTQINNGVIKEVTINPRHXLVGNDWVCEHRWRQIRNMVNFRNGSGMAQPFLQNWYDNGSNQVAFGRGNRGFIVFNKXWPVIFIXLCKPGLPAGSYCDVISGDKVIGNCSAIKIPVSVDGKAHFSMSNSAEDPFLAIHAESKIVKFKIKCKSAKQKKKKKKGRPF

SEQ ID NO: 50685 - protein, 127 aa, Homo sapiens
YVLELLQTRRFCRLRVVGTIFDSAPGDSNLATGRGSRWPELYLYSRADEVVLARDIERMVEARLARRVLARSVDFVSSAHVSHLRDYPTYYTSLCVDFMRNWSAAEAIAPSHLCSRNKCLTPPHKKK

SEQ ID NO: 50686 - protein, 125 aa, Homo sapiens
CASGSSGWRPVLWAGAFTMASAELDYTIEIPDQPCWSQKNSPSPGGKEAETRQPVVILLGWGGSKDKNLVKYSAIYHKRKLLELLFDYEIEKEPPAFSLSSATVASCCTATCWSSCRPVASAACV

SEQ ID NO: 50687 - protein, 185 aa, Homo sapiens
CASGSSGWRPVLWAGAFTMASAELDYTIEIPDQPCWSQKNSPSPGGKEAETRQPVVILLGWGGCKDKNLAKYSAIYHKRGCIVIRYTAPWHMVFFSESLGIPSLRVLAQKLLELLFDYEIEKEPLLFHVFSNGVRHAVPLTCWELLQTRRFCRLRVVGTIFDSAPGDSNLVGGSAGLGSHPGARG

SEQ ID NO: 50688 - protein, 386 aa, Homo sapiens
  misc_feature (1)...(386): Xaa = X or * as defined in Table 2
CWSHSDTYWPRTPRPPPPGRPGPVVHLAQPVLHPEAGIPEFWESGSPGQTRGAALVLTVHICVSENSPSPGGKEAETRQPVVILLGWGGCKDKNLAKYSAIYHKRNTATLQPPLTYMRGWGLFLTGAPADQYLIQIKRISQWLRGCIVIRYTAPWHMVFFSESLGIPSLRVLAQKLLELLFDYEIEKEPLLFHVFSNGGVMLYRYVLELLQTRRFCRLRVVGTIFDSAPGXQQPGXGLSGPGQPSWERRARPMLRLLLLVAFALGGSSCFHVLLAPITALFHTHFYGQAYRTRALAWPELYLYSRADEVVLARDIERMVEARLARRVLARSVDFVSSAHVSHLRDYPTYYTSLLCRTSMRKLRPLLKAIAPSHLCSQKINALKPSP

SEQ ID NO: 50689 - protein, 141 aa, Homo sapiens
  DOMAIN (86)..(129): Sodium:neurotransmitter symporter family proteins domain identified by eMATRIX, accession number BL00610E, p-value=6.897e- 38, raw score of 20.34
  DOMAIN (2)..(141): Sodium:neurotransmitter symporter family domain identified by PFam, accession name SNF, E-value=3.9e-81, PFam score of 283.0
SSKLGSPQVWIDAGTQIFFSYAIGLGALTALGSYNRFNNNCYNGTSFFAGFEVFSILGFMAAEQGVHISKVAESGPGLAFIAYPRAVTLMPEAPLWAALFFFMLLLLGLDSQFVGVEGFITGLLDLLPASYYFRFQREISV

SEQ ID NO: 50690 - protein, 334 aa, Homo sapiens
  DOMAIN (267)..(320): Sodium:neurotransmitter symporter family proteins domain identified by eMATRIX, accession number BL00610D, p-value=2.000e- 25, raw score of 20.97
  DOMAIN (44)..(307): Sodium:neurotransmitter symporter family domain identified by PFam, accession name SNF, E-value=2e-76, PFam score of 267.3
  misc_feature (1)...(334): Xaa = X or * as defined in Table 2
XTDVPDIDAAGLHELAQRDLQEENGDSSDQGYQDAGNKEHTWGEISVALCCALRFVIDLSMVTDGGMYVFQLFDYYSASGTTLLWQAFWECVVVVWVYGADRFTDDIACMIGYRPCPWMKWCWSSSPAGLMKLREPASSGTFWVIHNRLNPKVQTAKSHPRVSPHWCAAWVRVHAGAYKTTMFKTVWYLHNYQHIECNNVIESPEINLNIYSQLIFAKGTENFRERIVLNKCSVVASTSPLVVLLVLGVLLPGALDSIIYYLKPDWSSWGPSGWIDVGTQIFFSYAIGLGALTALGSYNRFNNNCYKCLVTLILQQATLLASNEAFKKQMESAX

SEQ ID NO: 50691 - protein, 498 aa, Homo sapiens
  DOMAIN (383)..(404): SODIUM/NEUROTRANSMITTER SYMPORTER SIGNATURE domain identified by eMATRIX, accession number PR00176H, p-value=5.500e-21, raw score of 15.27
  DOMAIN (32)..(460): Sodium:neurotransmitter symporter family domain identified by PFam, accession name SNF, E-value=1.6e-208, PFam score of 706.1
TYLPARGTGGAGSGGVREVVPQPPLSSLAPQIVYFTATFPYVVLVVLLVRGVLLPGALDGIIYYLKPDWSKLGSPQVWIDAGTQIFFSYAIGLGALTALGSYNRFNNNCYKDAIILALINSGTSFFAGFVVFSILGFMAAEQGVHISKVAESGPGLAFIAYPRAVTLMPVAPLWAALFFFMLLLLGLDSQVCMGLWDREPGGGRREGCRQGKGWRRCGDRPELPWPQFVGVEGFITGLLDLLPASYYFRFQREISVALCCALCFVIDLSMVTDVSGVGGLPVTSGGRLPSSLTGLCPQGGMYVFQLFDYYSASGTTLLWQAFWECVVVAWVYGRSWLRAGLGDGGGEGRSPAWPSRLTSPQGADRFMDDIACMIGYRPCPWMKWCWSFFTPLVCMGIFIFNVVYYEPLVYNNTYVYPWWGEAMGWAFALSSMLCVPLHLLGCLLRAKGTMAERWQHLTQPIWGLHHLEYRAQDADVRGLTTLTPVSESSKVVVVESVM

SEQ ID NO: 50692 - protein, 664 aa, Homo sapiens
  DOMAIN (79)..(101): SODIUM/NEUROTRANSMITTER SYMPORTER SIGNATURE domain identified by eMATRIX, accession number PR00176A, p-value=8.500e-28, raw score of 16.82
  DOMAIN (73)..(641): Sodium:neurotransmitter symporter family domain identified by PFam, accession name SNF, E-value=9.6e-304, PFam score of 1022.5
  misc_feature (1)...(664): Xaa = X or * as defined in Table 2
PPPPVRRRDPGPAVRPAGAMAKKSAENGIYSVSGDEKKGPLIAPGPDGAPAKGDGPVGLGTPGGRLAVPPRETWTRQMDFIMSCVGFAVGLGNVWRFPYLCYKNGGGVFLIPYVLIALVGGIPIFFLEISLGQFMKAGSINVWNICPLFKGLGYASMVIVFYCNTYYIMVLAWGFYYLVKSFTSTLPWATCGNYTWKHSPTCVEIFRHEDCANASLANLTCDQLANRRSPVIEFWENKVLKLSGGLEVPGALNWEVTLGLLACWVLVYFCVWKGVKSTGKIVYFTATHYPYVVLVVLLVRGVLLPGALDGIIYYLKPDWSKLGSPQVWIDAGTQIFFSYAIGLGALTVLGSYNRFNNNCYKDAIILALINSGTSFFAGFVVFSILGFMAAEQGVHISKVAESGPGLAFIAYPRAVTLMPVAPIWAALFFFMLLLLGLDSQFVGVEGFITGLLDLLPASYYFRFQREISVALCCALCFVIDLFMGTDGGMYVFQLFDYYSASGTTLLWQAFWECVVVAWVYGADRFMDDIACMIGYRPCPWMKRCWSFFTPLVCMGIFILNVVYYEPLVYKQNTYVYPWWGEAMGWPFALSSMLFVPLHLLGLPSLRAKGHPWLKRWQHLTQPIWGLHPLEELPRFRDADVQGTLTHPXTPVSESSKVVVVESVM

SEQ ID NO: 50693 - protein, 121 aa, Homo sapiens
  misc_feature (1)...(121): Xaa = X or * as defined in Table 2
MGKRGLILLIEACIAIAQPLQRWFVVPPRAGMPVTYDHSNSAAGSPPVXNARLCSPGEKVLCRSQTGNFPHTPQEQAVPSAWNALPVQPXSHGPSPMLVPCRCVCPMETRVQGSASPGGQG

SEQ ID NO: 50694 - protein, 214 aa, Homo sapiens
  misc_feature (1)...(214): Xaa = X or * as defined in Table 2
LGAVQLCPPPCRPCHRAALPGGLFPPPRPPHSPQAGPLHPQWTQXPGSVGSPTQLSPEASRPQWPPTAGSPRAGVHPGHGQAXSADISSAKQWTQVGPAGQGGSKFGKTKVPWQSGPLGWDPGARAGQGVGXETRGPSLQLAWSDGEGVPGWRGSYRGHRRGPXPPAPWPWSGGHPGSPMEWPCPGTELQMRNRAGSRDLHSLGRAPPAATAPS

SEQ ID NO: 50695 - protein, 364 aa, Homo sapiens
  misc_feature (1)...(364): Xaa = X or * as defined in Table 2
RAEPHLQVPGVPGSAQKPQGTQMAPVSPRRGPQRGWHTLGAQRLLPQAALSSPAFPQHPGGRWAPRRRGQSSQGHSPESLPSERAQPHWNHPQLLSPCTPLSCPXGGPRQAEQAGDSGSGTWVGLGAAPSERGAPMSARHWLRAPGRRPIFLLSALWXTPAWGGGPAASRSPGGPSSRVVGCPLCPLAPGPVPSVEXRPMSTKDLPPPSPRXKPPAGPAPVXSPKAVGIPAWERPPTRPETEGAGGSCAERLLAPVEMAPVSRGQRRDPEPGSRHGDPPTDTAALGGPRPPQHLPRTRQHWEIXGPGAPPTDTAALGDLRPQSPGLLMELGPISRDPHGRGPWQGPVGKLWPGGQGSCPQSPPV

SEQ ID NO: 50696 - protein, 318 aa, Homo sapiens
  DOMAIN (82)..(104): Methionine aminopeptidase subfamily 2 proteins domain identified by eMATRIX, accession number BL01202D, p-value=2.929e- 14, raw score of 15.14
  misc_feature (1)...(318): Xaa = X or * as defined in Table 2
IPSRKDHEKAEFEVHEVYAVDVLVSSGEGKVRRVPELAKRGDXECSPDQMLLKLLFQAKDAGQRTTIYKRDPSKQYGLKMKTSRAFFSEVERRFDAMPFTLRYXAMIVLGTSLTHRPYTQEHFFLSLPAXTCSVHVLTPSLSLPISFSLKVMXKSNPKHDFCLRVGAILKYEQNGKTXWGVKDTSEYHLPCQAFEDEKKARMGVVECAKHELLQPFNVLYEKEGEFQKELHFGFPDYKISFLXVQKSXVXQRNFLSKHIFIFAIGEFVAQFKFTVLLMPNGPMRITSGPFEPDLYKSEMEVQDAELKALLQSSASRKT

SEQ ID NO: 50697 - protein, 60 aa, Homo sapiens
  DOMAIN (30)..(53): Methionine aminopeptidase subfamily 2 proteins domain identified by eMATRIX, accession number BL01202C, p-value=5.846e- 11, raw score of 15.41
LSHCLPLQTTEVGGFGNLLGYWIACSIGCVLSTGMLSHQLKQHVIDGEKTIIQNPTDQQK

SEQ ID NO: 50698 - protein, 511 aa, Homo sapiens
  DOMAIN (374)..(400): Methionine aminopeptidase subfamily 2 proteins domain identified by eMATRIX, accession number BL01202E, p-value=6.308e- 20, raw score of 17.98
  DOMAIN (80)..(354): metallopeptidase family M24 domain identified by PFam, accession name Peptidase_M24, E-value=5.8e-22, PFam score of 86.4
  misc_feature (1)...(511): Xaa = X or * as defined in Table 2
LSQRALRLSPRARSFSLSPACPLPCLLALSLALSSRIEGTLTTACGWGRETEAAAAQGKRGCSGGSRKMSGEDEQQEQTIVDDSLVVTKYKMGGDIANRVLRSLVEASSSGVSVLSLCEKGDAMIMEETGKIFKKEKEMKKGIAFPTSISGTINXPICHFSPFERSDQDYIPPRKGDLVKIDLGVPCWMGFIANVASHSFVVDVAQGTQVTGRKADVIKAAHLCAEAALRLVKPGNQNTQVTEAWNKVAHSFNCTPIEGMLSHSLKQHVIDGEKPXFQNPTDKQKRAHEKADFEVHEVYAVDVLVKPQERARPKDAGQRTTIYKRDPSKQYGLKMKTSRAFFSEVERRFDAMPFTLRAFEDEKKARMGVVECAKHELLQPFNVLYEKEGEFVAQFKFTVLLMPNGPMRITSGPFEPDFYKSEMEVQDAELKALLQSSAKSEKPQKKKKKKASKTAGEWPLVAFSAVLETFRRKWKLGGLEVGPISPACCSCLHPPSHQTPRLCEVQFFFST

SEQ ID NO: 50699 - protein, 1275 aa, Homo sapiens
  DOMAIN (809)..(830): Electron transfer flavoprotein alpha-subunit proteins domain identified by eMATRIX, accession number BL00696C, p-value=8.554e- 13, raw score of 13.16
  DOMAIN (610)..(669): LIM domain containing proteins domain identified by PFam, accession name LIM, E-value=1.2e-21, PFam score of 81.5
MPLDSGAPKPGLSHDPFEVLRRDSVDKTSRVWSGLERYQELLTEDALGDLIPSFLLTGQQTPALGRRVSGVIQIADGSRRRKAAALTESDYRGLAGKLHDEHMPALSRLGNDYRPTSAYERGQRYASRLQNEFAENISALADAENISHADDTSIYMFYQKVGDNSIDSWKNAGRVFKDSDKFDANDPILKDQTQEWSGSATFTSDGKIRLFYTDYSGRKAKIKPSRHREKERLLVPKTSRPSTTRGRGFIGERGKAHPKPRSGNGARAKRHAEGHRPKSARDRQKRQRTKQRQKDKDAPKKPKRDGKPHRGRRQAQRKGEREHGATQNGKKKGGEEAKGTRTHAKGKATGATTQRSPKPQRQPDRGQRERRRAKAPTAQGEAGKPDSKQRKGASSKRPTANRGQGNGTTARREQGNSRNEDTRRKRTRHKRGEGGQAQRQGKHAQDHQTANKRPKRRKTREKRHHAAGDATPGAPQAQRRPRRTEQQRPRTGAKNDNNETTAAPLDTHATKTTTPRNNGSARKHRHTRRDSRVIPHLASVGTNKDEEEEDEWEKLTSDSECEKQLPEEINEKKGKLKKVCFTSPSAPPAELSEWPPPLCPLLEKPGTAMCVGCGSQIHDQFILRVSPDLEWHAACLKCAECSQYLDETCTCFVRDGKTYCKRDYVREKAIRIPHGCRSAPPGPGMPAGGSPQSPGGHKVSWARAGARTAREMRAAAGPALTPAHLGPAGLFASSAPRGRLLLHESVGPRVGGVAGPQSVQLLLVQHSPHAGRLLRLLVHVRAQRGLPARPSVCQDRTIVAINKDPEAPIFQVADYGIVADLFKTIVAINKDPEAPIFHVADYGIVADLFKARLLLFTFLTEFHVVTVGGKVPLARQALQNDLNVMLFSDNVSVEDELALKQLAHEKGLLMMGPDCGTAIINGAALCFGNAVRRGNIGIVGASGTGSQELSVRIHEFGGGVSQLIGTGGRDLSEKIGGLMMLDAIGMLENDPQTEIIALISKPPAPAVARKVLERARACRKPVVVCFLDRGETPVDEQGLQFARGTKEAALKAVMLSGVKQENLDLHTLNQPLIADVPKTADSGSQRINSGTRINGTTPPTQNTVCHAKFAPAKPSVAASAAPMGTPQYIRLTAVPRKRGPAASDVRAIRFGNAAPRPTPVISRAKTRTRHHTTSGSTSRRRRRREAAERHATMPQGSSIRASDSIHRERKHADRTIGKPRSPHSNETRSDHATSVSQASTTDTRCEMHGYGASANARANQSAHNSHELETTHMLV

SEQ ID NO: 50700 - protein, 448 aa, Homo sapiens
  DOMAIN (90)..(133): 'Homeobox' domain proteins domain identified by eMATRIX, accession number BL00027, p-value=2.895e-24, raw score of 26.43
  DOMAIN (80)..(135): Homeobox domain identified by PFam, accession name homeobox, E-value=8.8e-09, PFam score of 40.9
  misc_feature (1)...(448): Xaa = X or * as defined in Table 2
ARERSLRGSPAREREKERKCTALSEXGEQMERKTNSXTKQTEXNRNEIGPRGAGPPGDAGSGRQPALRPHVHKQTEKTTRVRTVLNEKQLHTLRTCYAANPRPDALMKEQLVEMTGLSPRVIRVWFQNKRCKDKKKSILMKQLQQQQHSDKSGEQPLGRRLESGGGCASAAVSACPFLGEPWEIQGELGAPDGVCLYLHSKASLGFEASYFVWDRGFSLSQWQPRVAGSGRCAEPKAAWQCAAPASRAGGLCTPSAAAERSPVEKEGSSDAIECAPPRKAMQTLNHSRPGAPVSKVAEKARPNSSTYCLLLAPQSLQGLTGTPLVAGSPIRHENAVQGSAVEVQTYQPPWKALSEFALQSDLDQPAFQQLGLLSAGGRSPRDTFRLGARGPGAPARVPLHLPLPGVSAAPVSFSESGSLGNSSGSDVTSLSSQLPDTPNSMVPSPVET

SEQ ID NO: 50701 - protein, 48 aa, Homo sapiens
SYKQQPSVKTVRTSLVFKALAFSFMQVHSLEVVADLTTPWSPCQTAAH

SEQ ID NO: 50702 - protein, 67 aa, Homo sapiens
  misc_feature (1)...(67): Xaa = X or * as defined in Table 2
WDTSSXSLRTPRSRQVSTRPRRKKEKLPSKGMFSSVSLPQVLTQRHQRPTCSWSLCWQPQHLILLRS

SEQ ID NO: 50703 - protein, 77 aa, Homo sapiens
  misc_feature (1)...(77): Xaa = X or * as defined in Table 2
GRAWPAPPTSVTPRLRSPAESPRWPSAEERSSLPVRGRRPGYGXVSCCGPRAPPGVNGDALRSARPAQLPAXRPQRH

SEQ ID NO: 50704 - protein, 141 aa, Homo sapiens
  misc_feature (1)...(141): Xaa = X or * as defined in Table 2
GVHRGTHGRQKWRPCAPRAQHSWGPGGRLPAGCRGXAGSCAPSLGLXCGAGPQGWGRRDPXTRRRTPRRPPRGPRPRVWMAPPARSHPWRAAPRSAGAAPRPLGLGGRSGRETRPAPGGELQRPAAAGPPLMSCGWRVVLA

SEQ ID NO: 50705 - protein, 114 aa, Homo sapiens
  misc_feature (1)...(114): Xaa = X or * as defined in Table 2
KAMSPVFPRHSKWDLDLSRPLFTSAALLSACKILKLKVDKNKMVATSGVKKSYIXSTVXTTREDWTAGRQRTWRCIYSTTEEKEDSGXSPSKGNGEGRGDATXTTERXRSDTGL

SEQ ID NO: 50706 - protein, 937 aa, Homo sapiens
  DOMAIN (511)..(636): Eukaryotic protein kinase domain identified by PFam, accession name pkinase, E-value=2.1e-34, PFam score of 127.7
  misc_feature (1)...(937): Xaa = X or * as defined in Table 2
HPGWVARGPGAGEGHAAGCGPARCQAGGPLQDGGCGGQGHRFGGGHVPEIKGGGFPHAGACALEERQPRXQPXGVGKRGGGLFHASSSPSSGGSRTEPAEGXGGAVCRAGDLGHIDDAGDHGDSGKKERVEEEGGKPKHVLSTSGVQSDAREPGEESQKADVLEGTAERLPPIRASGLGADPAQAVVSPGQGDGVPGPAQAFPGHLPLPTKVEAKAPETPSENLRTGLELAPAPGRVNVVSPSLEVAPGAGQGASSSRPDPEPLEEGTRLTPGPGPQCPGPPGLPAQARATHSGGETPPRAALLKGAGPRASLGGTWCFLASSAPAXGSPSTYKRWILLGRCXXQAGAALDPPSPQRPPAAAQPGKQGPPGTGRCLQAPGTEPGEQTPEGARELSPLQESSSPGGVKAEEEQRAGAEPGTRPSLARSDDNDHEVGALGLQQGKSPGAGNPEPEQDCAARAPVRAEAVRRMPPGAEAGSVVLDDSPAPPAPFEHRVVSVKETSISAGYEVCQHEVLGGGRFGQVHRCTEKSTGLPLAAKIIKVKSAKDREDVKNEINIMNQLSHVNLIQLYDAFESKHSCTLVMEYVDGGELFDRITDEKYHLTELDVVLFTRQICEGVHYLHQHYILHLDLKTGPKEKYCFQQVKYLDFINGETKEARPNRAGLNPERSVGPLLHSLECGAVGESRGYKEGRPSAGAMGSELIGRLAPRLGLAEPDMLRAYFKKNFSAVSLNEMARRAIANGDGTRPWEQPALSVGRKMSQGELSVHSANAYCSRVYSGEPDNEAQTPLSAYLIKLSGLNKETYQSCLKSFECLLGLNSNIGIRDLAVQFSCIEAVNMASKILKRILKLKVDKNKMVATSGVKKAIFDRLCKQLEKIGQQVDTKNFEIAFDNFLSEMEKVEEMPHKPQKDEDLTQDYEEWKRKILENAASAQKATAE

SEQ ID NO: 50707 - protein, 159 aa, Homo sapiens
  DOMAIN (33)..(88): Domain present in ZO-1 and Unc5-like netrin receptors domain identified by eMATRIX, accession number PF00791B, p-value=5.954e- 09, raw score of 28.49
  DOMAIN (63)..(130): Ank repeat domain identified by PFam, accession name ank, E- value=0.0015, PFam score of 25.2
  misc_feature (1)...(159): Xaa = X or * as defined in Table 2
LRQYSVKMRIVPTILLNFGADPDLRDIRYNTVLHYAVCGQSLSLVEKLLEYEADLEAKNKDGYTPLLVARYXQLIPKLVKFLLEKGADVNASDNYQRTALILAVSGEPPCLVKLLLQQGGEICNEGMVDSQLRNMFISMVLLHRYPQFTASHGKQKHAK

SEQ ID NO: 50708 - protein, 180 aa, Homo sapiens
  misc_feature (1)...(180): Xaa = X or * as defined in Table 2
PKRRGAPLPVIPQSASXKPKLPMGRPPPPVPSVSPGPLPGSLAIAPHSLEPHLVQSSCLVVPPKTKQSKRKPGRGAQAPTLPNATEFSVCRNDPKEGGRRSPXFPNRLLEPEAPPRPSAGESPRPAAASPLPCSEEKPTPQLCARERLAPSAAPPPPPRCGPAPLLEPSAWTPELARRAA

SEQ ID NO: 50709 - protein, 300 aa, Homo sapiens
  misc_feature (1)...(300): Xaa = X or * as defined in Table 2
SAPFSSGERTPGCPEASPFPGGGGGNARPSGPAPHPPSSASXKPKLPMGRPPPPVPSVSPGPLPGSLAIAPHSPEPQLVQSSCLVVPPKTKQSKRKPGRGAQAPTLPNATEFSVCRNDPKEGGRRSPXFPNRLLEPEAPPRPSAGESPRPAAASPLPCSEEKPTPQLCARERLAPSAAPPPPPRCGPAPLLEPSAEAEEGGWGAGPLGRALPPPPPGKGLASGQPGVRSPDEKGADQRQPSGPRLCSAPAPPRRSPPRRRRPSNFVPEDQPHYVPGSASAGPRRSPRPPRRELGAPSHLP

SEQ ID NO: 50710 - protein, 82 aa, Homo sapiens
  DOMAIN (33)..(75): Cyclin-dependent kinases regulatory subunits proteins domain identified by eMATRIX, accession number BL00944, p-value=7.821e-13, raw score of 17.47
  DOMAIN (9)..(79): Cyclin-dependent kinase regulatory subunit domain identified by PFam, accession name CKS, E-value=1.2e-12, PFam score of 55.4
  misc_feature (1)...(82): Xaa = X or * as defined in Table 2
GHKELVTGTEAIELAHAYETCHAVPRTIAKLVPKTHLMSESEWRNLGVQQERQGWVHYMIHEPEPXHFGCSRRPLTQGTQRK

SEQ ID NO: 50711 - protein, 44 aa, Homo sapiens
  DOMAIN (26)..(40): C-type lectin domain proteins domain identified by eMATRIX, accession number BL00615B, p-value=2.286e-10, raw score of 12.25
  misc_feature (1)...(44): Xaa = X or * as defined in Table 2
VLKPGGSYSFGSPSCNSSHXLIGFQKWKDVPCEDKFSFVCKFKN

SEQ ID NO: 50712 - protein, 240 aa, Homo sapiens
  DOMAIN (55)..(73): C-type lectin domain proteins domain identified by eMATRIX, accession number BL00615A, p-value=3.769e-16, raw score of 16.68
  misc_feature (1)...(240): Xaa = X or * as defined in Table 2
ARDSLQLSMAQTSSYFMLISCLMFLSQSQGQEAQTELPQARISCPEGTNAYRSYCYYFXWKTRETWVDADLYCQNMNSGKLGVCGSPRAEGCLFWPQLIXGGVGTXWTFNVLDLGLQXPPKRTRRWHWEQWGPLVSLQSSWGHWEPPSRCLNPGYCVSLDLQSTRISRNWKDVPFVKDKFSFVCKVQKTRGQAGKIQCLELTPAITNGVQKLNRTISPTQLNLVTLFSAEFALLIFNSFT

SEQ ID NO: 50713 - protein, 106 aa, Homo sapiens
EADLYELVQYAGNIIPRLYLLITVSKELTRLLKIPVDTYNNILTVLKLKHFHPLFEYFDYESRKSMSCYVLSNVLDYNTEIVSQDQVDSIMNLGSTVIQDQPDQPV

SEQ ID NO: 50714 - protein, 139 aa, Homo sapiens
DLYELVQYAGNIIPRLYLLITVGVVYVKSFPQSRKDILKDLVEMCRGVQHPLRGLFLRNYLLQCTRNILPDEGEPTDEETTGDISDSMDFVLLNFAEMNKLWVRMQHQGHSRDREKRERERQVSWRCKCGTLQQIVLTG

SEQ ID NO: 50715 - protein, 482 aa, Homo sapiens
  DOMAIN (379)..(400): GLUTELIN SIGNATURE domain identified by eMATRIX, accession number PR00211B, p-value=9.816e-11, raw score of 0.86
MAISDELHYLEVYLTDEFAKGRKVADLYELVQYAGNIIPRLEETTGDISDSMDFVLLNFAEMNKLWVRMQHQGHSRDREKRERERQELRILVGTNLVFPDEFHLQTLNPFLRACAELHQNVNVKNIIIALIDRLALFAHREDGPGIPADIKLFDIFSQQVATVIQSRQDMPSEDVVSLQVSLINLAMKCYPDRVDYVDKVLETTVEIFNKLNLEHIATSSAVSKELTRLLKIPVDTYNNILTVLKLKHFHPLFEYFDYESRKSMSCYVLSNVLDYNTEIVSQDQVDSIMNLVSTLIQDQPDQPVEDPDPEDFADEQSLVGRFIHLLRSEDPDQQYLILNTARKHFGAGGNQRIRFTLPPLVFAAYQLAFRYKENSKVLRPPCQLRPPCQLRPPCQLRPPCQLRPPCYRDELLLPKGPASSASALSPFPASGGQVDSWLVHSVAAEDADVAHGLLGATATLARGVGASQAAQWGRRGSPSSSE

SEQ ID NO: 50716 - protein, 841 aa, Homo sapiens
  misc_feature (1)...(841): Xaa = X or * as defined in Table 2
LGAGAACCRLWGVAMPTTQQSPQDEQEKLLDEAIQAVKVQSFQMKRCLDKNKRIGVRHKTMLRNMLGELRTSMLSPKSYYELYMAISDELHYLEVYLTDEFAKGRKVADLYELVQYAGNIYPQGFYLLVHSLSCNNVKSFPQSRRDILKDLVEMCRGVQHPLRGLFLRNYLLQCTRNILPDEGEPTDEETTGDIRDSMDFVLLNFAEMNKLWVRMQHQGHSRDREKRERERQELRILVGTNLERLSQVEWCKCGTLRQIVLTGILEQVVNCRDALAQEYLMECIIQVFPDEFHLQTLNPFLRACAELHQNVNVKNIIIALIDRLALFAHREDGPGIPADIKLFDIFSQQVATVIQSRQDMPSEDVVSLQVSLINLAMKCYPDRVDYVDKVLGNNSGRIFNKLNLEHIATSSAVSKGNFTRLLGKLPVGHFTNNILTVLKLKHFHPLFGYFDYESRKSMSCYVLSNVLDYNTEIVSQDQVDSIMNLVSTLIQDQPDQPVEDPDPEDFADEPEALVARFIHLLRSEDPDQQYLILNTARKHFGAGGNQRIRFTLPPLVFAAYQLAFRYKEISKVDDKWEKKCQKIFSFCPTKTISALIKAELAQELPLRTFSFKGGTXLAAGELGFGNHGTVAYEFMSQGIFSVWKDEKSGDFPKAQLGWPFTFGSIGALFERVEVLSVEEDSWNPLRTQCALAASKLLKKPDQGRAVSTCAHLFWSGRNTDKNGEELHGGKRVMECLKKPLKIANQCHGPLSYKCQLFIEILNRYIYFYEKENDAVTIQVLKPSLFQKVSQKDLPGIFGLQLKETEQVXQTIFINTLEHLPLAGGKSPRIPRGPIYGRSSSL

SEQ ID NO: 50717 - protein, 120 aa, Homo sapiens
  misc_feature (1)...(120): Xaa = X or * as defined in Table 2
MLTIYMYTHTQNCTCLKHLQXXXXXXXXXXXXXXXXXXXXXXXXXXXXXXXXXXXXXXXXXXXXXXXXXXXXXXXXXXXXXXXXXXXXXXXXXXXXXXXXXXXXXXXXXXXXXXXXXXVT

SEQ ID NO: 50718 - protein, 140 aa, Homo sapiens
  misc_feature (1)...(140): Xaa = X or * as defined in Table 2
MLTIYMYTLPQSCTCLKHLQXXXXXXXXXXXXXXXXXXXXXXXXXXXXXXXXXXXXXXXXXXXXXXXXXXXXXXXXXXXXXXXXXXXXXXXXXXXXXXXXXXXXXXXXXXXXXXXXXXVTINNFVFALHIHIQKSLLKTK

SEQ ID NO: 50719 - protein, 145 aa, Homo sapiens
KREVLKRRFEIKKKLKASSSSSSSSSSSSSSSSSSSKKLTQIQESQVTSHNKERRSKRDEKLDKKSQAMEELKAEREKRKNRTAELLAKKQPLKTSEVYSDDEEEEEDDKSSEKSDRSSRTSSSDEEEEKEEIPSKSQPVFLPEE

SEQ ID NO: 50720 - protein, 249 aa, Homo sapiens
  DOMAIN (118)..(156): Synapsins proteins domain identified by eMATRIX, accession number BL00415O, p-value=9.230e-09, raw score of 3.44
MVCSDSDSSSEDEEFHDGYGEDLMGDEEDRARLVQMTEKEREQELFNRIEKREPLPKSNSPGRGELQLTKRLIFPINSWRTVRTYLHNHIEPADEKKSNHACRTKLLCRRWPPAMLCTPAARCRGTGTRPKGGGEVPEKARPAPNKPHPQRRQSKKVKRETPNENHGNASRTRQKRKQKRRNQTMNSQTPQAAGSRNQERENGHEPKRQGAQRAARNTQTRQDARENHRTLRYKQITKGKPDRKPNKTG

SEQ ID NO: 50721 - protein, 288 aa, Homo sapiens
MRLRVGRVRAGVQLNSQGARPGGSTAGDACRPRATGTLALRLRARSGERGQSALERSGRAPPPLLRGLGANGAGGARGQGCGDRWRGQGWRPGRFEIKKKLKTAKKKEKKEKKKKQEEEQEKKKLTQIQESQVTSHNKERRSKRDEKLDKKSQAMEELKAEREKRKNRTAELLAKKQPLKTSEVYSDDEEEEEDDKSSEKSDRSSRTSSSDEEEEKEEIPPKSQPVSLPEELNRVRLSRHKLERWCHMPFFAKTVTGCFVRIGIGNHNSKPVYRVGISSLGQLSMLSV

SEQ ID NO: 50722 - protein, 710 aa, Homo sapiens
  DOMAIN (3)..(13): TYPE I ANTIFREEZE PROTEIN SIGNATURE domain identified by eMATRIX, accession number PR00308C, p-value=8.597e-09, raw score of 3.83
  misc_feature (1)...(710): Xaa = X or * as defined in Table 2
VGRAAAAAAAVAVPLAGGQEGSPGGGRRGSRGTTMVKKRKGRVVIDSDTEDSGSDENLDQELLSLAKRKRSDSEEKEPPVSQPAASSDSETSDSDDEWTFGSHKHKKKGQARTLEQKGTMKKQANKTASSGSSDRTDSSAESSAPEEGEVSDSDSNSSSSSSDSDSSSEDEEFHDGYGEDLMGDEEDRARLEQMTEKEREQELFNRIEKREVLKRRFEIKKKLKTANKKEKKEKKKXQEEEQEKKKLTQIQESQVTSHNKERRSKRDEKLDKKSQAMEELKAEREKRKNRTAELLAKKQPLKTSEVYSDDEEEEEDDKSSEKSDRSSRTSSSDEEEEKEEIPPKSQPVSLPEELNRVRLSRHKLERWCHMFFFAKTVTGCFVRIGIGNHNSKPVYRVAEITGVVETAKVYQLGGTRTNKGLQLRHGNDQRVFRLEFVSNQEFTESEFMKWKEAMFSAGMQLPTLDEINKKELSIKEALNYKFNDQDIEEIVKEKERFRKAPPNYAMKKTQLLKEKAMAEDLGDQDKAKQIQDQLNELEERAEALDRQRTKNISAISYINQRNREWNIVESEKALVAESHNMKNQQMDPFTRRQCKPTIVSNSRDPAVQAAILAQLNAKYGSGVLPDAPKEMSKASVGQGKDKDLNSKSASDLSEDLFKVHDFDVKIDLQVPSSESKALAITSKAPPAKDGAPRRSLELGKDYKKRTRGLF

SEQ ID NO: 50723 - protein, 91 aa, Homo sapiens
FLSQSWIFKQIRASRTLFLVAFSSNTFTSCRSFCSSSEAMGAGSGRSPELQPRRRRNRKPRAEPSNRAQTPTRTSLRRCSLRPHRPCARSR

SEQ ID NO: 50724 - protein, 1098 aa, Homo sapiens
  DOMAIN (521)..(559): Lysyl oxidase  copper-binding region proteins domain identified by eMATRIX, accession number BL00926B, p-value=1.340e- 09, raw score of 13.84
  misc_feature (1)...(1098): Xaa = X or * as defined in Table 2
ILQKRIGGFLDALVRNSQPARYINDYQLSNYGLDMLGPSLDPAPMASEELQKDLEEVKVLLEKATRKTEKSKIETEIKNKLQQKSQKKAELLDNEKPAAVVAPITTGYTKGGGGEERGGEAPTSNEAQATEVRGGAGGGKDKDDGDRERPRKTRGGRARTEXNNRHEQXIQIKKRRETEKERRNEKGRRRHKTATQKRRREERRARRVGEGTRKREQPAHEQEHATTTHTRPPAPRRTRKTQTHNRKERKKEETPGDAKRKKHRNTTPTRRSDNSQQKKTKTTPRAGGETERKTKRAEKKNQNRRKQQKREPPREPTPPPEPQPKRPPTDRTQTRKTTDPRRDGAKRQEQEAARATSNKQTNKTGHDTHAPDSEQTPEKHTQTTSPTATKEKQRDKTTNQPPNPTHQHTEPASARRPRSAAHHKQTPHTQPQREREKTXQAETAKEPRAAPPRRRQTTPPPRTPNRTRGPARAPPDQSHPRTPPRRQHAPHTTTPPAPRRARRQPPAAPPKARPGGSRKRGGTPHPPPADRRSPPPRPPAARRRRPPGQDSQAPGARRPRATDRSPHPRGRTQTHAPTDAAHRTPPTRPQRPRRRRERKETDERKQRRGKEKGTKQPRKRQKGTRKRRRENEKKRERREKRRQERKKKKKKRKEEARRRRKEQKKEEKRRRSETKRAKHAKTKRREERRERRRGNTRRRTTRAGEERGRRRERARGREAQTRKRHAHTQTKNKERTPRSNKRSARARKNTPATARRPRRRRARTPPAGAPQQAQNAPPAPATARNDKEKTPRPPAPATRTTRHPEDPAPPPAHPGDARGPARPRKRRRRPALRRHDAQHPRGRPGTPPRHPRPPEPPATPPRAHPASERPAPPHPPKAACRRSTGSSSRRRAQWQRRARREAQPTRSGPSRRTKRSASARATESPRTEEXSDAXQPTKENKDHPTRRRRNGAQNQESRKKKPKQKKTTEERATAGADPPPRTPTQAAPHRPHADKKNHRPPKRRRQTTRTRSSKGDKQQTDKQDRTRHPRPRQRADAGKTHTNNKPDSHKRETTRQNNQPTPKPHTPTHRTRKRTTPAQRRAPQADAPHPAQREREKT

SEQ ID NO: 50725 - protein, 39 aa, Homo sapiens
MINIDQRLSLGSGFFEAAYTQGNSSEPQRAHWILLKAES

SEQ ID NO: 50726 - protein, 120 aa, Homo sapiens
  misc_feature (1)...(120): Xaa = X or * as defined in Table 2
YEPLDSNKRIGTSSSSYVLCLCSSLAIFSNFMGNLLSFCGVLKLKSLACIHXRFFFNXAXXVFIHISSREQXFINVCSSCPAFFNPERRNELYASLLSFVPSALVPIFEDNVSYLFVKSF

SEQ ID NO: 50727 - protein, 600 aa, Homo sapiens
  misc_feature (1)...(600): Xaa = X or * as defined in Table 2
VYSDAKSIYCLLFAHSQRPPCVFNENDPQNSGTVHTVFLVGLTDHRHARAKIESWAGEAAPFTLVAASADKLFGDLHISKYCGRIAVSVFQFQQYCGLCDSTSSLQQYCGLCGSTXHSGSTVASVAGLHIVAVPWPLWQDFTLWQYRGLCAQDFTLWQYHGLCGRTSRVAVPWPLWQYFTLWQYCGLCGRTSHCGQYRGLCGRTSHCGSTVASVAGLHVWQYCGLCGSTSRCEQYHGLCGRTSRLWQYHGLCGRTSYCEQYRGLCGSTSRCGMYRGLCGRTSHWWQYCGLCSSTSYCSRTVALWQYFILCSTSYWQQYHGLCGNTSYCGILQLQQYSGLCSSTSYWGSTVASVAVLHIAAVLWPLRQYFILQQNRGFCGNTSYCGSYFILWQYHGLCGSTSYCGSYFILQQYHGLCGSTSYCEQYRGLCGSTSYCTQYCGLCGSSSYCAQNCGFCGNTSYCGSTSVLQQYHGLCGSTSYCGRTVVFCGSTSYWGSTSYCGSTVASLAVLHIVAVLCPLXQYFTTNKTKNKTKPGSCHLTYFGGAAGGPSLXAPGGVAGTVGSASRSASWGLPEWICCLRDPKSLSFPYWGFEVWRLASTA

SEQ ID NO: 50728 - protein, 182 aa, Homo sapiens
  misc_feature (1)...(182): Xaa = X or * as defined in Table 2
LSSTGGLHAGRLCCSPCLLVIPLKSSQHIFRVLNTNIRLGRRKNSPLPITAHLRVWARRYAHVVLRKADIDLTKRAGELTEDEVERVITHILQNPRQYKDPKTGFFEQDKKDVKDGKYSQVPSQLVWDNKLPXKTWEPTERRFRAHXRGLRHFLGAFRVRGQAHQEPLGRRGRHRWVCPRRK

SEQ ID NO: 50729 - protein, 242 aa, Homo sapiens
  DOMAIN (152)..(185): PROLINE-RICH PROTEIN 3 domain identified by eMATRIX, accession number DM00215, p-value=1.763e-09, raw score of 19.43
  misc_feature (1)...(242): Xaa = X or * as defined in Table 2
LFGVVYTGFCLGVWTAGVGGVPGPNFPRPILTLVRGPXGKGVGWVAGPGQLRPTGPWSIXVSHPTPPGPLSISYRAQAAGGQGPAPITHPQGRQEPXRQLPPGGPLARHPPKAPDPARPHPRQHRGPSSTAPKGRCWQHKQEPSGHPAGHTPGRPGPPQAPPRPSPWVGPGPQTPTPCPXDEPHRPPGLQPWRPFSPLAMAPMGRLQALPGLDQRGQTVSPLRLLGALESLAWLPSAFIALQ

SEQ ID NO: 50730 - protein, 250 aa, Homo sapiens
MRWLKEKETIFLGEQEIWPETCSLHYHTILQLDLFSKKEGKWGEVPYVQASMAPYQDSDLRVNCRMCLAHVTSRHQETAWDILDAPFLAAPPGGPMPSPGSSQSPSSARGPASSPVWDFTPMSSENPPFYLASSSLYPPLPKEAHATIGKERGLSRAKGSPIQLYSDLGTFRCRPIPKEITSIHCRGHQKEDTVLIRGNSLLERAAKATAKETLVFQAAALLPGHPCQWNRSIHPRKLKGLSKRLPVRPL

SEQ ID NO: 50731 - protein, 267 aa, Homo sapiens
MVIVGLAAGVLLVGPGDGGLISEGVVREDLMCGVWSAGTWSVGTAERCLEKPGALHVIEGPLDSWDGPVMPNGPVKNHKGEQQEVPSKHPQMALEICLCLDFLYYPFLRGDASAGPVTWCTTSDTIILQQHRTLTSQGVDDFLKAKATFKASDFIDALVLSKDLNSGGRMELEIKCLIKVLELDLEGSGEPWKVLDKGVTVSYVFEMTIEGCLEGVNKSQETREGACGAGLEMAKEGSCLDERSSGTVSGYTQVSSELVCSGFLSPG

SEQ ID NO: 50732 - protein, 91 aa, Homo sapiens
MGTWAMRNILPNHVTAETSLSRPPGQRPNSLTAGTSLPYPAGQQALPPRSLPPSPMITPACEWQLVLALSWFPPPQGFAGNKDVAVEAKKK

SEQ ID NO: 50733 - protein, 325 aa, Homo sapiens
  misc_feature (1)...(325): Xaa = X or * as defined in Table 2
INYSLEKHVGALGRVLFSLXRAGCPGMGSTRERGLYLGKHRGSGGIWXALAGPXKSRGDSVSLTQGHTHVCSRSPRXADSPPGSHLSPVPHSVEVAGHVLVPATRAAVPCSASAGAXQSTYRTGVHQGNPTVXTKPSRRPSGGVAKXFLPSAVRGEPGAKPLVDDLLPGWSLATHGQPPLVAAPGSGLWGRPADAXGCETAGGSPCPRSTSRPSGPSGVQGCPLGXAGSGASASRSEPPGSTSCCPRAPTXPAAPCVPDWPAGDQWRSHGYLPPSRELXGWMPPSRPATLPQLAFARQRQGNRFDAAFESSGEDFHQMPRVGRMG

SEQ ID NO: 50734 - protein, 19 aa, Homo sapiens
MRILYLSQLRGGCGVLNKI

SEQ ID NO: 50735 - protein, 50 aa, Homo sapiens
  DOMAIN (33)..(48): TRANSCRIPTION FACTOR NF-KB SIGNATURE domain identified by eMATRIX, accession number PR00057E, p-value=7.000e-14, raw score of 15.74
  DOMAIN (2)..(50): Rel homology domain (RHD) domain identified by PFam, accession name RHD, E-value=4.8e-14, PFam score of 41.9
YAIVFRTPPYHKMKIERPVTVFLQLNTKRGGDVSDSKQFTYYPLVEDKEE

SEQ ID NO: 50736 - protein, 780 aa, Homo sapiens
  DOMAIN (95)..(129): !!!! PROTEIN ALU SUBFAMILY WARNING ENTRY NUCLEAR PHOSPHO domain identified by eMATRIX, accession number PD02454A, p-value= 7.900e-35, raw score of 20.81
  DOMAIN (40)..(345): Rel homology domain (RHD) domain identified by PFam, accession name RHD, E-value=2.3e-178, PFam score of 513.5
  misc_feature (1)...(780): Xaa = X or * as defined in Table 2
PRDMESCYNPGLDGIIEYDDFKLNSSIVEPKEPAPETADGPYLVIVEQPKQRGFRFRYGCEGPSHGGLPGASSEKGRKTYPTVKICNYEGPAKIEVDLVTHSDPPRAHAHSLVGKQCSKLGICAVSVGPKNMTAQFNNLGVLHVTKKNMMGTMIQKLQRQRLRSRPQGLTEAEQRELEQEAKELKKVMDLSIVRLRFSAFLRASDGSFSLPLKPVTSQPIHDSKSPGASNLKISRMDKTAGSVRGGDEVYLLCDKVQKDDIEVRFYEDDENGWQAFGDFSPTDVHKQYAIVFRTPPYHKMKIERPVTVFLQLKRKRGGDVSDSKQFTYYPLVEDKEEVQRKRRKALPTFSQPFGGGSHMGGGSGGAAGGYGGAGGGGSLGFFPSSLAYSPYQSGAGPMRCYPGGGGGAQMAATVPSRDSGEEAAEPSAPSRTPQCEPQAPEMLQRAREYNARLFGLAQRSARALLDYGVTADRRALLAGQRHLLTAQDENGDTPLHLAIIHGQTSVIEQIVYVIHHAQDLGVVNLTNHLHQTPLHLAVITGQTSVVSFLLRVGADPALLDRHGDSAMHLALRAGAGAPELLRALLQSGAPAVPQLLHMPDFEGLYPVHLAVRARSPECLDLLVDSGAEVEATERQGGRTALHLATEMEELGLVTHLVTKLRANVNARTFAGNTPLHLAAGLGYPTLTRLLLKAGADIHAENEEPLCPLPSPPTSDSDSDSEGPEKDTRSSFRGHTPLDLTCSTKVRPARDXDTKNPSKPLMNPGAGFLKGSTKLTDRXQP

SEQ ID NO: 50737 - protein, 115 aa, Homo sapiens
  misc_feature (1)...(115): Xaa = X or * as defined in Table 2
PQTITDTELWVTLTVEVWDISTLFPGNXSHATLPSHXNLITLTPLNANIAIPQHALKGLKPVITRLLQHGLLKPINSPYNSPILPVQKLDKSYRLVQNLRLINKIVSPIHPVVPN

SEQ ID NO: 50738 - protein, 269 aa, Homo sapiens
  DOMAIN (122)..(140): RNase H domain identified by eMATRIX, accession number PF00075J, p-value=1.225e-16, raw score of 15.78
  DOMAIN (98)..(182): Integrase core domain identified by PFam, accession name rve, E-value=1.9e-18, PFam score of 67.8
  misc_feature (1)...(269): Xaa = X or * as defined in Table 2
YGTSLLLPWQLITCPLPSHXNLITLTPLNANIAIPQHALKGLKPVITRLLQHGLLKPINSPYNSPILPVQKLDKSYRLVQNLRLINKIVSPIHPVVPNPPAFTSQITQAVSQALGIQWNLHIPYHPQSSGKVERTNGLLKVHLTKLSLQLKKDWTVLLPLALLRIRACPRDATGYSRFELLYGRTFLLGPNLIPDTSPLGDYLPVLQQARQAANLLLPTPDPQPHEDTLAGRSVLVKNLTPQTLQPRWTGPHFIIYSTPTAVCLQDPPH

SEQ ID NO: 50739 - protein, 171 aa, Homo sapiens
  DOMAIN (157)..(168): RNase H domain identified by eMATRIX, accession number PF00075B, p-value=1.346e-09, raw score of 12.56
  misc_feature (1)...(171): Xaa = X or * as defined in Table 2
CCPIASEAQXTITDAELWVTLTVEAQSLLRVFLSYLPTLTHKYGTSLLLPWQPITCPLPSRXNLITLTPLNGQYPIPQHALKGLKPVITRLLQHGLLKPINSPYHSPILPVLKPDKAYKLVQNLRLIYQIVLPIHPVVPNPYTLLSSVPPSTTHYSVLDLKHAFFTIPLQP

SEQ ID NO: 50740 - protein, 631 aa, Homo sapiens; identical to SEQ ID NO: 30802

SEQ ID NO: 50741 - protein, 601 aa, Homo sapiens
  DOMAIN (403)..(414): RNase H domain identified by eMATRIX, accession number PF00075D, p-value=8.364e-11, raw score of 10.71
  DOMAIN (267)..(455): Reverse transcriptase domain identified by PFam, accession name rvt, E-value=7.5e-25, PFam score of 96.0
MISCLAEGLKRAAYKAVNYDKLKETTQGKDENPAQFMARLAATLRRFTALDPEGPEGGLILNMHFITQSTPDIGKKLQKLESRPQTPQQELTSPSRCTIMERRLTLPDRLGSPLDHHGHRASGPVSLAPITFVGIDGQASKHLKAPLLWCQLGQPSFKHSFLVIPTCPVPLLGRDILTKLSASLTIPGLQPHLIATLLPNPKLPLRLPLVSPYLDPQVWDIFTPSLATDHMPITIPLKPNHPYPAQRQYPIPQHALKGLKPVITRLLQHGLLKPINSPYNSPISPVQKPHKSYRLVEDLCLINQIVLLIYPVVPNPYTLLSSIHSSTTHYSILDLKDAFFTILLYPSSQPLFAFTWTDPDTHQSQQLTWAVLPQGFRDSSHYFSQALSHDLLSFHPSASHLIQYIDDLLLCSPSFESSQQDTLLLLQHLFSKGYWVSPSKAQISSPSVIYLSIILHKNAHALPANRVRLISQTPTPSTKQQLLSFLGMVGYFRFWMPGFAILTKPLYKLTKGNLADPIDPKSFLHSSFRSLKTALETEATLALPDSSQPFSLPTAGLEVQGCAVRIVTQGPGPRPVAFCSKQLDLTVLPSPQVCMQQPPLP

SEQ ID NO: 50742 - protein, 215 aa, Homo sapiens
  DOMAIN (123)..(139): PROTEASE POLYPROTEIN HYDROLASE ASP domain identified by eMATRIX, accession number PD00302B, p-value=9.481e-09, raw score of 9.52
  DOMAIN (80)..(145): Retroviral aspartyl protease domain identified by PFam, accession name rvp, E-value=1.5e-08, PFam score of 35.4
  misc_feature (1)...(215): Xaa = X or * as defined in Table 2
MTSGPQINQPKKHLTNFKSEPSDLFPSSPGCSLPAEDXRCPIALEAPXTITQARVTLIVEGKSVPLVNTEATQSTLPSFQGPVSLASITVVGIDGQASKPLKTPLLWCQLGQHSFMHSFLVIPTCPVPLLGRDILTKLSASLTIPGLQPHLIATLLPNPKPPSCLPLLSPHLNPQVWDISTSLATDHMPITIRLKPNHPYPAQRQYPIPQHALKD

SEQ ID NO: 50743 - protein, 71 aa, Homo sapiens
LGSGAWGGGDLPWEINPLSSCSLLREKDLLTTSGPQTTSPRNISPILNRDPTVQLTWQPLPEPLELWPKAL

SEQ ID NO: 50744 - protein, 23 aa, Homo sapiens
MQNLAAPGSHSQSPWNSGPRLSD

SEQ ID NO: 50745 - protein, 169 aa, Homo sapiens
MWKGPKGLDMYGKSSVSPKTSDILGRDTLLLALKVQTVVLQTACGEGHVAGNCGRPLETEGSLQLTATKKLRDSVLQPKSPEFCQQFTRAWNRTQVPDETEAPAGTYAAQSGDLPWEINPLSSCSLLHEKDPPTASGPQTTSPRNISPILNRVSEVSDHAGTPALVLHP

SEQ ID NO: 50746 - protein, 369 aa, Homo sapiens
  misc_feature (1)...(369): Xaa = X or * as defined in Table 2
MWESLELPGNIFNGFDQNADNDMDDEIQAEVISDGDEEFVGNWNKPRDLVPCILATLALTKRGQDTAQTMASEGARPKHWQLPGGVGPVGAQKSRIEVWEPLPIFRRMYGKACMSRQKFAAGAGFSWYVPVAVVGAKVHDVNLHMLSFPSKWKLHTCMKFGAVTQIVTSLGRSSCSLLLEKDPPMVLRPTSPRNISPISNLTKETRFIRGPKTPAPVTDWEGSLPLVFNHCRDASLIIHPGFRGVRPRRDACLSPSPLANLINLTFKVYNNRKKLQFLAFTVRQTSAMSPAHKNFQTPEPQRPGIPPEPPPPGACYKCHEIRPPGQGMPAAQDSSXATSLSVRDPTGNWTVQLTWHPLPEPLELWPKAL

SEQ ID NO: 50747 - protein, 57 aa, Homo sapiens
  misc_feature (1)...(57): Xaa = X or * as defined in Table 2
TAAARHSSRTSSPRSLLQVLEIWPSGQGMPAAWDSSXAASHLWQPLPEPLELWPKAL

SEQ ID NO: 50748 - protein, 8 aa, Homo sapiens
MRMKFGLD

SEQ ID NO: 50749 - protein, 126 aa, Homo sapiens
RSKYPNLVSLCPSPLFPRPDLLSLWPNPLFLHPNLLYLCAPIPYFHAPTSYLCTPTPYFHDPTPFPLFWKELATSARNLATRPRNACSPGFLLSCVPSVRDPTGNRTVQLTWQPLPEPLELWPKAL

SEQ ID NO: 50750 - protein, 168 aa, Homo sapiens
  misc_feature (1)...(168): Xaa = X or * as defined in Table 2
TKETRFIRGPKTPAPVTDWEGSLPLVFNHCRDASLIIHPGFRGVRPRRDACLSPSPLANLINLTFKVYNNRKKLQFLAFTVRQTSAMSPAHKNFQTPEPQRPGIPPEPPPPGACYKCHEIRPPGQGMPAAQDSSXATSLSVRDPTGNWTVQLTWHPLPEPLELWPKAL

SEQ ID NO: 50751 - protein, 63 aa, Homo sapiens
LRSADLPWEINPLSSCSLLHEKDPPTSSGPQTTSPRNISPILNPEKKETRFIRGPKTPAPVMD

SEQ ID NO: 50752 - protein, 53 aa, Homo sapiens
  misc_feature (1)...(53): Xaa = X or * as defined in Table 2
WSXQPXGLGSHRHHRRRHHRSSSSSSSSSSSSSKSNSDWQPLPEPLELWPKAL

SEQ ID NO: 50753 - protein, 43 aa, Homo sapiens
PPREHPLCSGLLHFSHAAVLILRKVPELWQPLPEPLELWPKAL

SEQ ID NO: 50754 - protein, 51 aa, Homo sapiens
WLPVSLSHHKSPHTTYQETNMEILHAAKYICFNYAFWQPLPEPLELWPKAL

SEQ ID NO: 50755 - protein, 49 aa, Homo sapiens
  misc_feature (1)...(49): Xaa = X or * as defined in Table 2
DLIFHQRHSVSAESLTMHGLNNXQTSAKRVVQGTWQPLPEPLELWPKAL

SEQ ID NO: 50756 - protein, 21 aa, Homo sapiens
WQVPLFWQPFPEPLELWPKAL

SEQ ID NO: 50757 - protein, 294 aa, Homo sapiens
LRSGDLPWEINPLSSCSLLREKDPPTTSGPQTTSPRNISPISNPRPKETRFIRGPKTPAPVTDWEGSLPLVFNHSRDTSLIIHPGFRGVRPRRDACLGPSPLAASPTFLGKGPAAPRQTELGPNSSSASAPPPYNPFIASPPHTWSGLQFPSMTSPPPPAQQFTLKKVAGAKGIVKDLINLTFKVYNNRKKLQFLASTVRQTPATSPAHKNFQTPELQQPGVPPEPPPRGACYKFQKSGHRAKECLQPRIPPKPHPICVGPHWKSDCPTHLAATPRAPGTLAQGSLTPSQIFSA

SEQ ID NO: 50758 - protein, 336 aa, Homo sapiens
CSEYEDSSPAPVPATDLSSTLSSSVPQPQDTGTSQQLHPLDPWHELLRAQELQGATNHKGYSHAEHEHAGLGVQGGNGALAFSNSGHRHAVPTISSGTGRRRTPSSSAFGLLNLHQWFVSGFQAFSDRLKAALSASLLLRFGDSDWLPSSSACKCLMLGLHFVIVGNICATLKEKYSSMLHLDVTMKKNGEKRTRLQKRKKGMPPHPAYEDLNIAAITLPANVVLHQPSGFRTSGQLDPVWWSLDTDAHEIWCQDPGLGSGDFPWEITPLSSYSLLHEKDPPTTSGPQTTSPRNISPISNPRQRRQVLSMDPKLRHRSRTGKAAFPWCLIIAGTPL

SEQ ID NO: 50759 - protein, 178 aa, Homo sapiens
  misc_feature (1)...(178): Xaa = X or * as defined in Table 2
IVDDCGGAFTMGVIGGGVFQAIKGFRNAPVCRLLSEAPLFIYSCSRSVSPTVNVSSERAESRPTLFMAVSLHMAWCLAHIGIRHRLRGSANAVRIRAPQIGGSFAVWGGLFSTIDCGLVRLRGKEDPWNSITSGALTGAVLAARSAPLAMVGSAMMGGILLALIEGVSILLTRXTATV

SEQ ID NO: 50760 - protein, 254 aa, Homo sapiens
  misc_feature (1)...(254): Xaa = X or * as defined in Table 2
GEQRAALPPAPKECTHPNVTNTLVQAESSDAGVRLRWGRGLTARPDASAMEEYAREPCPWRIVDDCGGAFTMGVIGGGVFQAIKGFRNAPVGIRHRLRGSANAVRIRAPSTTGSFAVWGGLFSTIDCGLVRLRGKEDPWNSITSGALTGAVLAAPSGPLAMGGLQQXWGGILSAPHLRAFGILLTRXTAQQFRKWAPNSLEDPSQLPPKDVTPAPGYPSYQQYHLRKPLATMGATSSVPFPDGSTLKGRAGFPG

SEQ ID NO: 50761 - protein, 77 aa, Homo sapiens
  misc_feature (1)...(77): Xaa = X or * as defined in Table 2
LRWRVWSLSLLMFRCVRSFFLLVGSWSRWFRSEAADLCGECYSSXGSTSGVVRFSRWACGLAGLRSEAADLAPPTSC

SEQ ID NO: 50762 - protein, 58 aa, Homo sapiens
MVCFDGADCPWVVDGTGRRGAGGGAHRRGSGRTGAREAGGRLRHGGLQVPSPARREGS

SEQ ID NO: 50763 - protein, 696 aa, Homo sapiens
  misc_feature (1)...(696): Xaa = X or * as defined in Table 2
MNMNIKKIVKQATVLTFTTALLAGGATQAFAKENNQKAYKETYGVSHITRHDMLQIPKQQQNEKYQVPQFDQSTIKNIESAKGLDVWDSWPQQNADGTVAEYNGYHVVFALAGSPKDADDTSIYMFYQKVGDNSIDSWKNAGRVFKDSDKFDANDPILKDQTQEWSGSATFTSDGKIRLFYTDYSGSLLRSQMPCADLSILKEAAETLDSTSTRNSAFLGNTHDEAPIVHVFIPSLAYSTNIWSLIFNPTTMIMMCSRDWLSSCENKRVDLAFGLVYSGTPVQKLEQMKFSPQLGCNHFESKDRNDFLFAPEEIEKDPQGESLLCDFMTKTPKAMATKAKIDKWDLIKLKSFCTAKETTIRVNKQPTEWEKNFAIYPYDKGLISRIYKELKQIYEKKIKQPHQKVDERRLLNLTTDRLTGEKAYRFIKVQVLRVTQGMKIQRRARSKELQGDGDEIQRWKRLHSPPRLLGEEPHRIIFKLDSANDMHKSAPFSSLQSPLWHQPVMQEVERQYKEKKDLVREGGKCRCQGRPGKVVLTELSLEARGGWMEDIPSRRTSKCGPWELVSHCVQNWWVLGLTDFKNEASDPRGVKLQTFTVSVTALKAARLELLVLPGGLVVSLASGVKLQTFAVSVTAHKRSVDPKTEGAGSGLGQPRKGLSQCSSGPKGXYPESTKNLNKFTRKKSNNPIKRLMKGVC

SEQ ID NO: 50764 - protein, 176 aa, Homo sapiens
MGKVLEVWIDDQSGNNIPPPRRAPPPAPRHPVPSTTQGAEECQRTGWDWQAAPPAALVRDPVGEASWAPESGWDVESLYVELRYCKHTNQHPVFSSRFVSAPIETLYLAALVGPWRTFMSSSGIVNTPISTLCLAQDVHEAPYQRDMELYFQNFSECPLGSQLIELRNGTCSLPMR

SEQ ID NO: 50765 - protein, 141 aa, Homo sapiens
  misc_feature (1)...(141): Xaa = X or * as defined in Table 2
GALQPTAALWEPLSGLAKARAGTLSLQGSVEGVAXAGTGAACGACGPDGVPGGRGLGGPRTGSSRPALSHFITEEDKDQRVQDQLGGVWHRMEIHEQHVGKQQEEGDVEDHIPGEDHEGGGEERHIVPKQLLVLVDRFLPK

SEQ ID NO: 50766 - protein, 532 aa, Homo sapiens
  DOMAIN (419)..(466): kw TRANSCRIPTASE REVERSE II ORF2 domain identified by eMATRIX, accession number DM01354V, p-value=1.000e-40, raw score of 12.97
  DOMAIN (195)..(432): Reverse transcriptase domain identified by PFam, accession name rvt, E-value=0.0047, PFam score of -26.3
MPEPPTHSMGSCAARASPMSTTPCSTAPSPIDHPRAEECERTAQDWQAAPPAAPVWDPLGEASWAPESGTNISITPGNATFVTRVQGQAWFASCITGHDMSSLKTSSVVVLRRQSEALLPANLTCNWQDSSALATLESALSQVRHKRFTFTLMVFTGSAIVIMATVSIAVVSITESVQTTAFVDNLAKNICDELLLQDMDEAGNQHSQQNNTRTENQTPHVLTHKWELNNENIRIQGGEHYILGPVGGRLPTSKLAVDCQLLLLAAAQHALCWCQNTLPPNPANFWNCPRGFPTLASELAYVSPNLALVIQLSQRKKFELFWGGLQRTIFFPFSVLRILTVDEQANDVSVAAARTLQIFRDDMIVYLENPIVSAQNLLKLISNFSKISGYKINVQKSQAFLYTNNRQTESQIMSELPFTTASKRIKYLGIQLTRDVKDLFKENYKSLLKEIKEDTNKWKNIPCSWVGKINIVKMAILPKVIYRFSAIPIKLPMTFFTELEKNNFKFHMEPKKSPHCQVNPKSKEQSWRHHTT

SEQ ID NO: 50767 - protein, 380 aa, Homo sapiens
  DOMAIN (294)..(332): Receptor tyrosine kinase class III proteins domain identified by eMATRIX, accession number BL00240E, p-value=2.456e-22, raw score of 11.56
  DOMAIN (294)..(343): Eukaryotic protein kinase domain identified by PFam, accession name pkinase, E-value=2.9e-15, PFam score of 59.0
VAPPALCLISRRALAAFPRGRAQDLQPVMPEPLPNPHRGLPRGPSLPDEHHPPTPRHPVPSTTQGLRSAGARHQDWFVNAPISTLSKRTNQLSVKRTSQLSVKWTNQQDVGVKLQSFTVSVTAVKAARLELFVPPGGFVVSLVSGVKLQTFPVRVTAHKGSVDPKSEQQQDLLQRAKEQSLHSMEGDGPGCHCWLGQPAFILLSGPTHILLIGPFYREPSAEGASSGLGHPRKGLPQCSGGLKVSSSAAKVGAQAEEAPRASDGYEDGQHAVTSQCHSMDECADDTGSKIHLTQQVDMAAQVASGMAYLESRNYIHRDLAARNVLVGEHNIYKVADFGLARVFKVWHQSLRTLGYDYLPFYNGKLAALTEQIDREGNRAG

SEQ ID NO: 50768 - protein, 301 aa, Homo sapiens
  DOMAIN (268)..(295): Cu-Zn-SUPEROXIDE DISMUTASE FAMILy SIGNATURE domain identified by eMATRIX, accession number PR00068D, p-value=1.225e-09, raw score of 12.35
  misc_feature (1)...(301): Xaa = X or * as defined in Table 2
MNNLRRAALRAVTLTAKVCSFTPEPARPQTHQKEETPNTSEHQKEQTPDTPPLRTVTLTARVHGFILEVSETKNPPIPDTPATREAEGLRSRLAVYSTRDSPCVACSGSYTQAQGSLGRKFQDPVSLFEDLTKNTPEPNLRPITSKPVLVQETLSNFALFLKESNGPVKVWGSHIKGLTXKALHGFHVHEFGDNTARLYQVQGPHFNPLSQKTTVGPKDEESHCXDLGQCDCLTKNGVADVSIXRFCESHSSGDHCIIGRTLVVPWKKPDDFGQRVGNEESSKTGNAGKSVWPCGVNWIAQ

SEQ ID NO: 50769 - protein, 118 aa, Homo sapiens
  DOMAIN (1)..(98): Laminin G domain identified by PFam, accession name laminin_G, E-value=1.1e-10, PFam score of 41.7
MLYVGGLPINYTTRRIGPVTYSIDGCVRNLHMAEAPADLEQPTSSFHVGTCFANAQRGTYFDGTGFAKAVGGFKVGLDLLVEFEFRTTTTTGVLLGISSQLIKISVTPGRVCQNKYIK

SEQ ID NO: 50770 - protein, 55 aa, Homo sapiens
MLGHVLQMLRRGTYFDGTGFAKAVRGFKVGLDLLVEFEFRTTTTTGFFWGSRAFV

SEQ ID NO: 50771 - protein, 161 aa, Homo sapiens
  DOMAIN (130)..(161): Laminin G domain identified by PFam, accession name laminin_G, E-value=9.2e-05, PFam score of 21.0
  misc_feature (1)...(161): Xaa = X or * as defined in Table 2
VTETWKCAGIPHRYRSFESCIWNPVINSDRMDYAGPVCFKNADIGRCAHEKLREDXDGAAPGEIGIQPEADATPYFATPTPVLTHGPCAAESEPALLIGSKQFGLSRNSHIAIAFDDTKVKNRLTIELEVRTEAEFRLLFYMARINHADFATVQLRNGLPY

SEQ ID NO: 50772 - protein, 153 aa, Homo sapiens
MAEAPADLEQPTSSFHVGTCFANAQRGTYFDGTGFAKAVGHLMHIASALCRRGVFRYYRDVTSGDFRRFSPRRRPISPKKADILDVVGMLYVVADADATVKNLEQEADRLIDKLKPIKELEDNLKKNISEIKELINQARKQANSVSSFYRQYQ

SEQ ID NO: 50773 - protein, 3150 aa, Homo sapiens
  DOMAIN (737)..(744): EGF-like domain proteins domain identified by eMATRIX, accession number BL00022B, p-value=7.750e-10, raw score of 7.54
  DOMAIN (2196)..(2955): Laminin G domain identified by PFam, accession name laminin_G, E-value=1.2e-186, PFam score of 633.4
  misc_feature (1)...(3150): Xaa = X or * as defined in Table 2
SDSSGSREVDPVAATTMPGAAGVLLLLLLSGGLGGVQAQRPQQQRQSQAHQQRGLFPAVLNLASNALITTNATCGEKGPEMYCKLVEHVPGQPVRNPQCRICNQNSSNPNQRHPITNAIDGKNTWWQSPSIKNGIEYHYVTITLDLQQVFQIAYVIVKAANSPRPGNWILERSLDDVEYKAWQXHAVTDTEALTPXPNXSPELGHRQNAQDXEVICTSFYSKIHPLENGEIHISLINGRPSADDPSPELLEFTSARYIRLRFQRIRTLNADLMMFAHKDPREIDPIVTRRYYYSVKDISVGGMCICYGHARACPLDPATNKSRCECEHNTCGDSCDQCCPGFHQKPWRAGTFLTKTECEACNCHGKAEECYYDENVARRNLSLNIRGKYIGGGVCINCTQNTAGINCETCTDGFFRPKGVSPNYPRPCQPCHCDPIGSLNEVCVKDEKHARRGLAPGSCHCKTGFGGVSCDRCARGYTGYPDCKACNCSGLGSKNEDPCFGPCICKENVEGGDCSRCKSGFFNLQEDNWKGCDECFCSGVSNRCQSSYWTYGKIQDMSGWYLTDLPGRIRVAPQQDDLDSPQQISISNAEARQALPHSYYWSAPAPYLGNKLPAVGGQLTFTISYDLEEEEEDTERVLQLMIILEGNDLSISTAQDEVYLHPSEEHTNVLLLKEESFTIHGTHFPVRRKEFMTVLANLKRVLLQITYSFGMDAIFRLSSVNLESAVSYPTDGSIAAAVEVCQCPPGYTGSSCESCWPRHRRVNGTIFGGICEPCQCFGHAESCDDVTGECLNCKDHTGGPYCDKCLPGFYGEPTKGTSEDCQPCACPLNIPSNNFSPTCHLDRSLGLICDGCPVGYTGPRCERCAEGYFGQPSVPGGSCQPCQCNDNLDFSIPGSCDSLSGSCLICKPGTTGRYCELCADGYFGDAVDAKNCQPCRCNAGGSFSEVCHSQTGQCECRANVQGQRCDKCKAGTFGLQSARGCVPCNCNSFGSKSFDCEESGQCWCQPGVTGKKCDRCAHGYFNFQEGGCTACECSHLGNNCDPKTGRCICPPNTIGEKCSKCAPNTWGHSITTGCKACNCSTVGSLDFQCNVNTGQCNCHPKFSGAKCTECSRGHWNYPRCNLCDCFLPGTDATTCDSETKKCSCSDQTGQCTCKVNVEGIHCDRCRPGKFGLDAKNPLGCSSCYCFGTTTQCSEAKGLIRTWVTLKAEQTILPLVDEALQHTTTKGIVFQHPEIVAHMDLMREDLHLEPFYWKLPEQFEGKKLMAYGGKLKYAIYFEAREETGFSTYIPQVIIRGGTPTHARIIVRHMAAPLIGQLTRHEIEMTEKEWKYYGDDPRVHRTVTREDFLDILYDIHYILIKATYGNFMRQSRISEISMEVAEQGRGTTMTPPADLIEKCDCPLGYSGLSCEACLPGFYRLRSQPGGRTPGPTLGTCVPCQCNGHSSLCDPETSICQNCQHHTAGDFCERCALGYYGIVKGLPNDCQQCACPLISSSNNFSPSCVAEGLDDYRCTACPRGYEGQYCERCAPGYTGSPGNPGGSCQECECDPYGSLPVPCDPVTGFCTCRPGATGRKCDGCKHWHAREGWECVFCGDECTGLLLGDLARLEQMVMSINLTGPLPAPYKMLYGLENMTQELKHLLSPQRAPERLIQLAEGNLNTLVTEMNELLTRATKVTADGEQTGQDAERTNTRAKSLGEFIKELARDAEAVNEKAIKLNETLGTRDEAFERNLEGLQKEIDQMIKELRRKNLETQKEIAEDELVAAEALLKKVKKLFGESRGENEEMEKDLREKLADYKNKVDDAWDLLREATDKIREANRLFAVNQKNMTALEKKKEAVESGKRQIENTLKEGNDILDEANRLADEINSIIDYVEDIQTKLPPMSEELNDKIDDLSQEIKDRKLAEKVSQAESHAAQLNDSSAVLDGILDEAKNISFNATAAFKAYSNIKDYIDEAEKVAKEAKDLAHEATKLATGPRGLLKEDAKGCLQKSFRILNEAKKLANDVKENEDHLNGLKTRIENADARNGDLLRTLNDTLGKLSAIPNDTAAKLQAVKDKARQANDTAKDVLAQITELHQNLDGLKKNYNKLADSVAKTNAVVKDPSKNKIIADADATVKNLEQEADRLIDKLKPIKELEDNLKKNISEIKELINQARKQANSIKVSVSSGGDCIRTYKPEIKKGSYNNIVVNVKTAVADNLLFYLGSAKFIDFLAIEMRKGKVSFLWDVGSGVGRVEYPDLTIDDSYWYRIVASRTGRNGTISVRALDGPKASIVPSTHHSTSPPGYTILDVDANAMLFVGGLTGKLKKADAVRVITFTGCMGETYFDNKPIGLWNFREKEGDCKGCTVSPQVEDSEGTIQFDGEGYAIGQARPIRWYPNISTVMFKFRTFSSSALLMYLATRDLRDFMSVELTDGHIKVSYDLGSGMASVVSNQNHNDGKWKSFTLSRIQKQANISIVDIDTNQEENIATSSSGNNFGLDLKADDKIYFGGLPTLRNLSMKARPEVNLKKYSGCLKDIEISRTPYNILSSPDYVGVTKGCSLENVYTVSFPKPGFVELSPVPIDVGTEINLSFSTKNESGIILLGSGGTPAPPRRKRRQTGQAYYVILLNRGRLEVHLSTGARTMRKIVIRPEPNLFHDGRERSVHVERTRGIFTVQVDENRRYMQNLTVEQPIEVKKLFVGGAPPEFQPSPLRNIPPFEGCIWNLVINSVPMDFARPVSFKNADIGRCAHQKLREDEDGAAPAEIVIQPEPVPTPAFPTPTPVLTHGPCAAESEPALLIGSKQFGLSRNSHIAIAFDDTKVKNRLTIELEVRTEAESGLLFYMARINHADFATVQLRNGLPYFSYDLGSWDTHTPMIPTKINDGQWHKIKIMRSKQEGILYVDGALSNRTISPKKADILDVVRGMLYVGGLPINYTTRRIGPVTYSIDGCVRNLHMAEAPADLEQPTSSFHVGTCFANAQRGTYFDGNPVLPKQVCGFKVGIDLLVEFEFRTTTTTGVFFGDQXSKKWEGMGYXKLLIKKLMFYGPNGAGQDSTACPMMPGVPGHLCDGQWAXNPLPHKIKHRIEPHSAMGNQGRKPQSPKPQHPTSADHQLPLCFVGRASPDDRKKQFGLTTSIPFRGCIRSLKLTKGTWQSHWRLILPRPXNMWRKRT

SEQ ID NO: 50774 - protein, 148 aa, Homo sapiens
GQLVMPLDARPERPMDGMKVRAFMERLLFVRRGTDKRWSVRMYVTCSQSSNLNEEIYINQVVIQANMKLQLWAMRTDDARGLSSLGDTERKGPGLFGERLQRLEGDVQRLAKTYGTISGLVTSHEDPNRMTGGPRVPAVPVGFAFILE

SEQ ID NO: 50775 - protein, 921 aa, Homo sapiens
  DOMAIN (540)..(576): Synapsins proteins domain identified by eMATRIX, accession number BL00415Q, p-value=9.331e-09, raw score of 2.23
  misc_feature (1)...(921): Xaa = X or * as defined in Table 2
MGRRRLLVWLCAVAALLSGAQARGTPPWRGLRLPGASRYSLYTTGWRPRLRPGPHKALCAYVVHRNVTCILQEGAESYVKAEYRQCRWGPKCPGTVTYRTVLRPKYKVGYKTVTDLAWRCCPGFTGKRCPEHLTDHGAASPQLEPEPQIPSGQLDPGPRPPSYSRAAPSPHGRKGPGLFGERLERLEGDVQRLAQTYGTLSGLVASHEDPNRMTGGPRAPAVPVGFGVIPEGLVGPGDRARGPLTPPLDEILSKVTEVSNTLQTKVQLLDKVHGLALGHEGPPAAAAGSPTIPAHLPGPAEEYVDRRLHRLWGSLLDGFEQKLQGVQSECDLRVQEVRRQCEEGQAASRRLHQSLDGRELALRQELSQLGSQLQGLSVSGRGSCCGQLALINARMDGLERALQAVTETQRGPGAPAGDELTRLSAAMLEGGVDGLLEGLETLNGTEGGARGCCLRLDMGGWGVGGFGTMLEERVQSLEERLATLAGELSHDSASPGRSARPLVQTELAVLEQRLVSLETSCTPSTTSAILDSARGRGEGLAEPERGPPTPGGQPRSTAPAAQWHCGRGPGTAGKGTGSSPEGEITLLKVNLNSVSKSLTGLSDSVSPYLXAFLAANTSLDERERKVEAEVQAIQEQVSSQGSRLQAGHRQVLNLRGELEQLKAGVAKVASGLSRCQDTAQKLQHTVGHFDQRVAQVEGACRRLGLLAAGLDSLPTEPLRPREGLWSHVDQLNRTLAQHTQDIARLLGXPTGLPGPAGXAEPSLIQQRLPAFPGXPKWHXGGHXGNPPRGCPSHQNPCTVLQKLDSSGQRSRQGCHAXRPGXTXESSHSTVSKSVSGQPAAGPEHGWQGQLLWQTGLDQCPYVKALRGPCRQSAPASATVQRPTGPQPVASSALPCAHKQQSTALGGFCSLSPRLLFRSHQD

SEQ ID NO: 50776 - protein, 119 aa, Homo sapiens
RFTKVEMKEKMLSAAREKGRVTHKGKPISLKADLSAETLQARREWGPIFNILKEKNFQPRISYPAKLSFISEQEIKYFTDKQMLRDFVITRPALKELLKEALNMERNNWYQPLQKHAKL

SEQ ID NO: 50777 - protein, 522 aa, Homo sapiens; identical to SEQ ID NO: 47047

SEQ ID NO: 50778 - protein, 532 aa, Homo sapiens
  misc_feature (1)...(532): Xaa = X or * as defined in Table 2
MAILFEMRLGQQSSAKFPGFQSSFFPVIPVNKPSGKFKRDRAHFSSTRLLWPDCQISQLWGGYLRKKGSSPSQGLIDKTPSPWKKAPRERGGCGRSFSRFKHPCLTALKRAADLPAQHSSSAKDTSQKGPTDTSYRRALAGIWQVPPLGRSFQKKDQAAIFAVVQPLQVIPRQTGSGVDLQQTSADWQQRGLTVRRKTNKQKGIACSLKDPIRGHQHQRPKDHNFSPAREQNWTENEFDKLTEVGFRRWVITNSSELKKHVLTQCKDAKNLERSLEELLTRIPSVEKNINDLMELKNTARELREAYTSFNSPIDQAEERISVIEDQFNKINREDKIREKRIKRNKQSLQEIWDYVKRPNLQLIGVPESDKENGTKLENTLQNIIQENFPNLAREANIQIQEIQRTPQRYSLRRATPRHIISVRFTKVEMKEKMLKAVREKGRVTHKGKPIRLTTADLSAETLQARRQSGGQYFNILXRKGIFQPRISYPAKLSFISEGEIKYFIDKQMLRDFVTTRDWPALKEHQACPKRAP

SEQ ID NO: 50779 - protein, 339 aa, Homo sapiens
  DOMAIN (110)..(266): Proteasome activator pa28 beta subunit domain identified by PFam, accession name PA28_beta, E-value=1.1e-18, PFam score of 75.6
  misc_feature (1)...(339): Xaa = X or * as defined in Table 2
SSMAKPCGVRLSGEARKQVEVFRQNLFQEAEEFLLRFLPQKIIYLNPASFQEDFPFNVAXLLNLSSGAPLGHPPIPRPLHPKDDEMETDKAGRRKEVPXSVGFFPWGNXGKFLSLVCPGLKPEVWDFSKRNCILGDLHWIQTPDSPRFEDGNDFGGSQSRKKVLEKGXMPVKTKVEAFQTTISKYFSSERGDACGPRPPKETHVMDYRALVHERDEAAYGELRAMVLDLRAFYAEIVKSSGIGAHVSFKVQNIHSSYCSGPTVSPTCVTGLPASQSPDSGAQLASSSGSHTCAAGGAACQSRALRLHSSALGWSMGLGTVEQGAALIEEVQAAQEPTEG

SEQ ID NO: 50780 - protein, 101 aa, Homo sapiens
  DOMAIN (64)..(80): CYCLOPHILIN PEPTIDYL-PROLYL CIS-TRANS ISOMERASE SIGNATURE domain identified by eMATRIX, accession number PR00153E, p-value= 7.968e-14, raw score of 9.10
  DOMAIN (45)..(99): Cyclophilin type peptidyl-prolyl cis-tr domain identified by PFam, accession name pro_isomerase, E-value=7.1e-15, PFam score of 54.9
KEGCELCRCCCRPGPPASSHGQPHHVFPHVLSMASPWAVSPSSVNVSQFFICTCQDAKTEWLDCKHVVFGKVKDGMNIVEVMEHLGSKNGKISNQQEDHHC

SEQ ID NO: 50781 - protein, 163 aa, Homo sapiens
  DOMAIN (45)..(85): Cyclophilin-type peptidyl-prolyl cis-trans isomerase signatur domain identified by eMATRIX, accession number BL00170B, p-value= 5.433e-13, raw score of 20.97
  DOMAIN (19)..(163): Cyclophilin type peptidyl-prolyl cis-tr domain identified by PFam, accession name pro_isomerase, E-value=3.1e-40, PFam score of 141.8
  misc_feature (1)...(163): Xaa = X or * as defined in Table 2
GAWKARSDCSSNPXNYVNRLELFADKVPKTAEKFQALSTGEKGFGYKGSLFHRIIPGFTCQSGDFTRPYSIGGKSHLPGRNLMTRTFILKHTGPGILSMANAGPSVNVSQFFICPAKMPRTEWLDCKHVVFGKVKDGMNIVEVMEHLGSKNGKISNQQEDHHC

SEQ ID NO: 50782 - protein, 430 aa, Homo sapiens
  misc_feature (1)...(430): Xaa = X or * as defined in Table 2
GKPTFASRQQPLAEECPASSALQRRWLWRWRWWLRRRRRQRRSSGSCQGQPAGPLGGPPANRGAAPQGSMAMNYNAKDEVDGGPPCAPGGTAKTRRPDNTAFKQQRLPAWQPILTAGTVLPIFFIIGLIFIPIGIGIFVTSNNIREIEIDYTGTEPSSPCNKCLSPDVTPCFCTINFTLEKSFEGNVFMYYGLSNFYQNHRRYVKSRDDSQLNGDSSALLNPSKECEPYRRNEDKPIAPCGAIANSMFNDTLELFLIGNDSYPIPIALKKKGIAWWTDKNVKFRNPPGGDNLEERFKGTTKPVNWLKPVYMLDSDPDAXWIHKDDFIVWMRTAALPTFRKLNRLIQRKSDLHPTLPAGRYSLNVNAYYPVHYFDARKRMIMSAISWMGGKNPFLGMAYFAVGAISFHLGVALLGINHKYRNSSNTADITI

SEQ ID NO: 50783 - protein, 123 aa, Homo sapiens
EMTRKQPDVDKVTKTYKRRAADPSSLQSHIPVLDKGRAGRKRFPASSLYPSRSQTQIETKNPRVNLLVSKWQQVWLLALERRRKLNDALDRLEEVWKFIPSTPHCHLPSFLITHCHCQNLGIF

SEQ ID NO: 50784 - protein, 367 aa, Homo sapiens
  DOMAIN (35)..(48): EF-hand calcium-binding domain proteins domain identified by eMATRIX, accession number BL00018, p-value=3.250e-10, raw score of 7.41
  DOMAIN (101)..(173): Growth-Arrest-Specific Protein 2 Domain domain identified by PFam, accession name GAS2, E-value=2.8e-54, PFam score of 193.7
LREFANFDFDIWRKKYMRWMNHKKSRVMDFFRRIDKDQDGKITRQEFIDGILSSKFPTSRLEMSAVADIFDRDGDGYIDYYEFVAALHPNKDAYKPITDADKIEDEVTRQVAKCKCAKRFQVEQIGDNKYRFGDSQQLRLVRILRSTVMVRVGGGWMALDEFLVKNDPCRAKGRTNMELREKFILADGASQGMAAFRPRGRRSRPSSRGASPNRSTSVSSQAAQAASPQVPATTTPKGTPIQGSKLRLPGYLSGKGFHSGEDSGLITTAAARVRTQFADSKEGLPSRPGSSSLEAKFGSRASSRRGSDASDFDISEIQSVCSDVETVPQTHRPTPRAGSRPSTAKPSKIPTPQRKSPASKLDKSSKR

SEQ ID NO: 50785 - protein, 441 aa, Homo sapiens
  DOMAIN (21)..(262): Spectrin repeat domain identified by PFam, accession name spectrin, E-value=7.4e-20, PFam score of 77.0
AEQTLNVASRPSLILDTVLFQIDEHKVFANEVNSHREQIIELDKTGTHLKYFSQKQDVVLIKNLLISVQSRWEKVVQRLVERGRSLDDARKRAKQFHEAWSKLMEWLEESEKSLDSELEIANDPDKIKTQLAQHKEFQKSLGAKHSVYDTTNRTGRSLKEKTSLADDNLKLDDMLSELRDKWDTICGKSVERQNKIGGSPCYFLGQFTDALQALIDWLYRVEPQLAEDQPVHGDIDLVMNLIDNHKAFQKELGKRTSSVQALKRSSRYTHRFMHINLSQMPDKIEDEGDKAEGNANTREGKFSDFRGILFRERLPLWGGQWLDNNCSCQSPNTVLLDFQGRFPADREVVLEGKVGQPGPSSRRGSDASDFDISEIQSVCSDVGNCPPGHTGPYTPRQVLGPSTGEAFQKSPTAQREITCQQIGTSPSKEIVAIGSYQGPFL

SEQ ID NO: 50786 - protein, 93 aa, Homo sapiens
EVFIFFLTTSQFTVPPNKLYLTSDHLSHPPCLTQNVNIIINESNSSWPLGKNSIKKQELTRHTHLQSCSLTRQEDNGRTIALQGDGTYLMANE

SEQ ID NO: 50787 - protein, 87 aa, Homo sapiens
  misc_feature (1)...(87): Xaa = X or * as defined in Table 2
HGSGSAPTCRWPRTQGRCREICADGFSGVMRNCTGXEAASGRXCKSFVHVYLQLRCACSVCHSAGSDSFQLQRSPHTPSTCTHALVT

SEQ ID NO: 50788 - protein, 549 aa, Homo sapiens
  DOMAIN (164)..(183): TYPE III EGF-LIKE SIGNATURE domain identified by eMATRIX, accession number PR00011B, p-value=3.438e-16, raw score of 13.08
  DOMAIN (151)..(397): Laminin EGF-like (Domains III and V) domain identified by PFam, accession name laminin_EGF, E-value=7.6e-48, PFam score of 172.4
  misc_feature (1)...(549): Xaa = X or * as defined in Table 2
MQATKTESGRNGKPGQPSNRCHYLLNQGWVANSGKGGRTNIPDKELKSGDDPENVHITSFQYLALAAFPRGRARDLQLAMTEPPHPSVGSCAARASLTSAAPCSTAPSPINHPKAEECGCTARDWQAAPPAARVRDPLGEASWAPESEYVCNCSVVGSLNVNRCNQTTGQCECRPGYQGLHCETCKEGFYLNYTSGLCQPCDCSPHGALSIPCNSSGKCQCKVGVIGSICDRCQDGYYGFSKNGCLPCQCNNRSARCDALTGACLNCHENSKGNHCEECKEGFYHSPDATKECLRCPCSAVTSTGSCSIKSSELEPECDQCEDGYISPNCNKCENGYYNFDSICRKCQCHGHVYLISTPKICKPESGECINCLHNTTGFWCENCLXGYVHDLEGNCIKKEVILPTPEGSTILVSNASLTTSVPTPVINSTFTPTTLXTIFSVSTSENSTSALADVSWTQFNIIILTVIIIGVVLLMGFEGAGYMYRENQNRKLNAPFWTIELKEDNISFSSYHDSIPNADVSGLVEDDGNEVAPNGQMTLTTPIHNYKA

SEQ ID NO: 50789 - protein, 59 aa, Homo sapiens
CKHESGDSSGCIKPPKSPLSPELIQVEDLTLVSQLSSSVINKTSEHRFLKNSYLSYKIH

SEQ ID NO: 50790 - protein, 160 aa, Homo sapiens
MLVRFERWSHRYDEWIYWDSNRLRPSERPALRKEGLKDEEDFFDFKAGEEVLARWTDCRYYPAKIEAINKEGISKTEKKVKLEDKSSTAFGKRKEKDKERREKRDKDHYRPKQKKKKKKKKKSKQHGVHAETGQCLSEIQQMEQAEFGGAADMTAKTPDS

SEQ ID NO: 50791 - protein, 161 aa, Homo sapiens
FSCLKRMHIKAMPEDAKGQDWIALVKAAAAAAAKNKTGSKPRTSANSNKDKDKDERKWFKVPSKKEETSTCIATPDVEKKEDLPTSSETFGLHVENVPKMVFPQPESTLSNKRKNNQGNSFQAKRARLNKITGLLASKAVGVDGAEKKEDYNETAPMLEQV

SEQ ID NO: 50792 - protein, 507 aa, Homo sapiens
  misc_feature (1)...(507): Xaa = X or * as defined in Table 2
LKDEEDFFDFKAGEEVLARWTDCRYYPAKIEAINKEGTFTVQFYDGVIRCLKRMHIKAMPEDAKGQVKSQHPLSWCCPIDPAGSCNQSMGSEDWIALVKAAAAAAAKNKTGSKPRTSANSNKDKDKDERKWFKVPSKKEETFNLLLATPDVERRKEDLPTSSEKHLXGLHVRRNVPKMVFPQPESTLSNKRKNNQGNSFQAKRARLNKITGLLASKAVGVDGAEKKEDYNETAPMLEQAISPKPQSQKKNEADISSSANTQKPALLSSTLSSGKARSKKCKHESGDSSGCIKPPKSPLSPELIQVEDLTLVSQLSSSVINKTSPPQPVNPPRPFKHSERRRRSQRLGTLPMPDDSVEKVSSPLSSPLDEGKVFSLSSSSKISQESSSIPEVPDVAHICPLEKLGPCLPLDLSRGSEVTAPVASDSSYRNECPRAEKEDTQMLPNPSSKAIADGRGAPAAAGISKTEKKVKLEDKSSTAFGIRSWDFSALLMKIPSYSPISLSGLPES

SEQ ID NO: 50793 - protein, 274 aa, Homo sapiens
FHITMCGICCSVNFSAEHFSQDLKEDLLYNLKQRGPNSSKQLLKSDVNYQCLFSAHVLHLRGVLTTQPVEDERGNVFLWNGEIFSGIKVEAEENDTQILFNYLSSCKNESEILSLFSEVQGPWAFIYYQASSHYLWFGRDFFGRRSLLWHFSNLGKSFCLSSVGHPNIWNWQISGKKFQHLDFFRIDLKSTVISRCIILQLYPWKYISRENIIEENVNSLSQISADLPAFVSVGSQMEGQTVSLEKPVVPLNMDVATSWHWETHAVFFPCATYR

SEQ ID NO: 50794 - protein, 410 aa, Homo sapiens
  misc_feature (1)...(410): Xaa = X or * as defined in Table 2
CCHKLHWRLIAVIFPMCHLQERYFKSFLLMYTXKEVIQQFIDVLSVAVKKRVLCLPRDENLDSQMEVLENVXXGKANVGNPVFWGGLDCPWLLATLLDRHIPLDEPLVLLNVAFIAEEKTMPTTFNREGNKQKNKCEIPYPKNFSKDVAAAAADSPNKTCQCPDRITGRAGLKELQAVSPSRIWNFVEINVSMEELQKLRRTRICHLIRPLDTVLDDSIGCAVWFASRGIGWLVAQEGVKSYQSNAKVVLTGIGCRWSNLQGYSPSSVSAFKSHGLGRIGIKEIMMELGRISSLEILGRDDRVIGDHGKEARFPFLGXRMLSPFLNSSARFGEKANLDFTPRGIGEKLPFNALQPVELGLTASALLPKRAMQFGSRIAKMEKINEKASDKCGRLQIMSLENLSIEKGTKL

SEQ ID NO: 50795 - protein, 122 aa, Homo sapiens
  DOMAIN (39)..(122): eIF4-gamma/eIF5/eIF2-epsilon domain identified by PFam, accession name IF5_eIF4_eIF2, E-value=3.1e-22, PFam score of 87.3
  misc_feature (1)...(122): Xaa = X or * as defined in Table 2
XLSKKELSAGELYKRLEKLIIEDKANDEQIFDWVEANLDEIQMSSPTFLRALMTAVCKAAIIDLLRMFFDCLYDEEVISEDAFYKWESSKDPAEQNGKGVALKSVTAFFTWLREAEEESEDN

SEQ ID NO: 50796 - protein, 178 aa, Homo sapiens
MLKFLVWFLQWCVCVLVQPAKELLHCLKMQMRISKYTKCLQAQIAITVPKTWKKPKDRTRTTEEMLEAELELKAEEELSIDKVLESEQDKMSQGFHPERDPSDLKKVKAVEENGEEAEPVRNGAESVSEADSSTFRVDTAVIKQRVPILLKYLDSDTEKELQALYALQASIVKLDQPA

SEQ ID NO: 50797 - protein, 419 aa, Homo sapiens
MAPKTKFFTNANFTLNIGYTPYAWEKPKPDPVLKSPSPVLRLVLSGEKKEQEGQTSETTAIVSIAELPLPPSPTTVSSVARSTIAAPTSSALSSQPIFTTAIDDRCELSSPREDTIPIPSLTSCTETSDPLPTNENDDDICKKPCSVAPNDIPLVSSTNLINEINGVSEKLSATESIVEIVKQEVLPLTLELEILENPPEEMKLECIPAPITPSTVPSFPPTPPTPPASPPHTPVIVPAAATTVSSPSAAITVQRVLEEDESIRTCLSEDAKEIQNKIEVEADGQTEEILDSQNLNSRRSPVPGLTKAEEGNEEEGPNATNKSDFQEVFSLPRSITGITIYGSYRHTECTYEITRLDKSKLLFDLRLLGNKKAQEEGGREMEELPVGGAVRTYIFLDQVGRLTWFVVPQNNYNSNIKDH

SEQ ID NO: 50798 - protein, 40 aa, Homo sapiens
INQPKLPMRTLDPRILPRGPDFTPAFADFGRQTPGGRGVP

SEQ ID NO: 50799 - protein, 1756 aa, Homo sapiens
  DOMAIN (49)..(59): TYPE I ANTIFREEZE PROTEIN SIGNATURE domain identified by eMATRIX, accession number PR00308C, p-value=8.013e-09, raw score of 3.83
  DOMAIN (1689)..(1756): eIF4-gamma/eIF5/eIF2-epsilon domain identified by PFam, accession name IF5_eIF4_eIF2, E-value=0.0038, PFam score of 4.4
  misc_feature (1)...(1756): Xaa = X or * as defined in Table 2
KIHRHRLSPATEKGAASSGEGDKDPPPPAHEDIAVKGTATAAGTGPGTGAAAAAAAAAVPPPHPNIRALQTQAPQQIPRGPVQQPLEDRIFTPAVSAVYSTVTQVARQPGTPTPSPYSAHEINKGHPNLAATPPGHASSPGLSQTPYPSGQNAGPTTLVYPQTPQTMNSQPQTRSPFFPKGLKIQPPRATIPNSKSFPFVPGAQTPTAVYQGXFRHIMMVNHLPLPYPVPQGPQYCIPQYRHSGPPYVGPPQQYPVQPPGPGPFYPGPGPGDFPNAYGTPFYPSQPVYQSAPIIVPTQQQPPPAKREKKTIRIRDPNQGGKDITEEIMSGGGSRNPTPPIGRPTSTPTPPQQLPSQVPEHSPVVYGTVESAHLAASTPVTAASDQKQEEKPKPDPVLKSPSPVLRLVLSGEKKEQEGQTSETTAIVSIAELPLPPSPTTVSSVARSTIAAPTSSALSSQPIFTTAIDDRCELSSPREDTIPIPSLTSCTETSDPLPTNENDDDICKKPCSVAPNDIPLVSSTNLINEINGVSEKLSATESIVEIVKQEVLPLTLELEILENPPEEMKLECIPAPITPSTVPSFPPTPPTPPASPPHTPVIVPAAATTVSSPSAAITVQRVLEEDESIRTCLSEDAKEIQNKIEVEADGQTEEILDSQNLNSRRSPVPAXIAITVPKTWKKPIDRTRTTEEMLEAELELKAEEELFIDKVLESEQDKMSQGFHPERDPSDLKKVKAVEENGEEAEPVRNGAESVSEGEGIDANSRSTDSSGDGVTFSFKPQSWKPTDTEGKKQYDREFLLDFQFMPACIQKPEGLPPISDVVLDKINQPKLPMRTLDPRILPRGPDFTPAFADFGRQTPGGRGVPLLNVGSRRSQPGQRREPRKIITVSVKEDVHLKKAENAWKPSQKRDSQADDPENIKTQELFRKVRSILNKLTPQMFNQLMKQVSGLTVDTEERLKGVIDLVFEKAIDEPSFSVRYANMCRCLVTLKVPMADKPGNTVNFRKLLLNRCQKEFEKDKADDDVFEKKQKELEAASAPEEGQGFMMNWKKPRTKPGGDPLGNIKFIGELFKLKMLTEAIMHDCVVKLLKNHDEESLECLCRLLTTIGKDLDFEKAKPRMDQYFNQMEKIVKERKTSSRIRFMLQDVIDLRLCNWVSRRADQGPKTIEQIHKEAKIEEQEEQRKVQQLMTKEKRRPGVQRVDEGGWNTVQGAKNSRVLDPSKFLKITKPTIDEKIQLVPKAQLGSWGKGSSGGAKASETDALRSSASSLNRFSALQPPAPSGSTPSTPVEFDSRRTLTSRGSMGREKNDKPLPSATARPNTFMRGGSSKDLLDNQSQEEQRREMLETVKQLTGGVDVERNSTEAERNKTRESAKPEISAMSAHDKAALSEEELERKSKSIIDEFLHINDFKEAMQCVEELNAQGLLHVFVRVGVESTLERSQITRDHMGQLLYQLVQSEKNFSKQDFFKGFSETLELADDMAIDIPHIWLYLAELVTPMLKEGGISMRELTIEFSKPLLPVGRAGVLLSEILHLLCKQMSHKKVGALWREADLSWKDFLPEGEDVHNFLLEQKLDFIESDSPCSSEALSKKELSAEELYKRLEKLIIEDKANDEQIFDWVEANLDEFRMSSPPSLRALMTAVCKAAIIADSSTFRVDTAVIKQRVPIYLKYLDSDTEKELQALYALQASIVKLDQPANLLRMFFDGLYDEEVISEGCLLQWGVQASGPPQSRNGKGRGLXNPVTAFFTVACGKQKEES

SEQ ID NO: 50800 - protein, 26 aa, Homo sapiens
EKTKANIKWVKENKEVVLQWFTENSK

SEQ ID NO: 50801 - protein, 935 aa, Homo sapiens
  DOMAIN (379)..(395): MEMBRANE ALANYL DIPEPTIDASE (M1) FAMILY SIGNATURE domain identified by eMATRIX, accession number PR00756D, p-value=1.529e- 21, raw score of 10.58
  DOMAIN (76)..(475): Peptidase family M1 domain identified by PFam, accession name Peptidase_M1, E-value=3.5e-245, PFam score of 710.9
MAKGFYISKSLGILGILLGVAAVCTIIALSVVYSQEKNKNANSSPVASTTPSASATTNPASATTLDQSKAWNRYRLPNTLKPDSYRVTLRPYLTPNDRGLYVFKGSSTVRFTCKEATDVIIIHSKKLNYTLSQGHRVVLRPPDIDKTELVEPTEYLVVHLKGSLVKDSQYEMDSEFEGELADDLAGFYRSEYMEGNVRKVVATTQMQAADARKSFPCFDEPAMKAEFNITLIHPKDLTALSNMLPKGPSTPLPEDPNWNVTEFHTTPKMSTYLLAFIVSEFDYVEKQASNGVLIRIWARPSAIAAGHGDYALNVTGPILNFFAGHYDTPYPLPKSDQIGLPDFNAGAMENWGLVTYRENSLLFDPLSSSSSNKERVVTVIAHELAHQWFGNLVTIEWWNDLWLNEGFASYVEYLGADYAEPTWNLKDLMVLNDVYRVMAVDALASSHPLSTPASEINTPAQISELFDAISYSKGASVLRMLSSFLSEDVFKQGLAAVNNRSIQLPTTVRDIMNRWTLQMGFPVITVDTSTGTLSQEHFLLDPDSNVTRPSEFNYVWIVPITSIRDGRQQQDYWLIDVRAQNDLFSTSGNEWVLLNLNVTGYYRVNYDEENWRKIQTQLQRDHSAIPVINRAQIINDAFNLASAHKVPVTLALNNTLFLIEERQYMPWEAALSSLSYFKLMFDRSEVYGPMKNYLKKQVTPLFIHFRNNTNNWREIPENLMDQYSEVNAISTACSNGVPECEEMVSGLFKQWMENPNNNPIHPNLRSTVYCNAIAQGGEEEWDFAWEQFRNATLVNEADKLRAALACSKELWILNRYLSYTLNPDLIRKQDATSTIISITNNVIGQGLVWDFVQSNWKKLFNDYGGGSFSFSNLIQAVTRRFSTEYELQQGWTPAAALTIITLPIAEGHTTVMRGISSHFPSSRAPRADLDYPVLL

SEQ ID NO: 50802 - protein, 79 aa, Homo sapiens
GASVLRMLSSFLSEDVFKQGLAAVNNRSIQLPTTVRDIMNRWTLQMGFPVITVDTSTGTLSQEHFLLDPDSNVTRPSEF

SEQ ID NO: 50803 - protein, 218 aa, Homo sapiens
  DOMAIN (58)..(74): MEMBRANE ALANYL DIPEPTIDASE (M1) FAMILY SIGNATURE domain identified by eMATRIX, accession number PR00756B, p-value=7.750e- 19, raw score of 14.06
  DOMAIN (1)..(89): Peptidase family M1 domain identified by PFam, accession name Peptidase_M1, E-value=6.1e-50, PFam score of 145.1
MQAADARKSFPCFDEPAMKAEFNITLIHPKDLTALSNMLPKGPSTPLPEDPNWNVTEFHTTPKMSTYLLAFIVSEFDYVEKQASNGVLIPKQQQNEKYQVPQFDQSTIKNIESAKGLDVWDSWPLQNADGTVAEYNGYHVVFALAGSPKDADDTSIYMFYQKVGDNSIDSWKNAGRVFKDSDKFDANDPILKDQTQEWSGSATFTSDGKIRLFYTDYP

SEQ ID NO: 50804 - protein, 1001 aa, Homo sapiens
  DOMAIN (397)..(413): MEMBRANE ALANYL DIPEPTIDASE (M1) FAMILY SIGNATURE domain identified by eMATRIX, accession number PR00756D, p-value=1.529e- 21, raw score of 10.58
  DOMAIN (86)..(496): Peptidase family M1 domain identified by PFam, accession name Peptidase_M1, E-value=3.9e-229, PFam score of 664.4
  misc_feature (1)...(1001): Xaa = X or * as defined in Table 2
GSLSRLPTITMAKGFYISKSLGILGILLGVAAVCTIIALSVVYSQEKNKNANSSPVASTTPSASATTNPASATTLDQSKAWNRYRLPNTLKPDSYQVTLRPYLTPNDRGLYVFKGSSTVRFTCKEATDVIIIHSKKLNFPLSQGHRVVLRGVGGSQPPDIDKTELVEPTEYLVVHLKGSLVKDSQYEMDSEFEGELADDLAGFYRSEYMEGNVRKVVATTQMQAADARKSFPCFDEPAMKARFNITLIPPQGTLTALSNIGFPKVPSTPLPEDPNWNVTEFHTTPKMSTYLLAFIVSEFDYVEKQASNGVLIRIWARPSAIAAGHGDYALNVTGPILNFFAGHYDTPYPLPKSDQIGLPDFNAGAMENWGLVTYRENSLLFDPLSSSSSNKERVVTVIAHELAHQWFGNLVTIEWWNDLWLNEGFASYVEYLGADYAEPTWNLKDLMVLNDVYRVMAVDALASSHPLSTPASEINTPAQISELFDAISYSKGASVLRMLSSFLSEDVFKQGLWASXLPQLLAYQNTIYLNLWDHLQEAVNNRSIQLPTTVRDIMNRWTLQMGFPVITVDTSTGTLSQEHFLLDPDSNVTRPSEFNYVWIVPITSIRDGRQQQDYWLMDVRAQNDLFSTSGNEWVLLNLKVTGYYRVNYDEXNWRKIQTQLQRRPTRPIPVINRAQIINDAFNLASAHXGPCSLLGAGTTPSFLDLKEETVTCPGEAALSSLSYFKLVVPLDRSEVYGPMKNYLKKQVTPLFIHFRNNTTTWEGRSQENLDGTSYSEVNAISTACSNGFPECEEMVSGPFSRQWDGRNPNNNPIHPNLRSTVYCNAIAQGGEEEWDFAWEQFRNATLVNEADKFRAALAACSKELWITXTGYLSYTLNPDFIPGRQDATSTIISITNNVIGQGLVWDFVTSNWKKLFNDYGGGSSPFSTLIQAVTRRFSTEYELQQLEQFKKGNEETGFGSGTRAPEQSPGRRPKANLIQAVTRRFSTEYELQQWFTEKTAK

SEQ ID NO: 50805 - protein, 142 aa, Homo sapiens
  DOMAIN (15)..(32): GLYCERALDEHYDE-3-PHOSPHATE DEHYDROGENASE SIGNATURE domain identified by eMATRIX, accession number PR00078C, p-value=6.250e- 16, raw score of 15.99
  DOMAIN (1)..(124): glyceraldehyde 3-phosphate dehydrogenases domain identified by PFam, accession name gpdh, E-value=5.7e-62, PFam score of 209.6
PQAKIIHDNFGTVEGLVTTVHTITATQKTVDGPSRKLWHNSRRALQNIILASTGTAKPVGKGILAYTEHQAVSSDFNSDTHSSTFDTGAGIALNDHFVKLISWYDNEFGYSNRVVDFMAHMASKENLSSTGLNEKATVTEEI

SEQ ID NO: 50806 - protein, 148 aa, Homo sapiens
  DOMAIN (120)..(141): Glyceraldehyde 3-phosphate dehydrogenase proteins domain identified by eMATRIX, accession number BL00071E, p-value=9.471e- 23, raw score of 11.48
  DOMAIN (108)..(147): glyceraldehyde 3-phosphate dehydrogenases domain identified by PFam, accession name gpdh, E-value=7.8e-24, PFam score of 82.2
VLSTSFPGTELNPPISPLAVNSTELLKGELSLSSLGVLSLSDTSVPNSVSNSFLLGLRKRLGRGVGISCSNALSALDLAACNFSLMRPLMENSAKPVLEVEGIGGTAFDAGAGIALSDHFIKLISWYDNEFGYSNRVVDLMAHMASKE

SEQ ID NO: 50807 - protein, 402 aa, Homo sapiens
  DOMAIN (164)..(183): GLYCERALDEHYDE-3-PHOSPHATE DEHYDROGENASE SIGNATURE domain identified by eMATRIX, accession number PR00078B, p-value=3.250e- 24, raw score of 7.45
  DOMAIN (21)..(359): glyceraldehyde 3-phosphate dehydrogenases domain identified by PFam, accession name gpdh, E-value=1.2e-148, PFam score of 499.3
  misc_feature (1)...(402): Xaa = X or * as defined in Table 2
QTAASSFASPGEPHRSNTMGKVKALVNGFDRIGRLVTRAAFNSGKGDIVAINDPFIDLNYMVYMFQYDSTHGKFHGTVKAENGKLVINGNPITIFQERDPSKIKWGXHGAEYVVESTGVFTTMEKAGAHFAGGSQKGHSSFAPSTEAIMFMMKVNYEKYDNSLKIISNASCTTNCLAPLAKVIHDNSGIVERLMITVHVITTTQKTVDGPCRKLRPDGHRALQNIIPASTSTAKAMVKVIPELNKKLTGMASHVPTAKVLVVDPTCHLGKPAKYYDIKKMMKQASEDPIKGILGYTEHQIVSSDFNSDTQSSTFDAGAGITLNDHFVKLISWYDNEFGYSNSVVDLMAHVASKELSGYSLKVSFAVQKLFSLIRSNLSIIAFDAIVFGVFVMKSLPVSICRM

SEQ ID NO: 50808 - protein, 100 aa, Homo sapiens
  DOMAIN (71)..(92): Glyceraldehyde 3-phosphate dehydrogenase proteins domain identified by eMATRIX, accession number BL00071E, p-value=4.600e- 24, raw score of 11.48
  DOMAIN (1)..(99): glyceraldehyde 3-phosphate dehydrogenases domain identified by PFam, accession name gpdh, E-value=3.6e-66, PFam score of 223.7
  misc_feature (1)...(100): Xaa = X or * as defined in Table 2
PTANVSVVDLTCRLXKPAKYDDIKKVVKQASEGPLKGILGYTEHQVVSSDFNSDTHSSTFDAGAGIALNDHFVKLISWYDNEFGYSNRVVDLMAHMASKE

SEQ ID NO: 50809 - protein, 1133 aa, Homo sapiens; identical to SEQ ID NO: 37714

SEQ ID NO: 50810 - protein, 1042 aa, Homo sapiens; identical to SEQ ID NO: 37715
  DOMAIN (512)..(533): POLYCYSTIC KIDNEY DISEASE PROTEIN SIGNATURE domain identified by eMATRIX, accession number PR00500B, p-value=1.153e-29, raw score of 7.74
  DOMAIN (566)..(647): WSC domain identified by PFam, accession name WSC, E-value= 1.2e-33, PFam score of 125.2

SEQ ID NO: 50811 - protein, 45 aa, Homo sapiens
MSECRCPGSRGWNETGHRSGIRGLPGGAGHPQLLSGDEKVRPEQG

SEQ ID NO: 50812 - protein, 296 aa, Homo sapiens; identical to SEQ ID NO: 48754

SEQ ID NO: 50813 - protein, 1512 aa, Homo sapiens
  DOMAIN (1206)..(1244): Lysyl oxidase  copper-binding region proteins domain identified by eMATRIX, accession number BL00926B, p-value=7.570e- 10, raw score of 13.84
  DOMAIN (799)..(1079): REJ domain identified by PFam, accession name REJ, E-value= 1.9e-131, PFam score of 450.1
MGSTGVYKVTPRSCHRFEQAFYTYDTSSPSILTLTAIRHHVLGTITTDKMMDVTVTIKSSIDSEPALVLGPLKSVQELRREQQLAEIEARRQEREKNGNEEGEERMTKPPVQEMVDELQGPFSYDFSYWARVLCFVGTGPAKLKYINYFRSGEKITVTPSSKELLFYPPSMEAVVSGESCPGKLIEIHGKAGLFLEGQIHPELEGVEIVISEKGASSPLITVFTDDKGAYSVGPLHSDLEYTVTSQKEGYVLTAVEGTIGDFKAYALAGVTLHSQDVLMLPGDLVGLQHDAGPGALLHCSPAPGHPGPQAPYLSANASSWLPHLPAQLEGTWACPACALRLLAATEQLTVLLGLRPNPGLRLPGRYEVRAEVGNGVSRHNLSCSFDVVSPVAGLRVIYPAPRDGRLYVPTNGSASVLQVDSGASATATARWPGGSVSARFENACPALVATFVPSCPWETNDTLFSVVALPWLGEGEHVMDVVVENSASRANLSLRVTAEEPICGLRATPSPEARVLQGVPVVLLAGSSGYLVGFKFLESHGSDSGSANSFHRLISRNEFKTPLPDLTRVPRYSPVVEAGSDMVFRWTINDKQSLTFQNVVFNVIYQSAAVFKLSLTASNHVSNVTVNYNITVERMNRMQGLRVSTVPAVLSPNATLALTAGVLVDSAVEVAFLWTFGDGEQALHQFQPPYNESFPVPDPSVAQVLVEHNVTHTYAAPAALGGGAVLTRQPSVLLHLCSVPHVAWEPGTLKAGPQVSTVLTVLASNAFENRTQQVPVSVCASLPSVSVCASLTGACWYPRVLIRSGRVPIVSLECVSCKAQAVYEVSRSSYVYLEGRCLNCSSGSKRGGYTFTLTVLGRSGEEEGCASIPLSPNRPPLGGSCRLFPLGAVHALTTKVHFECMGWHDAEDAGAPLVYALLLQRCRQGHCEEFCVYKGSLSGYGAVLPPGFRPQFEVGLAVVVQDQLGAAVVALNRSLAITLPEPNGSAMGLTVWLHGLTASVLPGLLRQADPQLVIEYSLALVTVLNEYERALDVAAEPKHERQRRAQIRKNITETLVSLRVHTVDDIQQIAAALAQCMRKLPEQDIAQGSYIALPLTLLVLLAGYNHDKLIPLLLQLTSRLQGVGALGQAASDNSGPEDAKRQAKKQKTRRTLATSINTSREPSTDDQLPAHNQTMPQRHARRSAPPRAYDRKTRQEENPHQTRSHAAAKRRERPPHDLQKQATTRLIPAGPRRRDGTSPRRTQPPPNTRRPAAAGHLARFRRAAPGARGARPPTARRGREELDPAHIYAAAPGLPTPPRAGRTPPTPERRDRNTRRRRTREEGEGEFRPVSFLKTIFPSQNGHDGSTDVQQRARRSNCRRQEGIKIVLEDIFTLWRQVETKVRAKIRKMKVTTKVNRHDKINGKRKTAKEHFSTEKLRPDDDICRRSTSKHYRKFTKGSTEVLSKWQPLGPAGVQVSLRNTGTEAKIQSTVTQPGGNSCLSPLSNPVECSVTGPCCAARIGFMPEILEIKGD

SEQ ID NO: 50814 - protein, 1274 aa, Homo sapiens
  misc_feature (1)...(1274): Xaa = X or * as defined in Table 2
LGLGLSMLVGQGAGPLGPAVVTAAVVLLLSGVGPAHGSEDIVVGCGGFVKSDVEINYSLIEIKLYTKHGTLKYQTDCAPNNGYFMIPLYDKGDFILKIEPPLGWSFEPTTVELHVDGVSDICTKGGDINFVFTGFSVNGKVLSKGQPLGPAGVQVSLRNTGTEAKIQATATQPGGKFAFFKVLPGDYEILATHPTWALKEASTTVSVTNSNANAASPLIVAGYNVSGSVRSDGEPMKGVKFLLFSSLVTKEDALGCNVSPVPGFQPPIREVWCNLCYTVSREDGSFSFYSLPSGGYTVIPFYRGERITFDVAPSRLDFTVEHDSLKIEPVFHVMGFSVTGRVLNGPEGDGVPEAVVTLNNQIKVKTKAXWAHSRLENITTGTYTIHAQKEHLYFETVTIKIAPNTPQLADIVATGFSVCGRISIIRFPDTVKQMNKYKVVLSSQDKDKSLVTVETDAHGSFCFKAKPGTYKVQVMVPEAETRAGLTLKPQTFPLTVTNRPMMDVAFVQFLASVSGKVSCLDTCGDLLVTLQSLSRQGEKRSLQLSGKVNAMTFTFDNVLPGKYKISIMHEDWCWKNKSLEVEVLEDDMSAVEFRQTGYMLRCSLSHAITLEFYQDGNGRENVGIYNLSKGVNRFCLSKPGVYKVTPRSCHRFEQAFYTYDTSSPSILTLTAIRHHVLGTITTDKMMDVTVTIKSSIDSEPALVLGPLKSVQELRREQQLAEIEARRQESVYYGKEEGEERMTKPPVQEMVDELQGPFSYDFSYWARSGEKITVTPSSKELASFIPLSMEAVVQWEKACPGKLIEIHGKAGLVLXGQIHPELEGVEIVISEKGASSPLDITVFTDDKGGLQCLGPLHSDREYTVTSQKEGYVLTAVEGTIGDFKAYALAGVSFEIKAEDDQPLPGVLLSLSGGLFRSNLLTQDNGILTFSNLSPGQYYFKPMMKEFRFEPSSQMIEVQEGQNLKITITGYRTAYSCYGTVSSLNREPEQGVAMEAVGQNDCKHFTEKTPVTDEEGKFRLRGLLPGCVYHVQLKAEGNDHIERALPHHRVIEVGNNDIDDVNIIVFRQINQFDLSGKCDSLPLEYLPTLWGSSFYKSENLDNPIQTVSLGQSLFFHFPPLLRDGRELCLCFWDSTLPRSQYDYILPQVFFSPQLGLTIKHITLDFYFPRREAAWNRDIRTKDPYIALPLTLLVLLAGYNHDKLIPFCCCKLTSRLTGESARSGQASPLDNSGPEDAKRQAKKQKTRRTLRKEGDSCSLIWGQATARGFRPLPGPVD

SEQ ID NO: 50815 - protein, 103 aa, Homo sapiens
  misc_feature (1)...(103): Xaa = X or * as defined in Table 2
EEETVPTTAGASPGPPRNKKNRELRPQRPKNAYILKKSRISKKPQVPKKPREWKNPEPSAAASXGGEGQAHGGPAICPGQICALSQTPGLPGNSLSPRSPVGK

SEQ ID NO: 50816 - protein, 87 aa, Homo sapiens
GAGEPNFDGLESNPYRSRKQRQEWEVKALLEKVPAELICLDPRALAEVDVISLEQGKKEQSLQQQHHKEAKAKPTGARPSALDRFVR

SEQ ID NO: 50817 - protein, 97 aa, Homo sapiens
LPHSKAKTRSRLEVAEAEEEETSIKAARSELLLAEEPGFLEGEDGEDTACHFSLCACVLPVSGPQDKVRQSLQQQHHKEAKAKPTGARPSALDRFVR

SEQ ID NO: 50818 - protein, 143 aa, Homo sapiens
  misc_feature (1)...(143): Xaa = X or * as defined in Table 2
LIGLDPEPLAEVDVISLEQGRRKQIERLGYDPQAKAPFQPKPKQKGRSSTASLVKRKRKVMDEENRVKXTIGNGPGLPKGCTLPACALCPCQPAHFLTLCPVSLPSPVPQDKVRQSLQQQHHKEAKAPKPTGARPSALDRFVR

SEQ ID NO: 50819 - protein, 643 aa, Homo sapiens
  misc_feature (1)...(643): Xaa = X or * as defined in Table 2
FKPTVWQLRGVLHVDRLFVWASMETAPKPGKDVLSKKDKLQTKRKKPRRYWEEETVPTTAGASPGPPRNKKNRELRPQRPKNAYILKKSRISKKPQVPKKPREWKNPESQRGLSGAQDPFPGPAPVPVEVVQKFCRIDKSRKLPHSKAKTRSRLEVAEAEEEETSIQSLLRSELLLAEEPGFLEGEDGEDTAKICQADIVEAVDIASAAKHFDLNLRQFGPYRLNYSRTGRHLAFGGRRGHVAALDWVTKKLMCEINVMEAVRDIRFLHSEALLAVAQNRWLHIYDNQGIELHCIRRCDRVTRLEFLPFHLLLDTASETGFLTYLDVSVGKIVAALNARAGRLDVMSQNPYNAVIHIGHSNGTASLWESSYGREPLAKILCHRGLGSGAVAVDSYRHVTWATSGPXDHQLEDLFDFARGRYQPLEHSGPCPMGAGHLAFSQRELLVLAGLGDVVNIWAGQGKASPPSLDRPYFTHRVXGPVHGLQFCPFEDVLGVGHTXGITSMLVPGAGEPNFDGLESNPYRSRKQRQEWEVKALLEKVPAELICLDPRALAEVDVISLETGKRRKQIERLGYDPQAKAPFQPKPKQKGRSSKATLVKRKRKVMIEDHKGDKVRQSLQQQHHKEAKAKPTGARPSALDRFVR

SEQ ID NO: 50820 - protein, 145 aa, Homo sapiens
SLAELPVTHPAGVRPPIPGPPYVASPDLWSHWEDSALPPPSLRPVQPTWEGSSEAGLDWAGASFSPGTPMWAALDEQMLQEGIQASLLDGPAQEPQSAPWLSKSSVSSLRLQQLLLCLKRATVGSRGTSGGRRGPPACCPSTCLE

SEQ ID NO: 50821 - protein, 89 aa, Homo sapiens
GPRKLSISAKSPAEFEPDRSWDPLLYPPPEESPSLSFHSALPASQPPIPGPPYVASPDLWSHWEDSALPPPSLRPVQPTWEGSSEAGLD

SEQ ID NO: 50822 - protein, 452 aa, Homo sapiens
  DOMAIN (414)..(452): UBA domain identified by PFam, accession name UBA, E-value= 0.029, PFam score of 20.9
LVIVFFYPQHTAPGPPLTVLNQAMHARGPHGQLSPALPLASSVLMLLMNLAHLGQPWMLGPLTWHISPFSLPVHRLLTHALGHTALPGLLLSLLLLPTVGWQQECHLGTLRFLHASALLALASGLLAVLLAGLGLSSAAGSCGYMPVHLAMLAGEGHRPRRPRGALPPWLSPWLLLALTPLLSSEPPFLQLLCGLLAGLACILCLSPGPVGMCGFCGWVPGKEVAQRGEGPSNTKEPCTHIAWPVAWAHPWLLLVFLDRPPCPGQTDAAGAFRWLEPSERRLQVLQEGVLCRTLAGGMPVQVVGTVAGLPVRPSSLPSSSRPPIPGPPYVASPDLWSHWEDSALPPPSLRPVQPTWEGSSEAGLDWAGASFSPGTPMWAALDEQMLQEGIQASEVGSPGIGAGVALTLPTSPPTPNRLQQLERMGFPTEQAVVALAATGRVEGAVSLLVGGQ

SEQ ID NO: 50823 - protein, 532 aa, Homo sapiens
  misc_feature (1)...(532): Xaa = X or * as defined in Table 2
AHSPRDHPWTVLNQAMHARGPHGQLSPALPLASSVLMLLMSTLWLVGAGPGLVLAPELLLDPWQVHRLLTHALGHTALPGLLLSLLLLPTVGWQQECHLGTLRFLHASALLALASGLLAVLLAGLGLSSAAGSCGYMPVHLAMLAGEGHRPRRPRGALPPWLSPWLLLALTPLLSSEPPFLQLLCGLLAGLAYAAGAFRWLEPSERRLQVLQEGVLCRTLAGCWPLRLLATPGSLAELPVTHPAGVRPPIPGPPYVASPDLWSHWEDSALPPPSLRPVQPTWEGSSEAGLDWAGASFSPGTPMWAALDEQMLQEGIQASLLDGPAQEPQSAPWLSKSSVSXMRLQQLERMGFPTTEAAVVALAATGRVEGAVSLLVGGQSGTETLVTHGKGGPAHSEGPGPPWANCPQHCLLASSVLMLLMSTLWLVGAGPGLVLAPELLLDPWQVHRLLTHALGHTALPGLAPEPAAPAHCGLAAGVPPGHAEIPACLSPARPGFWAAGSAAGRPWAVQCSRQLWIHACPPGHAGWGRTPP

SEQ ID NO: 50824 - protein, 76 aa, Homo sapiens
  misc_feature (1)...(76): Xaa = X or * as defined in Table 2
CTVVFSVLAELSCTSRFCPNMWTPLREPMTENGRWGLSVRVLEHGGNQSNSACGPEPPEGEMGSXLEEDXLPALIP

SEQ ID NO: 50825 - protein, 192 aa, Homo sapiens
  DOMAIN (98)..(110): MOLLUSCAN RHODOPSIN C-TERMINAL TAIL SIGNATURE domain identified by eMATRIX, accession number PR00239E, p-value=2.636e- 09, raw score of 1.58
ATQLPPQPWQTPAALGWAAATSLMPYRAPSPPARAQHPPALCLAPPPPLWLQLPHLEASHSLVEARPNPPVSTLAQQGIQPSPRHLPRCPSLRPRQQPPQQVPPQPAAPTPTATITSTGPSLFASIATAPTSSATTGLSLCTPVTTAGAPTAGTQGFSLKAPGAAPAPPQQHPPLPPPPPPPPPAAAPPALP

SEQ ID NO: 50826 - protein, 53 aa, Homo sapiens
MGEEGTGGTVHLLCLAASSGVPLFCRSSRGGAPARQQVGPWTPVSKPKGVRCF

SEQ ID NO: 50827 - protein, 101 aa, Homo sapiens
  misc_feature (1)...(101): Xaa = X or * as defined in Table 2
ASRLGPREGGARKNPGGPCSATQYISVPSPGAASFPVLGSQSLLTTVSPPLPAXPLAMALXPRPLCAPGPSPRSPRLRSPLPPSFFSRGRRRLSLLQPWSE

SEQ ID NO: 50828 - protein, 128 aa, Homo sapiens
GIRLVAAGDARGRAAPLAGGVPVAADRSRLPGVPAAREPHGPTPAPDPDSAAEPGAVSTLRAEPTPQPVVSTASGALVAATAGPVAGLSAVGTPGAAQWLPPSHRHPRAAAPPPGTEALPLHRGALGG

SEQ ID NO: 50829 - protein, 81 aa, Homo sapiens
MAPDSGGGSYSGSQSKSVGVCSLGKISRLRSPLPPSFFSRGRRRLSLLQPWSEYPLTSSPTAFPALSQIVALFREPWGVDE

SEQ ID NO: 50830 - protein, 127 aa, Homo sapiens
MLLIPQQLLTTLVPVFRNSRLVQFHFTKDLETLKSLCRIMDNGFAGCVHFSYKASCEIRVLMLLYSSEKKIFIGLIPHDQGNFVNGIRRVIANHQQVLPPKPGAGATATRDGGVVVTPGWAPPGVTD

SEQ ID NO: 50831 - protein, 157 aa, Homo sapiens
  DOMAIN (98)..(118): BETA-3 ADRENERGIC RECEPTOR SIGNATURE domain identified by eMATRIX, accession number PR00563B, p-value=8.630e-09, raw score of 3.98
  misc_feature (1)...(157): Xaa = X or * as defined in Table 2
RTDQYPQRGETEEGLEGQLLPHRQLPGGLGAHRGPDPACGLRDSSRGVPLAGSPLRVRXGRGHDLRQSGGVRPGGGSNRGLVVAGDARGRAAPLAGGVPAAADRSRLPGVPAAREPHGPTPAPDPDSAAEPGAVSTLRAEPTPQPVVSTGCCSSTWN

SEQ ID NO: 50832 - protein, 470 aa, Homo sapiens
  DOMAIN (100)..(139): Adaptin N terminal region domain identified by PFam, accession name Adaptin_N, E-value=3.1e-08, PFam score of 32.4
MGLKLGNILSFGATRKPKPASVDANTKLTRSLPCQVYVNHGENLKTEQWPQKLIMQLIPQQLLRFLEKMSNKRVTSYPTTVRRDTTAVMLVEADEWVKYEPNLLVRACNQLGQFLQHRETNLRYLALESMCTLASSESSCNNDVPVCIQREKAEYIRAFPFVPLRRQCCWSSDEAESYTGHTTERVYVEEAPAPESPQTAEPTLRSRPGPGHACRLVVRPRRPHSGGGPPSLVRLSPCAPKPRARAEHAEIGGARSRPCGSGSLARDWAGAAYPQAGVLRYCSGEAPGIGSAVAIRSAKGMKVELQLGCPDVDGTSPQQEAQKIFKANQPMDAEVTKAKPIGMAAARVDTLETNPENGVGGEIMQTKACSPQQEAQKIFKANHPMDAEVTKAKLLGFGSALLDNVDPNPENFVGAGIIQTKALQISSYLYLNTALVDLPGVAASQACDSQQVTWLLYVANGAYSACNRPG

SEQ ID NO: 50833 - protein, 54 aa, Homo sapiens
RKRAEGEALEGEVPGAGRHGIRELKERAESVEREIQYVKDHAHRGLQGPEPEDP

SEQ ID NO: 50834 - protein, 766 aa, Homo sapiens
  DOMAIN (469)..(766): Alpha adaptin carboxyl-terminal domai domain identified by PFam, accession name Alpha_adaptin_C, E-value=2e-204, PFam score of 692.5
MDSVKQSAALCLLRLYKASPDLVPMGEWTARVVHLLNDQHMGVVTAAVSLITCLCKKNPDDFKTCVSLAVSRLSRIVSSASTDLQDYTYYFVPAPWLSVKLLRLLQCYPPPEDAAVKGRLVECLETVLNKAQEPPKSKKVQHSNAKNAILFETISLIIHYDSEPNLLVRACNQLGQFLQHRETNLRYLALESMCTLASSERSGDVSVRQRAADLLYAMCDRSNAQQIVSEMLRYLETADYAIREEIVLKVAILAEKYAVDYSWYVDTILNLIRIAGDYVSEEVWYRVLQIVTNRDDVQGYAAKTVFEALQAPACHENMVKVGGYILGEFGNLIAGDPRSSHPVQFSLLHSKFHLCSVATRALLLSTYIKFINLFPETKATIQGVLRAGSQLRNADVELQQRAVEYLTLSSVASTDVLATVLEEMPPFPERESSILAKLKRKKGPGAGSALDDGRRDPSSNDINGGMEPTPSTVSTPSPSADLLGLRAAPPPAAPPASAGAGNLLVDVFDGPAAQPSLGPTPEEAFLSELEPPAPESPMALLADPAPAADPGPEDIGPPIPEADELLNKFVCKNNGVLFENQLLQIGVKSEFRQNLGRMYLFYGNKTSVQFQNFSPTVVHPGDLQTHLAVQTKRVAAQVDGGAQVQQVLNIECLRDFLTPPLLSVRFRYGGAPQALTLKLPVTINKFFQPTEMGGPGFWGLGSALLDNVDPNPENFVGAGIIQTKALQVGCLLRLEPNAQAQMYRLTLRTSKEPVSRHLCELLAQQF

SEQ ID NO: 50835 - protein, 199 aa, Homo sapiens
HHQVPLPVGRERGGKRGPGSWETCLSVLGPAIPPSEPWPVSPSWVHSLVPGEQALPLICSQPPMAPQWPETGPGPHLVHRTCRVCLNWQGMTRTRGYQAGPSSRRTIPTPAQLPAPLASLPPRQDPPSSPAEPPSGRFSMEPWWEPARHPPGSPAAPCSSHRITAPPTPSLAAQPGPVGSNPPLSPEGLCLAGTPACGW

SEQ ID NO: 50836 - protein, 1129 aa, Homo sapiens
  DOMAIN (801)..(1129): Alpha adaptin carboxyl-terminal domai domain identified by PFam, accession name Alpha_adaptin_C, E-value=2.8e-212, PFam score of 718.6
  misc_feature (1)...(1129): Xaa = X or * as defined in Table 2
SKGNGSPSTTQTQTPRAAPDGSLSEETPAGPPTCSVPPASALPRQQYAKSLPVSVPVWGFKEKRTEARSSDEENGPKPKPASVDANTKLTRSLPCQGSLKRATSCERAGKAVGEEVSGYSLHGCSKERRRRPRLKKEGGSGEPGVGYLFISVLVNSNSELIRLINNAIKNDLASRNPTFMCLALHCIANVGSREMGEAFAADIPRILVAGDSMDSVKQSAALCLLRLYKASPDLVPMGEWTARVVHLLNDQHMGVVTAAVSLITCLCKKNPDDFKTCVSLAVSRLSRIVSSASTDLQDYTYYFVPAPWLSVKLLRLLQCYPPPGNERRALPNPGWPAAGIWGPPAPRRTSLFLYLVNFPAENSAEKSAEPFFAGTLDSSCIHLKTRHILGNVVIGAPVSCWLASVSGGELWGPLGQEDGTECACSGLLLNGHLEDAAVKGRLVECLETVLNKAQEPPKSKKVQHSNAKNAILFETISLIIHYDSEPNLLVRACNQLGQFLQHRETNLRYLALESMCTLASSEFSHEAVKTHIDTVINALKTERDVSVRQRAADLLYAMCDRSNAKQIVSEMLRYLETADYAIREEIVLKVAILAEKYAVDYSWYVDTILNLIRIAGDYVSEEVWYRVLQIVTNRDDVQGYAAKTVFEALQAPACHENMVKVGGYILGEFGNLIAGDPRSSVATRALLLSTYIKFINLFPETKATIQGVLRAGSQLRNADVELQQRAVEYLTLSSVASTDVLATVLEEMPPFPPERESSILAKLKRKKGPGAASALDDGRRDPSSNDINGGMEPTPSQTVXRPSPSADLLGLRAAPPFPAAPPASAGAGNLLVDVFDGPAAQPSLGPTPEEAFLSPGPEDIGPPIPEADELLNKFVCKNNGVLFENQLLQIGVKSEFRQNLGRMYLFYGNKTSVQFQNFSPTVVHPGDLQTHILSGPAQPPASPRRPSSPWGSRLTQLAVQTKRVAAQVDGGAQVQQVLNIECLRDFLTPPLLSVRFRYGGAPQALTLKLPVTINKFFQPTEMAAQDFFQRWKQLSLPQQEAQKIFKANHPMDAEVTKAKLLGFGSALLDNVDPNPENFVGAGIIQTKALQVGCLLRLEPNAQAQMYRLTLRTSKEPVSRHLCELLAQQF

SEQ ID NO: 50837 - protein, 86 aa, Homo sapiens
  misc_feature (1)...(86): Xaa = X or * as defined in Table 2
SRSSRTWSPIPEKEKTKLQKQREDELIQKIHKLVQKRDFLVDDAEVERLREQEEDKEMADFLRIKLKPLDKVTKSPPIXQSQRAHL

SEQ ID NO: 50838 - protein, 48 aa, Homo sapiens
MRNLDNLLGKMQKKITGQIFSFTPSREVLLFSSSFFSFTPGRSDRGSF

SEQ ID NO: 50839 - protein, 412 aa, Homo sapiens
  misc_feature (1)...(412): Xaa = X or * as defined in Table 2
SLSSRCMMVAEQGCALEPCQGLSHGAALGVLMVVFPVSSLQQDQLDIISMAETTMMPEEIELEMAKIQRLREVLVRRESELRFMSFEEQYNEDHKKGVIDLFTADSLKTMTRLVTGVWLAYLAATASNPLQEGEHAGEQIGAGGCRSRLEGGALTWDPVLLPPVRISRMLLLLLIPGELPGIAFKLMNPTKAEPMHMFIILEPFDLRKLMDDIQLCKDIMDLKQELQNLVAIPGCTRSMMLVSAQLLEGLRKLIIMAEDKGADMSRAQSRSKRPPKMLICLLVDVFFPEKEKTKLQKQREGXANPRRFHKLVQKRDFLVDDAEVERLREQEEDKEMADFLRIKLKPLDKVTKSPASSRAEKKAEPPPSKPTVAKTGLALIKDCCGATQCNIHVSPHVGCPGPWGPPPTLLSL

SEQ ID NO: 50840 - protein, 103 aa, Homo sapiens
  DOMAIN (40)..(88): Tetrahydrofolate dehydrogenase/cyclohydrolase proteins domain identified by eMATRIX, accession number BL00766B, p-value=9.667e- 39, raw score of 24.49
  DOMAIN (28)..(103): Tetrahydrofolate dehydrogenase/cyclohydro domain identified by PFam, accession name THF_DHG_CYH, E-value=1.8e-37, PFam score of 135.0
CLLWLPGCCSPRTAAPFAFALSTSRQFGINSETIMKPASISEEELLNLINKLNNDDNVDGLLGQLPLPEHIDERRICNAVSPDKDVDGFHVINVGRMCLDQYS

SEQ ID NO: 50841 - protein, 393 aa, Homo sapiens
  DOMAIN (140)..(188): Tetrahydrofolate dehydrogenase/cyclohydrolase proteins domain identified by eMATRIX, accession number BL00766C, p-value=5.605e- 29, raw score of 25.86
  DOMAIN (49)..(276): Tetrahydrofolate dehydrogenase/cyclohydro domain identified by PFam, accession name THF_DHG_CYH, E-value=5e-102, PFam score of 352.4
MAATSLMSRLAAWLLQPVHSCSLCPRPFHLTAVTDEAVVISGRKLAQQIKQEVRQEVEEWVASGDKRPHLSMILVGESSASHSYVLNKTRAAADVGINTASSRHIDERRICNAVSPDKDADGFHVINAGRMCLDQYSMLPATPCGVWEIIKRTDIPTLGKNVVVAGRSKSVEMPIAMLLHTDGVHERPGGDATVTISYRYTSKEQLKKHTILADIVISAAGIPNLITADMIKEEAAVTDMGINRVHDPVTAKLKLVGDVDFEGVRQKAGYITPVPGVKFERSQAPCMKSNNALIVILGTVTLDAVGIGLVMPVLPGLLRDIVHSDSIASHYGVLLALYALMQFLCAPVLGALSDRFGRRPVLLASLLGATIDYAIMATTPVLWIYPLVNSPSC

SEQ ID NO: 50842 - protein, 388 aa, Homo sapiens
  DOMAIN (143)..(191): Tetrahydrofolate dehydrogenase/cyclohydrolase proteins domain identified by eMATRIX, accession number BL00766B, p-value=1.000e- 40, raw score of 24.49
  DOMAIN (86)..(369): Tetrahydrofolate dehydrogenase/cyclohydro domain identified by PFam, accession name THF_DHG_CYH, E-value=1.5e-158, PFam score of 540.1
  misc_feature (1)...(388): Xaa = X or * as defined in Table 2
PARSMAATSLMSALAARLLQPAHSCSLRLRPFHLAAVRGNLSLGQVGVQCCNHGLLQPXPPGLKXSSHLSLNEAVVISGRKLAQQIKQEVRQEVEEWVASGNKRPHLSVILVGENPASHSYVLNKTRAAAVVGINSETIMKPASISEEELLNLINKLNNDDNVDGLLVQLPLPEHIDERRICNAVSPDKDVDGFHVINVGRMCLDQYSMLPATPWGVWEIIKRTGIPTLGKNVVVAGRSKNVGMPIAMLLHTDGAHERPGGDATVTISHRYTPKEQLKKHTILADIVISAAGIPNLITADMIKEGAAVIDVGINRVHDPVTAGPGLVGNVDFEGVRQKAGYITPVPGGVGPMTVAMLMKNTIIAAKKGAEAXRSEKVLKSKELGVATN

SEQ ID NO: 50843 - protein, 653 aa, Homo sapiens
  DOMAIN (170)..(189): BINDIN PRECURSOR SIGNATURE domain identified by eMATRIX, accession number PR00761E, p-value=7.800e-10, raw score of 14.32
  DOMAIN (106)..(555): Pumilio-family RNA binding domains domain identified by PFam, accession name PUF, E-value=0.00014, PFam score of 28.6
  misc_feature (1)...(653): Xaa = X or * as defined in Table 2
MAASDVNCGACFAELQGNATANTPGGTSHHTHLAIHGSCHDSQAKEAGRKRQPWPPPDGRSEPAPDSHPHLSPEALGYFRRALSALKEAPETGEERDLMVHNIMKEVETQALALSTNRTGSEMLQELLGFSPLKPLCRVWAALRSNLRTVACHRCGVHVLQSALLQLPRLLGSAAEEEEEEEEDGKDGPTETLEELVLGLAAEVCDDFLVYCGDTHGSFVVRTLLQVLGGTILESERARPRGSQSSEAQKTPAQECKPADFEVPETFLNRLQDLSSSFLKDIAVFITDKISSFCLQVALQVLHRKLAQFCAHICNAVIGYLSARGSSVDGKPLLLFLRDQTSFRLLEQVLLVLEPPRLQSLFEEHLQGQLQTLAAHPIANFPLQRLLDAVTTPELLSPVFEELSPVLEAVLAQGHPGVVIALVGACRRVGAYQAKVLQLLLEAFHCAEPSSRQVACVPLFATLMAYEVYYGLTEEEGAVPAEHQVAMAAARALGDVTVLGSLLLQHLLHFSTPGLVLRSLGALTGPQLLSLAQSPAGSHVLDAILTSPSVTPSCAAVCLQNLKGTNIVALACKSPXQPRVLKCHLEWSSLEGPRRKIAAELGEQNQELKEPPFGHHVARNVALTTFLKRREAWEQQQGAVAKRRRALNSILED

SEQ ID NO: 50844 - protein, 113 aa, Homo sapiens
YMKSDLIMAQPIFKNSPFAMMNNHLVIWQWHGNGPNFVAKIALLFCFLDRMSKLDQWGQAEVLNFLLRYQPRSEEELFDILNLLDSFLKSSSPGVVMGATKLFLILAKMFPHA

SEQ ID NO: 50845 - protein, 76 aa, Homo sapiens
  DOMAIN (2)..(51): Adaptin N terminal region domain identified by PFam, accession name Adaptin_N, E-value=0.0039, PFam score of 14.0
GKQALIWLLGVHGERIPNAPYVLEDFVENVKSETFPAVKMELLTALLRLFLSRPAECQDMLGRLLYYCIGGFFRRK

SEQ ID NO: 50846 - protein, 802 aa, Homo sapiens
  DOMAIN (186)..(589): Adaptin N terminal region domain identified by PFam, accession name Adaptin_N, E-value=2.1e-51, PFam score of 184.2
MGVWGIRTPFMVVGLESPVGSSPRGQGSCVRLPQRRPDKSHAGARTGPETLRERAQQSNKLPEWAEKGSHPARWSPNRGGRWTLPTARERRPSRALKARAAGRRQAKVADFRLPAAAPPEGAAQLRLESERLPHQDEKEPSSYRGSCGSCPVTLRKMPYLGSEDVVKELKKALCNPHIQADRLRYRNVIQRVIRYMTQGLDMSGVFMEMVKASATVDIVQKKLVYLYMCTYAPLKPDLALLAINTLCKDCSDPNPMVRGLALRSMCSLRMSKLDQWGQAEVLNFLLRYQPRSEEELFDILNLLDSFLKSSSPGVVMGATKLFLILAKMFPHVQTDVLVRVKGPLLAACSSESRELCFVALCHVRQILHSLPGHFSSHYKKFFCSYSEPHYIKLQKVEVLCELVNDENVQQVLEELRGYCTDVSADFAQAAIFAIGGIARTYTDQCVQILTELLGLRQEHITTVVVQTFRDLVWLCPQCTEAVCQALPGCEENIQDSEGKQALIWLLGVHGERIPNAPYVLEDFVENVKSETFPAVKMELLTALLRLFLSRPAECQDMLGRLLYYCIEEEKDMAVRDRGLFYYRLLLVGIDEVKRILCSPKSDPTLGLLEDPAERPVNSWASDFNTLVPVYGKAHWATISKCQGAERCDPKLPKTSSFAASGPLIPEENKERVQELPDSGALMLVPNRQLTADYFEKTWLSLKVAHQQVLPWRGEFHPDTLQMALQVVNIQTIAMSRAGSRPWKAYLSAQDDTGCLFLTELLLEPGNSEMQISVKQNEARTETLNSFISVLETVIGTIEEIKS

SEQ ID NO: 50847 - protein, 581 aa, Homo sapiens
  DOMAIN (59)..(408): Adaptin N terminal region domain identified by PFam, accession name Adaptin_N, E-value=1.1e-42, PFam score of 155.2
DEKEPSSYRGSCGSCPVTLRKMPYLGSEDVVKELKKALCNPHIQADRLRYRNVIQRVIKIFVQKKLVYLYMCTYAPLKPDLALLAINTLCKDCSDPNPMVRGLALRSMCSLRMPGVQEYIQQPILNGLRDKASYVRRVVVLGCAKMHNLHGDSEVDGALVNELYSLLRDQDPIVVVNCLRSLEEILKQEGGVVINKPIAHHLLNRMSKLDQWGQAEVLNFLLRYQPRSEEELFDILNLLDSFLKSSSPGVVMGATKLFLILAKMFPHVQTDVLVRVKGPLLAACSSESRELCFVALCHVRQILHSLPGHFSSHYKKFFCSYSEPHYIKLQKVEVLCELVNDENVQQVLEELRGYCTDVSADFAQAAIFAIGGIARTYTDQCVQILTELLGLRQEHITTVVVQTFRDLVWLCPQCTEAVCQALPGCEENIQDKDFVENVKSETFPAVKMELLTASLRLFLSRPAECQDMLGRLLYYCIEEEKDMGCYGTEVSSIIRLLLVGHLMKFKRIFVVGPKSEPYSWDFWEDPAERPVNSWASDFNHTGAQCMAKPTGQLSLNARGQSVVTQSFLKLHPLPHQDPWIS

SEQ ID NO: 50848 - protein, 56 aa, Homo sapiens
FFFEECFTLGTEVIFFYSSDFLNEYEKGRTPNPDIVCNKHIKFSCFFHYAVDNLGK

SEQ ID NO: 50849 - protein, 333 aa, Homo sapiens
  misc_feature (1)...(333): Xaa = X or * as defined in Table 2
LQLAKLGDWRMQALRHVHCRFTEGXFMYSLXLTFPPAGYQVTGVFMKNWDSLDEHGVCTADKDCEDAYRVCQILDIPFHQVSYGTEVIFFYSSDFLNEYEKGRTPNPDIVCNKHIKFSSXSLCSKNLTGADAIATGHYARTSLEDEEVFEQKHVKKPEGPASWRNCLSVGWFLYTLGQRANIGGLREPWYVVEASPPSHSILQAPRTDHPALYRDLLRTSRVHWIAEEPPAALVRDKMMECPPPRAPLFYPVPCVLTLNQDGTVWVTAVTPDARVSPLQFAVFYKGDECLGSGKILRLGPSAYTLQKGQRRAGMATESPSDSPEDGPGLSPLL

SEQ ID NO: 50850 - protein, 139 aa, Homo sapiens; identical to SEQ ID NO: 34774

SEQ ID NO: 50851 - protein, 168 aa, Homo sapiens
  misc_feature (1)...(168): Xaa = X or * as defined in Table 2
RLHSLLGDYYQAIKVLENIDLSTKSMYSRVPECQVTTYYYVGFAYSMMRCYQDAIRVFASILLYIHRTNSMFQRTKYKYEMIIMLNEQMHALLAIALTMYPMRIDESIYLHLREKYVDKMLRMQNGDLQVYEELFRYSCTKFLXPVPPNYDTVHAHYHTESFLQSLRR

SEQ ID NO: 50852 - protein, 125 aa, Homo sapiens
  misc_feature (1)...(125): Xaa = X or * as defined in Table 2
XSSHSVSTACKTAKKSEEEIDFLRSNPKIWNVHSVLNVLHSLADKSNINRQLEDAIRVFANILLYIQRTKSMFQRTTYKYEMINKQNEQMHALLAIALTMYPMRIDESIHLQLREKYGGQDVAHA

SEQ ID NO: 50853 - protein, 85 aa, Homo sapiens
RSFLKLYTTMPVAKLAGFLDLTEQEFRIQLLVFKHKMKNLVWTSGISALDGEFQSASEVDFYIDKDMIPKFEELNRTLKKMGQRP

SEQ ID NO: 50854 - protein, 35 aa, Homo sapiens
  misc_feature (1)...(35): Xaa = X or * as defined in Table 2
DAIRVFANILLYIQRTKSMFQRTTYKYEMINKQKX

SEQ ID NO: 50855 - protein, 79 aa, Homo sapiens
MLGYFSLVGLLRLHSLLGDYYQAIKVLENIELNKKSMYSRVPECQVTTYYYVGFAYLMIFTHIQEPVLMYYRQEVFLLP

SEQ ID NO: 50856 - protein, 144 aa, Homo sapiens
IPVRPTRPADDYESEAAYDPYAYPSDYDMHTGDPKQDLAYERQYEQQTYQVIPEVIKNFIQYFHKTVSDLIDQKVYELQASRVSSDVIDQKVYEIQDIYENDAVFLILYKELYYRHIYAKVSFQSFSQYRCKTAKKSEEEIDFL

SEQ ID NO: 50857 - protein, 92 aa, Homo sapiens
  misc_feature (1)...(92): Xaa = X or * as defined in Table 2
NQVIKNFIQYFHKTVSDLIDQKVYELQASRVSSDVIDQKVYEIQDIYENRNSCYYCFSNPKIWNVHSVLNVLHSLVDKSNINRQLEVYTSGX

SEQ ID NO: 50858 - protein, 640 aa, Homo sapiens
  misc_feature (1)...(640): Xaa = X or * as defined in Table 2
SLVDPRVRPRVRVLASEAAMSYPADDYESEAAYDPYAYPSDYDMHTGDPKQDLAYERQYEQQTYQVIPEVIKNFIQYFHKTVSDLIDQKVDELQASPCLQVIVIDQERLYEDSRTIYXEQAWTKLTERFFKNTPWPGGWKPLVPQGLAMDAVSFLDFYPKNYTYRHIYAKVSGGPSLEQRFESYYNYCNLFNYILNADGSRSPLNYPNQWLWGYLSMEFIYPVFSHFSQYRWXDLPKKSEEEIDFLRSNPKIWNVHSVLNVLHSLVDKSNINRQLGGYTQAGGDPXECGWGSMGRHSLYMMLHYFSLVRGFSRLHSLLGDYYQAIKVLENIELNKKSMYSRVPRVPRSPTYYYVGFAYLMMRRYQDAIRVFANILLYIQRTKSMFQRTTYKYEMINKQIEQMHALLAIALTMYPMRIDESIHLQLREKYGDKMLRMQKGDPQVYEXLFSYSCPRFLAAVVPTYDNVHPNYHKEPFLQQLKGVFLDEVQQQGPAFKPIRSFLKLYTTHALLAKPGLASLDPHRGREFRDPRFLCLSNHQGXRNLVLGPAGISSPWIGEISVSPQRVDLPTLNKDMIPHRGTPKVPQAVMGDFLHPVRSHKFGGAXSEPLKEGWGQRPWMIFTTHFREPVFDVIIGQGSVFC

SEQ ID NO: 50859 - protein, 137 aa, Homo sapiens
NSARAPPGPPPLGAIMPPPGAPMGLALKKKSIPQPTNALKSFNWSKLPENKLEGTVWTEIDDTKVFKILDLEDLERTFSAYQRQQKEADAIDDTLSSKLKVKELSVIDGRRAQNCNILLSRLKLSNDEIKRAILTMD

SEQ ID NO: 50860 - protein, 130 aa, Homo sapiens
  DOMAIN (92)..(127): Matrix protein (MA) p15. domain identified by eMATRIX, accession number PF01140D, p-value=4.035e-09, raw score of 15.54
HYSFPVFKELEYQKSQPPQPGDKFVSVVSQFITVASFSFSDVEDLLAEAKDLFTKAVKHFGEEAGKIQPDEFFGIFDQFLQAVSEAKQENENMRKKKEEEERRARMEAQLKEQRERERKMRKAKENSEES

SEQ ID NO: 50861 - protein, 1196 aa, Homo sapiens
  DOMAIN (1110)..(1145): Matrix protein (MA) p15. domain identified by eMATRIX, accession number PF01140D, p-value=4.035e-09, raw score of 15.54
  DOMAIN (665)..(1190): Formin Homology 2 Domain domain identified by PFam, accession name FH2, E-value=3.3e-72, PFam score of 253.3
MAPRKRGGRGISFIFCCFRNNDHPEITYRLRNDSNFALQTMEPALPMPPVEELDVMFSELVDELDLTDKHREAMFALPAEKKWQIYCSKKKDQEENKGATSWPEFYIDQLNSMAAGILEGVFVHIVITHCLQNQQQLLHDKQGNRHFICCLRSHQHPMLPACSNVHLSSFDRKTLCKDALCPLPASHVSRYLRKSLLALEKEEEEERSKTIESLKTALRTKPMRFVTRFIDLDGLSCILNFLKTMDYETSESRIHTSLIGCIKALMNNSQGRAHVLAHSESINVIAQSLSTENIKTKVAVLEILGAVCLVPGGHKKVLQAMLHYQKYASERTRFQTLINDLDKSTGRYRDEVSLKTAIMSFINAVLSQGAGVESLDFRLHLRYEFLMLGIHPVMDKLRKHENSTLDRHLDFFEMLRNEDELEFAKRFELVHIDTKSATQMFELTRKRLTHSEAYPHFMSILHHCLQMPYKRSGNTVQYWLLLDRIIQQIVIQNDKGQDPDSTPLENFNIKNVVRMLVNENEVKQWKEQAEKMRKEHNELQQKLEKKERECDAKTQEKEEMMQTLNKMKEKLEKETTEHKQVKQQVADLTAQLHELSRRAVCASIPGGPSPGAPGGPFPSSVPGSLLPPPPPPPLPGGPPPPPGPPPLGAIMPPPGAPMGLALKKKSIPQPTNALKSFNWSKLPENKLEGTVWTEIDDTKVFKILDLEDLERTFSAYQRQQSHDTLFKLSGLQPVVWLDTILREAKEHYKGNGMNTITCMHATGTLHRKEADAIDDTLSSKLKVKELSVIDGRRAQNCNILLSRAQQLQAAREEGMKAATRHILNRSKEMLASTLVWEECCIEETELLKFVPEKSDIDLLEEHKHELDRMAKADRFLFEMSRINHYQQRLQSLYFKKKFAERVAEVKPKVEAIRSGSEEVFRSGALKQLLEVVLAFGNYMNKGQRGNAYGFKISSLNKIADTKSSIDKNITLLHYLITIVENKYPSVLNLNEELRDIPQAAKVKCCNNRSSHFPQPGRIQISRVITEELEYQKSQPPQPGDKFVSVVSQFITVASFSFSDVEDLLAEAKDLFTKAVKHFGEEAGKIQPDEFFGIFDQFLQAVSEAKQENENMRKKKEEEERRARMEAQLKEQRERERKMRKAKENSEESGEFDDLVSALRSGEVFDKDLSKLKRNRKRITNQMTDSSRERPITKLNF

SEQ ID NO: 50862 - protein, 1089 aa, Homo sapiens
  DOMAIN (549)..(582): PROLINE-RICH PROTEIN 3 domain identified by eMATRIX, accession number DM00215, p-value=2.174e-13, raw score of 19.43
  DOMAIN (612)..(1083): Formin Homology 2 Domain domain identified by PFam, accession name FH2, E-value=2.5e-96, PFam score of 333.4
  misc_feature (1)...(1089): Xaa = X or * as defined in Table 2
SHQEIEQNSAMAPRKRGGRGIAFIFCCLRNNDHPEITYRLRNDSNFALQTMEPALPMPPVEELDVMFSELVDELDLPDKHREAMFALPAEKKWQIYCSKKKDQEENKGATSWPEFYIDQLNSMAARKSLLALEKEEEEERSKTIESLKTALRTKPMRFVTRFIDLDGLSCILNFLKTMDYETSESRIHTSLIGCIKALMNNSQGRAHVLAHSESINVIAQSLSTENIKTKVAVLEILGAVCLVPGGHKKVLQAMLHYQKYASERTRFQTLINDLDKSTGRYRDEVSLKTAIMSFINAVLSQGAGVESLDFRLHLRYEFLMLGIQPVIDKLREHENSTLDRHLDFFEMLRNEDELEFAKRFELVHIDTKSATQMFELTRKRLTHSEAYPHFMSILHHCLQMPYKRSGNTVQYWLLLDRIIQQIVIQNDKGQDPDSTPLENFNIKNVVRMLVNENEVKQWKEQAEKMRKEHNELQQKLEKKERECDAKTQEKEEMMQTLNKMKEKLEKETTEHKQVKQQVADLTAQLHELSRRAVCASIPGGPSPGAPGGPFPSSVPGSLLPPPPPPPLPGGMLPPPPPPLPPGGPPPPPGPPPLGAIMPPPGAPMGLALKKKSIPQPTNALKSFNWSKLPENKLEGTVWTEIDDTKVFKILDLEDLERTFSAYQRQQDFFVNSNSKQKEADAIDDTLSSKLKVKELSVIDGRRAQNCNILLSRLKLSNDEIKRAILTMDEQEDLPKDMLEQLLKFVPEKSDIDLLEEHKHELDRMAKADRFLFEMSRINHYQQRLQSLYFKKKFAERVAEVKPKVEAIRSGSEEVFRSGALKQLLEVVLAFGNYMNKGQRGNAYGFKISSLNKIADTKSSIDKNITLLHYLITIVENKYPSVLNLNEELRDIPQAAKVNMTELDKEISTLRSGLKAVETELEYQKSQPPQPGDKFVSVVSQFITVASFSFSDVEDLLAEAKDLFTKAVKHFGEEAGKIQPDEFFGIFDQFLQAVSEAKQENENMRKKKEEEERRARMEAQLKEQRERERKMRKAKENSEESGEFDDLVSALRSGEVFDKDLSKLKRNRKRITNPDXLDSSRERPITKLNF

SEQ ID NO: 50863 - protein, 112 aa, Homo sapiens
  misc_feature (1)...(112): Xaa = X or * as defined in Table 2
PGGALRVPDAPAGAEGQELCRSDFPVGGAGVGDEEGVQCPAPAAHRDDTDLRGAHXEVQDAAGRRKQPDREQPAGAEEGAPHLPERVPPGXRHGTCTDRGQARACGGPLAPE

SEQ ID NO: 50864 - protein, 1939 aa, Homo sapiens
  DOMAIN (550)..(577): Protamine P1 proteins domain identified by eMATRIX, accession number BL00048, p-value=9.213e-09, raw score of 6.39
MSDNAGGERKDIMRRRAGPEQAREAARRPESVKQGLPPAEADVSSDAYGQEGGCPYLALRPVSSQAKTGSKRPGALKEWPGSGPLCSEVHSPAGCENLLGPPHSGLNGEHQQQGGASHSTARLQNLVAGAGLQLAEVTQVPVVPRRHELAPDLCTYRAVSQGEHVQGGVGAVPSSVTKAVLVERGQSVGDLDGAAQLHGCAGDPVVATFSVDRHGSTRQRQHRGQDKETGVRRRGQQNAHTPHGWSACGDGTEGETRRQVLEGVGHSVRTRSYGRSHRCSHGRSACDDKETGVRGCGQQRVHTLTRTVTRLHGRSHRRLHAHTEAHKDAYTVTDDHTDAHTVMRTLTRTVTHSHERSHRCSHGRSHGSSHGRSHTHTNGHTDAHTDGHTEAHTDSHTLTRTVTGMLTRTVTRMLTLTRTVTRMLTRTVTRMLTRSHGWSHGCSHGRSHAHTDGHTDAHTDSHTEAHTDGHRDAHTDGHTDAHRLTRSHGCSHGRSHGCSHAHTDGHTDAHMDGDTLTWTVTHGRSHTHGHTDAHTDGHTEAHTDGHSHERSHRCSHGRSHGSSHGRSHGSSHGRSHTDGHTHTNGHTDAHTDGHTEAHTDGHTLTRTVTHAHTDGHTEAHTDGHTEAHTDGHRDAHMDGHTDAHTDGHTDAHTDAHMDGHTLTRMVTHSHGRSQAHMDAHTDGHTDAHMDGHTLTDGHTLTRTLTRTVTRMLTWMVTLTRMVTHTDGHTLTRMLTQTVTQMLTWMVTLTRTLTRSHGRSHGRSHRCSHGWSHTRMLTCSHGRSHRCSHGWSHSHTDAHTHGCYTDGHTDAHMDGHTHTDAHTLTRTLTRTVTQMLTWVVTLTRTLTRSHGRSHGRSQMLTWVVTLTRMLTRSHGCYTDGHTCSHGWSHSHGRSHAHTDAHTDGHTDAHMDGHTHTDAHTLTRMLTRTVTQMLTWMVTHTDGHTLTRMLTRTVTHAHMDGHSLTRSHAHTDAHTVTRMLTWMVTLTRMVTHTDGHTLTDAHTDGHTDAHMDGHTHTDGHTLTRMLKWMVTLSHGWSHTRTVTRSRTLTRTVTQMLTWMVTHTDSHAHTDGHMDAHMDGHTLTRMVTHSHGRSHAHTDAHTDGHTDAHMDGHTDGHTLTRTLTRTVTRMLTWMVTHTDGHTLTRMLTRTVTQMLTWMVTHTDSHAHTDAHTDGHMDAHMDGHSHGWSHTRMVTLTRMLTRTVTQMLTWMVTHGRSHAHTDAHTDSHTDAHMDGHTHGRSHAHTRCSRSVTQMLTWMVTLSQAWSHTHTDGHTLTRTLTRTVTQTSHMGGHTHTDAHTLTRTLTRTVTQMLTWMVTLSHGRHGWSHAHTDGHTDAHMDGHTHTDGHTLTRTLTRTVTRMLTWMVTLSHGRSHAHTDAHTDGHTDGHTLTWTVTDAHMDGHSHRRSHTDGHTLTDAHMDGHTRTVTRSHGRSHGRSHAHTDGHTRMVTQTVTRMLTWMVTRSHGRSHAHTDAHTVGHTDAHTDGHTLTRTVTRSHGRSHGRSHGCSHGWSHAHTDGHTRTVTRSHGCSHGRSHTDGHTLTRTLTVTRMLTWMVTRSHGQSHAHTDAYTDGHTRTVTLTRMLTRTVTHGRSHAHTDAHTVTRSHGRSRSHGCSHGWSHAHTDSHTLTRMLTRTLTRMVTHAHTDGHTLTRTLTRTVTQMLTWMVTHTDGHTDAHMDGHTLTRMVTHTDGHTLTRMLTWTTVTRMLTDGHTDAHMDSHTDAPWTVIWMLTRAVTLSHGRSHGWSHRCSHGRSHSHMDGHTDAHMDGHTLTWTVTRMLTRTGTQTLTRTVTRMLTWMVTLTWTVTRMLTRMVTRMLTRMVTRTLTWTVTLSHGRSHGRSHGCSHGWSHGRSHGRSHSHTDAHTDGHTDAHTDGHTDAHMDGHTFHTNAHVDAHMDAHTLTWTLTHMDTHGNTDSHMDRRTLTDGHMLTRMLTPMVTWTLTRTARMW

SEQ ID NO: 50865 - protein, 32 aa, Homo sapiens; identical to SEQ ID NO: 33391
  DOMAIN (7)..(21): Transmembrane 4 family domain identified by PFam, accession name transmembrane4, E-value=0.0016, PFam score of 14.2
  misc_feature (1)...(32): Xaa = X or * as defined in Table 2

SEQ ID NO: 50866 - protein, 407 aa, Homo sapiens
  DOMAIN (15)..(39): TRANSMEMBRANE FOUR FAMILY SIGNATURE domain identified by eMATRIX, accession number PR00259A, p-value=3.721e-17, raw score of 9.27
  DOMAIN (14)..(286): Transmembrane 4 family domain identified by PFam, accession name transmembrane4, E-value=1.3e-48, PFam score of 158.4
  misc_feature (1)...(407): Xaa = X or * as defined in Table 2
VKMSAQESCLRLIKDFLFVFNLFFFALGSLIFCFGIWILIDKTSFLSFVGLAAFVPLQIWSKVLAISGNLSPWGIALLGLCWGALKELRCLLGLYFGMLLLLFATQITLEKSSSSNQRAQLERSLRDVVGKTIQKYGINPEETAPEENWDYVQSNLRWCGWHYGRDWFKVFILRGNGSEAHRVTRSXYNFMATXNSTILNKVIVHQLTRLEHLARSRHSADICAVPAESHITRKGCAQGIQKWLHNTLIFPXWAICLGVGLLELGFMTLSNIPVEETVDHGLPTGSARYRLGPAPPQSRAPPPVSVRWALPVLPVNICLIPRLAVEPSGVHISPGDTTWLRAPAAVTSPTGPGAFVHSFLSPSVGLPPPTRLFFTQTSNKPPAFLVNDHKKGGRSKKALEGPNVTRA

SEQ ID NO: 50867 - protein, 67 aa, Homo sapiens
FPGVWSVVLHQKHHPLHRPGAPQHQKTASWRGQAREAAGSSPGSLSSHTADRGDFLSLGCPSPLEGS

SEQ ID NO: 50868 - protein, 324 aa, Homo sapiens
  DOMAIN (48)..(72): HMW KININOGEN SIGNATURE domain identified by eMATRIX, accession number PR00334B, p-value=9.242e-11, raw score of 8.69
  misc_feature (1)...(324): Xaa = X or * as defined in Table 2
NNYNHHHHHHHHHDYYNHHHHYHHHHHHHHNYNHHHHDHHHNYKHHHHHYHQHHHNYNHHHHHHHSYNHHHHHHHHHHNYNHYHHHHHHHHHHHREYHHHHHHHHYHHHHHHNYNYHHHYHHHHHQHYHHNHHHHNHHYNHHYHHNQYHYHHYHHHDYYHHHHYHHHNYYYLYNRYHHYHHYHQSNHYRHHHHHHQYHHNHEPFAHHTXILFCSXKQDRNLHCAWPFFFPFFNCHHHCHHHHQQQQHSGVKTKQSRPESLLPERCIYLHQKHHPLHRPGAPQHQKTASWRGQAREAAGSSPGSLSSHTADHEVEAFKRCFYSRF

SEQ ID NO: 50869 - protein, 100 aa, Homo sapiens
MGSTVPRSASVLLLLLLLRRAEQPCGAEAHLRAAGQRHAMLPRGGHYDVDCYVEDPQGNTIYRETKKQYDSFTYRAEVKGVYQFCFSNEFSTFSHKTVYF

SEQ ID NO: 50870 - protein, 254 aa, Homo sapiens
MDDSTEREQSRLTSCLKKREEMKLKECVSILPRKESPSVRSSKDGKLLAATLLLALLSCCLTVVSFYQVAALQGDLASLRAELQGHHAEKLPAGAGAPKAGLEEAPAVTAGLKIFEPPAPGEGNSSQNSRNKRAVQGPEETAYPNETKPEKQFWEYDETSSLPPPKDHTSSSALNPNQEEIAELSEKEFRRSSIKLIKKAPEKALEVLARKIRQEKEEVKLLLFADDVIVYLENPKDSSKKLLELISEFSKVSI

SEQ ID NO: 50871 - protein, 327 aa, Homo sapiens
  misc_feature (1)...(327): Xaa = X or * as defined in Table 2
AISCHVVHAGHQQTQITGNDPFPVVTYSKGPNLQSSRSDMDDSTEREQSRLTSCLKKREEMKLKECVSILPRKESPSVRSYKDGKLLAATLLLALHACCLTEVSFYQVAALQGDLASLRAELQGHHAEKLPAGAGAPKAGLGGSSSCSPRDLKIFXTTSSREKAIPGSEQQKXGVPFQGPEETVTQDCLQLIADSETPTIQKGSYTFVPWLLSFKRGSALEEKENKILVKETGYFFIYGQVLYTDKTYAMGHLIQRKKVHVFGDELSLVTLFRCIQNMPETLPNNSCYSAGIAKLEEGDELQLAIPRENAQISLDGDVTFFGALKLL

SEQ ID NO: 50872 - protein, 279 aa, Homo sapiens
  DOMAIN (66)..(83): Serine proteases trypsin family, histidine proteins. domain identified by eMATRIX, accession number BL00134A, p-value=1.391e- 18, raw score of 11.96
  DOMAIN (37)..(279): Trypsin domain identified by PFam, accession name trypsin, E- value=1.6e-50, PFam score of 161.7
  misc_feature (1)...(279): Xaa = X or * as defined in Table 2
LQNSHGHTMIRTLLLSTLVAGALSCGDPTYPPYVTRVVGGEEARPNSWPWQVSLQYSSNGKWYHTCGGSLIANSWVLTAAHCISSSRTYRVGLGRHNLYVAESGSLAMSSVSKIVVHKDWNFNQISKGNDIALLKLANPVSLTDKIQLACFPPAGTILPNNYPCXVTGLGESCRTNGAVPDVLQQGRLLAVDYATCSSSAWWGSSVKTSMICAGGDGVISSCNGDSGGPLNCQASDALWQVHGIVSFGSRLGCNYYHKPSVFTRVSNYIDWINSVIAYN

SEQ ID NO: 50873 - protein, 132 aa, Homo sapiens
SVCWEDRYLKARMEESPLSRAPSRGGVNFLNVARTYIPNTKVECHYTLPPGTMPSASDWIGIFKPGYLPKPGAQLYQFRYVNRQGQVCGQSPPFQFREPRPMDELVTLEEADGGSDILLVVPKATVLQNQLD

SEQ ID NO: 50874 - protein, 131 aa, Homo sapiens
  misc_feature (1)...(131): Xaa = X or * as defined in Table 2
AKSWQEEQSAQAQRLKDKVAQMKDTLGQAQQRVVSEAPWQQETGNSKGKLXRSLRVXREGERHGXRLNNTTPSPNAVEWRERITSLADEXFTRNCDLHLLLSPEAELEPLKEQLRGAQELAASSQQKATLY

SEQ ID NO: 50875 - protein, 120 aa, Homo sapiens
  misc_feature (1)...(120): Xaa = X or * as defined in Table 2
NRPLLALVASDTQPLHTHTHTHTPLSDAPKPIPGAHLPCSYLEFPLTSVPHPSLFHNLRYSVWRGFLYFXGFLYSVSSPRISSHGKKXCICAFCEEWGEQVVPGIPISKAPLPLQVPPQQ

SEQ ID NO: 50876 - protein, 92 aa, Homo sapiens
PGEPRHMGPALRSLQVKKGTEHADPLPFPSVSLSGFTVGTLSETSTGGPATPTWKECPICKERFPAESDKDALEDHMDGTLLFSAPRDPFTF

SEQ ID NO: 50877 - protein, 753 aa, Homo sapiens
  DOMAIN (384)..(438): Kinesin light chain repeat proteins domain identified by eMATRIX, accession number BL01160B, p-value=9.676e-10, raw score of 19.54
MVGTQKFRFPPVPMNPGAQVERILQRSHFQRRDPNPAVLRICHKVAAKASIDPELDLISGPLVQITEMEPAKTQKPLWGSPVQMWIWSGPLALKSSSWKKMVSCAEDIILTRSVPEIEVKKKLLYPSYQFPIPKMEDKISQGQDGRITTKPGTIPWWSQLSQCSPDLHPQHQVPVTGLASSRWRLPVFGITTHLCGLSVPESTTDGSPIHTKCPSSKPAYLPKPGASAFTSFRYVEPPGPRQLCLKNQLDESQQERNDLMQLKLQLEGQVTELRSRVQELERALATARQEHTELMEQYKITEERDILSRQQGDHVARILELEDDIQTISEKVLTKEVELDRLRDTVKALTREQEKLLGQLKEVQADKEQSEAELQVAQQENHHLNLDLKEAKSWQEEQSAQAQRLKDKVAQMKDTLGQAQQRVAELEPLKEQLRGAQELAASSQQKATLLGEELASAAAARDRTIAELHRSRLEVAEEEKCQWSKERAGLLQSVEAEKDKILKLSAEILRLEKAVQEERTQNQVFKTELAREKDSSLEGKGAGYRREKQVSTHNPGPVDATGCPAALTDSEDESPEDMRLPPYGLCERGDPGSSPAGPREASPLVVISQPAPISPHLSGPAEDSSSDSPWLLFPYLSQCAAPPSWDTTPKPNPVSLASRRLKMRQSVLMAAVQSGGEEANLLLPELGSAFYDMASGFTVGTLSETSTGGPATPTWKECPICKERFPAESDKDALEDHMDGHFFFSTQDPFTFE

SEQ ID NO: 50878 - protein, 625 aa, Homo sapiens
  DOMAIN (350)..(380): Sulfatases proteins domain identified by eMATRIX, accession number BL00523E, p-value=9.333e-23, raw score of 19.27
  DOMAIN (97)..(546): Sulfatase domain identified by PFam, accession name Sulfatase, E-value=7.8e-116, PFam score of 398.2
  misc_feature (1)...(625): Xaa = X or * as defined in Table 2
SSPREKTSDSSHRPSRHGFLFLRLVGLSPFSYLCVPPSRPVPGSPRSLSAMRLLPLAPGRLRRGSPRHLPSCSPALLLLVLGGCLGVFGVAAGTRRPNVVLLLTDDQDEVLGGMTPLKKTKALIGEMGMTFSSAYVPSALCCPSRASILTGKYPHNHHVVNNTLEGNCSSKSWQKIQEPNTFPAILRSMCGYQTFFCRGNIXMKYGAPDAGGLGHVPLGLGVTWYALEKNSKYYNYTLFYSMGKARKHGENYSVDYLTDVLANVSLDFLDYKSNFXPFFMMIATPAPHSPWTAAPQYQKAFQNVFAPRNKNFNIHGTNKHWLIRQAKTPMTNSSIQFLDNAFRKRWQTLLSVDDLVEKLVKRLEFTGELNNTYIFYTSDNGYHTGQFSLPIDKRQLYEFDIKVPLLVRGPGIKPNQTSKMLVANIDLGPTILDIAGYDLNKTQMDGMSLLPILRGASNLTWRSDVLVEYQGEGRNVTDPTCPSLSPGVSQCFPDCVCEDAYNNTYACVRTMSALWNLQYCEFDDQEVFVEVYNLTADPDQITNIAKTFDPELLGKMNYRLMMLQSCSGPTCRTPGVFDPGYRFDPRLMFSNRGSVRTRRFSQTSSCSDPHTASADGSLHALFLMK

SEQ ID NO: 50879 - protein, 40 aa, Homo sapiens
TELSFEFQEDVKMLSHLLQALDYGAPPHGGIALGKQLFLL

SEQ ID NO: 50880 - protein, 423 aa, Homo sapiens
  DOMAIN (45)..(58): BTB (also known as BR-C/Ttk) domain proteins domain identified by eMATRIX, accession number PF00651, p-value=2.895e-11, raw score of 15.00
  DOMAIN (16)..(126): BTB/POZ domain identified by PFam, accession name BTB, E- value=1.1e-27, PFam score of 105.4
MEKGGNIQLEIPDFSNSVLSHLNQLRMQGRLCDIVVNVQGQAFRAHKVVLAASSPYFRDHMSLNEMSTVSISVIKNPTVFEQLLSFCYTGRICLQLADIISYLTAASFLQMQHIIDKCTQILEGIHFKINVAEVEAELSQTRTKHQERPPESHRVTPNLNRSLSPRHNTPKGNRRGQVSAVLDIRELSPPEESTSPQIIEPSSDVESREPILRINRAGQWYVETGVADRGGRSDDEVRVLGAVHIKTENLEEWLGPENQPSGEDGSSAEEVTAMVIDTTGHGSVGQENYTLGSSGAKVARPTSSEVDRRKIPESWNRPTTHLLLPTPVTYISCTLSPKRYRIYTSKSKGNVYIKAKNFRLQGLDRLICLVTGSPSIRDVIAFPKSFRGHDLMSNTPDSVPPEELKPYHIRVSKPTDSKAERAH

SEQ ID NO: 50881 - protein, 637 aa, Homo sapiens
  DOMAIN (549)..(588): tRNA synthetases class II domain identified by eMATRIX, accession number PF00152D, p-value=4.774e-29, raw score of 21.30
  DOMAIN (28)..(129): tRNA synthetase anti-codon binding domain identified by PFam, accession name tRNA_anti, E-value=3.7e-14, PFam score of 60.5
  misc_feature (1)...(637): Xaa = X or * as defined in Table 2
MDEAEFSSFVVRTNTCGELRSSHLGQEVTLCGWIQYRRQNTFLVLRDFDGLVQVIIPQDEVIENFLLLSKSFFDAIAGSAASVKKILCEAPVESVVQVSGTVISRPAGQENPKMPTGEIEIKVKTAELLNACKKLPFEIKNFVKKTEALRLQYRYLDLRSFQMQYNLRLRSQMVMKMREYLCNLHGFVDIETPTLFKRTPGGAKEFLVPSREPGKFYSLPQSPQQFKQLLMVGGLDRYFQVARCYRDEGSRPDRQPEFTQIDIEMSFVDQTGIQSLIEGLLQYSWPNDKDPVVVPFPTMTFAEVRPPYGTDKPDTRFGMKIIDISDVFRNTEIGFLQDALSKPHGTVKAICIPEGAKYLKRKDIGSIRNFAADHFNQEILPVFLNANRNWNSPVANFIMESQRLELIRLMETQEEDVVLLTAGEHNKACSLLGKLRTGNVAGPSRKQEGVVLRDPTLFSFLWVVDFPLFPGQRRKIQESWDRGQHPFTAPHPRXITLLYTEPKKARSQHYDLVLNGNEIGGGSIRIHNAELQRYILATLLKEDVKMLSHLLQALDYGAPPHGGIALGLDRLICLVTGSPSIRDVIAFPKSFRGHDLMSNTPDSVPSXGTEALSYPSLQANRLQSRKSSLNHAYHAES

SEQ ID NO: 50882 - protein, 142 aa, Homo sapiens
KEPVGCVNNISFLASLAGSTSRNRLQSTRGAGRLQNSGTGLSTNLQHFQEENFRKSSPQLEHTWSFFGECTTHHLPPVKAPLQTKKKTTNHCFLCGKKTGLASSYECRQVGELEKLRCFLCDNPAWGLCKIKYLNCLFITSL

SEQ ID NO: 50883 - protein, 549 aa, Homo sapiens; identical to SEQ ID NO: 38259
  DOMAIN (358)..(376): HIV REV INTERACTING PROTEIN SIGNATURE domain identified by eMATRIX, accession number PR00405B, p-value=8.744e-14, raw score of 11.83
  DOMAIN (327)..(447): Putative GTP-ase activating protein for Arf domain identified by PFam, accession name ArfGap, E-value=4.8e-49, PFam score of 176.4

SEQ ID NO: 50884 - protein, 1032 aa, Homo sapiens
  DOMAIN (841)..(859): HIV REV INTERACTING PROTEIN SIGNATURE domain identified by eMATRIX, accession number PR00405B, p-value=8.744e-14, raw score of 11.83
  DOMAIN (810)..(930): Putative GTP-ase activating protein for Arf domain identified by PFam, accession name ArfGap, E-value=7.1e-48, PFam score of 172.5
MVTHQQPAARKPNMTSKKPKPMGPKAHGIFSGTRKNNLEIYMDQTRTGIAKTKLSKNNKSGGMTLPDFKLYYKAIVAKIACGGSMYNSDTDEDEETEPSSSGQQIIENSITMNKMKLLKAKMKNMNLSKKHITQVSDEEEDDDGCDLFADSEKEEKDIEDIEENTRPKRSRPTSFADELAARIKGDAVGRVDEEPTTVSYEDDRRGKNQDAYTEGGLSTIKTVNCSSSLTLRRSKTSEDTQEKKERRTPSDDEEDNLFAPPKLTDEDFSPFGSGGGLFSGGKGLFDDEDEEDIEESSNPLWSGYSLRWAREPPQQPETHTVVSTNEKPEQWLKGENWGSVSTPLQKRSRPTSFADELAARIKGDAMGRVDEEPTNEEDNLFAPPKLTDEDFSPFGSGGGLFSGGKGLFDDEDEESDLFTEAPQDRQAGASVKEGKLGLGSCVSVCRVPKLSFSLGDGTLRRHGCAASVPSLKEPQKPEQPTPRKSPYGPPPTGLFDDDDGDDDNDFFSTPHSKPSKTGTEKPFRKIGMDCDLGDTSSYHTKVSTVHITKNRNGGGSLNNYSSSIPSTPSTSQEDPQFSVPPTANTPTPVCKRSMRWSNLFTSEKGSDPDKERKAPENHADTIGSGRAIPIKQGMLLKRSGKWLKTWKKKYVTLCSNGVLTYYSSLGDYMKNIHKKEIDLQTSTIKVPGKWPSLATSACAPISSSKSNDLSKDMDTGLGDSICFSPSISSTTGPKLNPPPSPHANKKKHLKKKSTNNFMIVSATGQTWHFEATTYEERDAWVQAIQSQILASLQSCESSKSKSQLTSQSEAMALQSIQNMRGNAHCVDCETQNPKWASLNLGVLMCIECSGIHRSLGTRLSRVRSLELDDWPVELRKVMSSIGNDLANSIWEGSSQGQTKPSEKSTREEKERWILSKYEEKLFLAPLPCTDLSLGQQLLRATADEDLQTAILLLAHGSREEVNETCGEGDGCTALHLACRKGNVVLAQLLIWYGVDVMARDAHGNTALTYARQASSQECINVLLQYGCPDECV

SEQ ID NO: 50885 - protein, 139 aa, Homo sapiens
SRNRLQSTRGAGRLQNSGTGLSTNLQHFQEENFRKSSPQLEHTGVFLSTHGVGMNGNNAAAGKSVGECTTHHLPPVKAPLQTKKKTTNHCFLCGKKTGLASSYECRQVGELEKLRCFLCDNPAWGLCKIKYLNCLFITS

SEQ ID NO: 50886 - protein, 170 aa, Homo sapiens
  misc_feature (1)...(170): Xaa = X or * as defined in Table 2
SFRFGHSHGLWKRKKVAXGSNAIQHNMLQGKQNFHGAALWYKGNSTQSKRPQRAPXESSTTKRGLQLSRQTLQLDPGGTVPCSEEYCICQXEGPASRNRYNGVPSHFPSPTCIRESSHSGKILKSRLRCWGWPTDPWSVLPMDPRTSPLCAAGSQAVVAHSGRQQKYPAL

SEQ ID NO: 50887 - protein, 228 aa, Homo sapiens
KKTTLLTLSKTRNILNPFKVVKKKAYGSRKHLRQHLAINPAALLPTAASQISEVKPVLPELAFPSSEHRRSHGLESVPVLPGSGEAGVSFDLPAQADTLHSANKSRVKMRGKRRPQTRAARRLAAQESSEAEDMRSPEDPLHSGLMAPFPQMAIGHSSEQPVEKTALRRPWQLPLHLGKVVLCLEWTQAPLQSLWVIPEGRLTFLILGTFFPRALDLSPWREQNPRQR

SEQ ID NO: 50888 - protein, 991 aa, Homo sapiens
  DOMAIN (735)..(753): HIV REV INTERACTING PROTEIN SIGNATURE domain identified by eMATRIX, accession number PR00405B, p-value=1.563e-13, raw score of 11.83
  DOMAIN (523)..(686): PH domain identified by PFam, accession name PH, E-value=2.1e -15, PFam score of 60.0
  misc_feature (1)...(991): Xaa = X or * as defined in Table 2
MATAPSPPMLTLAPAWLCPATTTPRDHSEASLEALPGDPPAHPAAAATAAAVIPALEPPHTPVYAIFVNHSLLDLYIDRPLPYLIGSKLFMEQEDVGLGELSSEEGNADEQSSGLEGACKVNLELLLTNADKGLKAPEQHLKHVAGVLNGESVETSVLNYRELSPHKNRLLSPLRCSAPMSLHNSLVKPERQSKCFEFGKLQPSSSQSLDVQNITDSSFSRTTCFQGVKVDSLGKRSDVISKVEARDITEMTNKASKEPVGCVNNISFLASLAGSTSRNRLQSTRGAGRLQNSGTGLSTNLQHFQEENFRKSSPQLEHTGVFLASCKRRQTVQDLKASVLERVAICLHHGAERVREPRRVLPPRGLLIAMVQQMIELKVTLIRAQKEKRRAREKASIFLQNTYIIINRMFVGMMDFKGPSGEVLGRNAEQVSTVHITKNRNGGGSLNNYSSSIPSTPSIPARRDPQFSVPPTANTPTPVCKRSMRWSNLFTSRKGEXPRTKRGKAPGGIMVDTIGEAGRAIPIKQGMLLKRSGKWLKTWKKKYVTLCSNGMLTYYSSLGDYYEELFIKKEIDLQTSTNQKSQEKWPSLATSACTPISSSKSNGLSKDMDTGLGDSICFSPSISSTTSPKLNPPPSPHANKKKHLKKKSTNNFMIVSATGQTWHFEATTYEERDAWVQAIQSQILASLQSCESSKSKSQLTSQSKAMALQSIQNMRGNAHCVDCXETQNPKWASLNLGVLMCIECSGIHRSLGHPPFPVLRSLGAGMDWPVXAQGRLCSSIGQXPXPTASWEGSSQGQTKPSEKSTREEKERWIRSKYEEKLFAGPHYPALKLSLGQQLLRATTDEDLQTAILLLAHGSREEVNETCGEGDGCTALHLACRKGNVVLAQLLIWYGVDVMARDAHGEHSAXPYAPAGPPAQECINVLLQYGCPDGVCVVSGFIXLQSSLVQKQNGKNKEYLRISKRKSQIQLIIAFSVLFRKLSKYTKLFDFF

SEQ ID NO: 50889 - protein, 392 aa, Homo sapiens
  DOMAIN (89)..(105): Bacterial extracellular solute-binding proteins family 5 sig. domain identified by eMATRIX, accession number BL01040B, p-value= 3.143e-14, raw score of 13.74
  DOMAIN (1)..(302): Bacterial extracellular solute-binding prot domain identified by PFam, accession name SBP_bac_5, E-value=8.8e-94, PFam score of 325.0
MFAEYAGSYEKDDRQEQLDRQPVGTGSGGFRLRRHRTSVETPDRGMRRSGLACCQTSYHICGGAHHHDGIGDIQPPAFLAMNVAYLAFNTAKPPLNNPAVRHALALAINNQRLMQSIYYGTAETAASILPRASWAYDNEAKITEYNPAKSREQLKSPLKTAELIQADMAQVGVKVVIVPVEGRFQEARLMDMSHDLTLSGWATDSNDPDSFFRPLLSCAASHSQTNLAHWCDPKFDSVLRKALSSQQLAARIEAYDEAQSILAQELPILPLASSLRLQAYRYDIKGLVLSPFGNASFAGVYREKQDESAREPLLFRVALLPGSVGGRHGPQKKEDKSAEGVSIRYYISSKDMDAKEFAHAIRAHWLIEHSLHWVLDVKMNEDASRIRRGNAA

SEQ ID NO: 50890 - protein, 121 aa, Homo sapiens
FVLGRAVRGSLLQLAERELAVGSGPAFQAGRVPAPQVRVCAVKNTPRRCGPRPAPGGSLFGGGNQRELARQKNMKKTQEISKGKRKEDSLTASQRKQRDSEIMQEKQKAANEKKSMQTREK

SEQ ID NO: 50891 - protein, 104 aa, Homo sapiens
  misc_feature (1)...(104): Xaa = X or * as defined in Table 2
RYPRVPENRCFSELLFFQAPLGVGMARGNQRELARQKNLKETQEISRGKGKEDSLTALSRKQRDSXIIAKKQKAANEKKSMQTRENVMTGYLENPGATAQLGVS

SEQ ID NO: 50892 - protein, 66 aa, Homo sapiens
VQWRVLSLLNLRLLGLGNCCASASLCLLGLGDCSTSSTLRLLGFGDCSTSSTLHLLGLGGFSTSAS

SEQ ID NO: 50893 - protein, 85 aa, Homo sapiens
MMVVEALCELHCPEAIQGIADWTSSIVGKKLMWINSVAQQAEGRYLAEWMVHGYPSENVWELDLKRFGALQSSRTFLRHRVMEVM

SEQ ID NO: 50894 - protein, 125 aa, Homo sapiens; identical to SEQ ID NO: 31589
  DOMAIN (56)..(84): !!!! PROTEIN ALU SUBFAMILY WARNING ENTRY NUCLEAR PHOSPHO domain identified by eMATRIX, accession number PD02454B, p-value= 4.784e-11, raw score of 11.61

SEQ ID NO: 50895 - protein, 199 aa, Homo sapiens
  DOMAIN (93)..(135): Flocculin repeat proteins domain identified by eMATRIX, accession number PF00624N, p-value=8.172e-10, raw score of 9.82
  misc_feature (1)...(199): Xaa = X or * as defined in Table 2
QKRGRLFKIILKVVLYLMKVIVIHRKMFQRAQELRWRAEDYHKCKAFSDHPLCKKASLQLGQNGGSGASSFFRIALLALPHSXNFKKQDGPPATSSNSTTFYNXXLPEPQDTSRMSSYSLSTLSSSTLRGXXSQDSSLSYSGGRGRKITETQEAEVEXAENRSLHSSLGNKKKSVSGTKEKNQKTKQNPHSKNKLTKNK

SEQ ID NO: 50896 - protein, 301 aa, Homo sapiens
KFRMLSLLSGIIRSLAGHTLNPDQDVSQWTTADSDEGHGNNQLRLVLLLQYLENLEKLMYNAYEGCANALTSPPKGNELEVSIMMVVEALCELHCPEAIQGIAVWSSSIVGKHLLWINSVAQQAEGRFEKASVEYQEHLCAMTGVDCCISSFDKSVLTLASAGCKSASLKHCLNGNKACECYISTADWAAVQEWQNAIHDLKKSTSSTSLNLKADFNYIKNVVKYLKQTSRIAIGPLRLSTLTVSQSLPVLSTLQLYCSSALETTVSNRLSTEDCLIPLFGEALRSCKQHDVRPWMQALRK

SEQ ID NO: 50897 - protein, 150 aa, Homo sapiens
  DOMAIN (43)..(72): Respiratory-chain NADH dehydrogenase subunit 1 proteins domain identified by eMATRIX, accession number BL00667D, p-value= 4.600e-09, raw score of 15.38
MRVLWMLFWLLFWLLLEFISHQSTCVINTLADHHHRGTDFGGSPWLRIIIAFPRSYKVVLTLWTVYLWLSFLKTIFQSENGHDVSTDVQQRARRSNRRRQEGNKIGLKDVITLRRHVETKGRAKIRKMKVTTKINHHDKINGKRKTAKKQ

SEQ ID NO: 50898 - protein, 150 aa, Homo sapiens
  misc_feature (1)...(150): Xaa = X or * as defined in Table 2
MAAVEHRHSSGLPYWPYLTAETFKKQDGATSPPPPTQQHSITDNSLSLKTPPECLLHPLPPSVDDNIKECPLAPLPPSVDDNLKECLLVPLPPSPLPPSVDDNLKDCLFVPLPPSPLPPSVDDNLKTPPLATQEXRGGKTHPKPQEVEGG

SEQ ID NO: 50899 - protein, 111 aa, Homo sapiens
MAAAEHRHSSGLPCWPYLTAETLKNRMGHQPPPPTQQHSIIDNSLSLKTPSECVLYPLPPSADDNLKTPPECLLTPLPPSAPPSADDNLKTPPECVCSLPFHPQRMIISRN

SEQ ID NO: 50900 - protein, 75 aa, Homo sapiens
MFQTQLEVSKRFCAGEAACYKLPKLWEDIVFIPPSAEAVRQEALGSTQRWAFSIVCQVFIVWAQGTEKSQLSGIL

SEQ ID NO: 50901 - protein, 257 aa, Homo sapiens
VINTLADHRHRGTDFGGSPWLHVIIAFPPSYKVVITLWIVYLWVSLLKTIFWSRNGHDGSTDVQQRAWRSNRRRQEGLRSICMHTKKRVSSFRGNKIVLKDVITLRRHVETKVRAKIRKRKVTTKINHHDKINGKRKTARKQLSQHSISHVLAFSDPPFCKKGSLQLAPPSADDNIKIPAERLRIPLPPSADDNLKTPSERQLTPLPPSAPPSADDNIKTPAERLRGPLPPSADDNLKTPSERQLSSPSTLSSTLSR

SEQ ID NO: 50902 - protein, 117 aa, Homo sapiens
TIFPSHNGHDGSTDVQQRARRSNRRRQEGIKIVLEDIFTLWRQVETKVRAKIRKMKVTTKVNRHDKINGKRKTAKEQEMFQRAQALRRRAEDYYRCKITPSARKAFFANRVQQWRQW

SEQ ID NO: 50903 - protein, 257 aa, Homo sapiens
MVKLSIVLTPQFLSHDQGQLTKELQQHVKSVTCPCEYLRKVINTLADHHHRGTDFGGSPWLHVIIAFPTSYKVVITLWIVYLWVSLLKTIFWSRNGHDGSTDVQQRAWRSNRRRQEGLRSICMHTKKRVSSFRGNKIGLKDVITLRRHVETKVRAKIRKRKVTTKINHHDKINGKRKTARKQKMFQRAQELRRRAEDYHKCKIPPSARKALCNWVRMAAAEHRHSSGLPYWPYLTAETLKKQDGPPATSSNSTTFYN

SEQ ID NO: 50904 - protein, 855 aa, Homo sapiens
  DOMAIN (42)..(84): Putative peptidoglycan binding domain identified by PFam, accession name PG_binding_2, E-value=2.6e-07, PFam score of 37.7
  misc_feature (1)...(855): Xaa = X or * as defined in Table 2
XALMIEIDGGESWSFMDDNQNKTHDKKEKKMVVQKPHGTMEYTAGNQDTLNSIALKFNITPNKLVELNKLFTHTIVPGQVLFVPDANSPSSTLRLSSSSPGATVSPSSSDAEYDKLPDADLARKALKPIERVLSSTSEEDEPGVVKFLKMNCRYFTDGKGVVGGVMIVTPNNIMFDPHKSDPLVIENGCEEYGLICPMEEVVSIALYNDISHMKIKDALPSPGEWEDLASEKDINPFSKFKSINKEKRQQNGEKIMTSDSRPIVPLEKSTGHTPTKPSGSSVSEKLKKLDSSRETSHGSPTVTKLSKEPSDTSSAFESTAKENFLGEDDDFVDLEELSSQTGGGMHKKDTLKECLSLDPEERKKAESQINNSAVEMQVQSALAFLGTENDVELKGALDLETCEKQDIMPEVDKQSGSPESRVENTLNIHEDLDKVKLIEYYLTKNKEGPQVSENLQKTELSDGKSIEPGGIDITLSSSLSQAGDPITEGNKEPDKTWVKKGEPLPVKLNSSTEANVIKEALDSSLESTLDNSCQGAQMDNKSEVQLWLLKRIQVPIEDILPSKEEKSKTPPMFLCIKVGKPMRKSFATHTAAMVQQYGKRRKQPEYWFAVPRERVDHLYTFFVQWSPDVYGKDAKEQGFVVVEKEELNMIDNFFSEPTTKSWEIITVEEAKRRKSTCSYYEDEDEEVLPVLRPHSALLENMHIEQLARRLPCKGYPWRLAYSTLEHGTSLKTLYRKSASLDSPVLLVIKDMDNQIFGAYATHPFKFSDHYYGTGETFLYTFSPHFKVFKWSGENSYFINGDISSLELGGGGGRFGLWLDADLYHGRSNSCSTFNNDILSKKEDFIVQDLEVWAFD

SEQ ID NO: 50905 - protein, 57 aa, Homo sapiens
MGGLEKKKYERGSATNYITRNKARKKLQLSLADPSCSLAGPVGSPRFPWMELPCWCL

SEQ ID NO: 50906 - protein, 70 aa, Homo sapiens
  misc_feature (1)...(70): Xaa = X or * as defined in Table 2
MLSXWASGQPSLPLDGAALLVPGQRRGLCAQPDSLLPGASDMRCRGPPSPLPTAPIHPGFPQPPPTQLDP

SEQ ID NO: 50907 - protein, 70 aa, Homo sapiens
MLSGWASGQPSLPLDGAALLVPGQRRGLCAQPDSLLPGASDMRCRGPPSPLPTAPIHPGFPQPPPTQLDP

SEQ ID NO: 50908 - protein, 109 aa, Homo sapiens
MEFMHYIIAASALPQGLPVHQRHLLPDMDYRVMATFTEFYSTLLGFINFHLYQWLNLHYPLKLEGQAQEEAKASEGTHALDSESSMEKMAALTASLARVVVPATEEEPE

SEQ ID NO: 50909 - protein, 633 aa, Homo sapiens
  DOMAIN (573)..(607): Amyloidogenic glycoprotein extracellular domain proteins domain identified by eMATRIX, accession number BL00319C, p-value= 5.855e-09, raw score of 17.12
MKLPTFKYERGSATNYITRNKARKKLQLSLADFRRLCILKGIYPHEPKHKKKVNKGSTAARTFYLIKDIRFLLHEPIVNKFREYKVFVRKLRKAYGKSEWNTVERLKDNKPNYKLDHIIKERHVQGMRGMEDITYAGDRWPGPVISAAEGKQPPPRSLLHQGSFGFPFSILDLPVECLCTKVSTFKESHRAPDSVYRRAPQNPHVGQGWVFEPSGRILVKWFLLGAVVSCGEAAPARYPTFIDCPAGPGTIALFHVLPVFQLSRGLGKCHVQTIQLCRRLTVEFMHYIIAARALRKVFLSIKGIYYQAEVLGQPIVWITPYAFSHDHPTDVDYRVMATFTEFYTTLLGFVNFRLYQLLNLHYPPKLEGQAQAEAKAGEGTYALDSESCMEKLAALSASLARVVVPATEEEAEVDEFPTDGEMSAQEEDRRKELEAQEKHKKLFEGLKFFLNPRVAPVSPWLSSSGVLVGKCPGTNLLCIGATYDVTDSRITHQIVDRPGQQTSVIGSPSGWFDSGNARLLLPVAEYFSGVQLPPHLSPFVTEKEGDYVPPEKLKLLALQRGEDPGNLNESEEEEEEDDNNEGDGDEEGENEEEEEDAEAGSEKEEEARLAALEEQRMEGKKPRVMGRHLKAGG

SEQ ID NO: 50910 - protein, 117 aa, Homo sapiens
MEIFTLFNKPKSHQKCRQYYPVTIPLHVSKNGQIVSGLDANWLEHMSDHFRKGGMLVNAVFYLGIVNGCRSADRLRAPAELAGGLWLAAHLCATNSRRQDYQRGEYIHQADCLSSET

SEQ ID NO: 50911 - protein, 86 aa, Homo sapiens
  misc_feature (1)...(86): Xaa = X or * as defined in Table 2
MAGSQKTDLHNEGYILELDCCSSLDHPTDQKLIPEFIKKIQEAASQGLKFVGVIPQYHSSVNSAGSSAPVSTANSTEDARDAKNAX

SEQ ID NO: 50912 - protein, 144 aa, Homo sapiens
MTPLHPFPAKKSWPKIQASQGSAQVPIRRGPGGAALAAPEPRQRATCREAPRAVPTTRQRPGPWGQTEGPVPVDTHKPCRAPPAAYRMGPAEENGAVAGSLRQRVRSREESLCHTKEAARGGLGRRWVEAWAVAPRGRVSDPPA

SEQ ID NO: 50913 - protein, 431 aa, Homo sapiens
MCPMEYRFLGVHDSECCGAPWVLTTTGSCYQQGFSLAALHPFVQPTHEREKTPLEHIFRAILIKKTDRSQKTDLHNEGYILELDCCSSLDHPTDQKLIPEFIKKIQEAASQGLKFVGVIPQYHSSVNSAGSSAPVSTANSTEDARDAKNARGDHASLENEKPGTGDNGQTVSGLDANWLEHMSDHFRKGGMLVNAVFYLGIVNDSLHGLTDAVFIFEAVSTEDSKTIQGYDAIVVEQWTVLEGVEVQTDYVPLLNSLAAYGWQLTCVLPTPVVKTTSEGSISTKQIVFLQRPCLPQKIKKKESIFQEEMHNRQMRKSKGKLSARDKQQAEENEKNLEDQSSKAGDMGNCVSGQQQEGGVSEEMKGPVQEDKGEQLSPGGLLCGVGVEGEAVQNGPASHSRALEGICTGHSNPGEDARDGDAEDIKKLCTGE

SEQ ID NO: 50914 - protein, 154 aa, Homo sapiens
MAFQIALEILFQGGEPVEPSGAAIISPEISKDNSCKENCTCSSCLLRAPTISDLLNDQDLLDVIRIKLDPCHPTVKNWRNFASKWGMSYDELCFLEQRPQSPTLEFLLRNSQRTVGQLMELCRLYHRADVEKVLRRWVDEEWPKRERGDPSRHF

SEQ ID NO: 50915 - protein, 346 aa, Homo sapiens
  DOMAIN (13)..(52): Hydroxymethylglutaryl-coenzyme A synthase proteins domain identified by eMATRIX, accession number BL01226A, p-value=1.000e- 40, raw score of 13.79
  DOMAIN (13)..(346): Hydroxymethylglutaryl-coenzyme A synthas domain identified by PFam, accession name HMG_CoA_synt, E-value=2.7e-200, PFam score of 678.8
MPGSLPLNAEACWPKDVGIVALEIYFPSQYVDQAELEKYDGVDAGKDTIGLGQAKMGFCTNREDINSLCMTVVQNLMERNNLSYDCIGRLEVGTETIIDKSKSVKTNLMQLFEESGNTDIEGIDTTNACYGGTAAVFNAVNWIESSSWDGRGFVGTHMQHAYDFYKPDMLSEYPIVDGKLSIQCYLSALDRCYSVYCKKIHAQWQKEGNDKDFTLNDFGFMIFHSPYCKLVQKSLARMLLNDFLNDQNRDKNSIYSGLEAFGDVKLEDTYFDRDVEKAFMKASSELFSQKTKASLLVSNQNGNMYTSSVYGSLASVLAQYSPQQLAGKRIGVFSYGSGFGCHSVLS

SEQ ID NO: 50916 - protein, 67 aa, Homo sapiens
  misc_feature (1)...(67): Xaa = X or * as defined in Table 2
MHPRRMPHSAEQDRGSPPPTHAAYAGTGELISKATRHTEKQPQEERPLLTWVAGIPQRFQMSQFXKP

SEQ ID NO: 50917 - protein, 47 aa, Homo sapiens
  misc_feature (1)...(47): Xaa = X or * as defined in Table 2
XFVTCPNEKVAKEIARAVVEKRLAACVNLIPQITSIYEWKGKIEEDX

SEQ ID NO: 50918 - protein, 80 aa, Homo sapiens
  misc_feature (1)...(80): Xaa = X or * as defined in Table 2
MPSPASDSGSGYVPGSVSAAFVTCPNEKVAKEIARAVVEKRLAACVNLIPQITSIYEWKGKIEEDSEVLMFCAPLRSGRX

SEQ ID NO: 50919 - protein, 86 aa, Homo sapiens
MSGGRAPAVLLGGVASLLLSFVWMPALLPVASRLLLLPRVLLTMASGSPPTQPSPASDSGSGYVPGSVSAAFVTCPNEKVAKEIAS

SEQ ID NO: 50920 - protein, 108 aa, Homo sapiens
MSGGRAPAVLLGGVVSDRPRPAPSGPRSLDRYPHPKSQRRFAKEIARAVVEKRLAACVNLIPQITSIYEWKGKIEEDSEVLMMIKTQSSLVPALTDFVRSVHPYEVAE

SEQ ID NO: 50921 - protein, 50 aa, Homo sapiens
MGLWEAHPTQALARPRIPALANVPGFGLLQPLLICPQRERFAKGDRQGPW

SEQ ID NO: 50922 - protein, 507 aa, Homo sapiens
MVPKKMGFATVLAEAVTSLDLPVAIINLKEYDPDDHLIEEVTSKNVCVFLVATYTDGLPTESAEWFCKWLEEASIDFRFGKTYLKGMRDAVFGLGNSAYASHFNKVGKNVDKWLWMLGVHRVMSRGEGDCDVVKSKHGSIEANFRAWKTKFISQLQALQKGERKKSCGGHCKKGKCESHQHGSEEREEGSQEQDELHHRDTKSRQETRISDLESPKVRTGTARRTELPRGVSAVPSGCRTVGSYDAARPVLIGSEDEEVGPEESPELRERKPVPAAMSIFTPTNQIRLTNVAVVRMKRARKRFEIACYRNKVVGWRSGLDWHSVAAAVCTPPLCFLRPPMTFFSSQVAKKEDLISAFGTDDQTEICKQADKCVTPETKRPYTVILIERAMKDIHYLVKTNRSTKQQALEVIKQLKEKMKIERAHMRLQFILPVNEGKKLKEKLKPLIKVIESKDYGQQLEIQAAGPTPNPRHFGNSTGHAREKVQDFNFQDPGKPLTISKGQGRRDL

SEQ ID NO: 50923 - protein, 64 aa, Homo sapiens
MSIFTPTNQIRLTNVARGTDEARQEALRNRLLQKQGRRLAERLVWLPRRKISSVRLEQMTKLKS

SEQ ID NO: 50924 - protein, 118 aa, Homo sapiens
MKDIHYLVKTNRSTKQQALEVIKQLKEKMKIERAHMRLQFILPVNEGKKLKEKLKPLIKVIESKDYGQQLEIQAAGPTPNPRHFGNSTGHAREKVQDFNFQDPGKPLTISKGQGRRDL

SEQ ID NO: 50925 - protein, 224 aa, Homo sapiens
  misc_feature (1)...(224): Xaa = X or * as defined in Table 2
XAARRSVVTARRWWPSGWTARVSPGSPASGSLNSRDVDLHPHQPDPPNQCGRGTNEACREALRNRLLQKQGRRLAERPWKKTSDEVLQDPLSVCKCFLKRPYTVILIERAMKDIHYSVKTNKSTKQQALEVIKQLKEKMKIERAHMRLRFILPVNEGKKLKEKLKPLIKVIESEDYGQQLEIVCLIDPGCFREIDELIKKETKGKGSLEVLNLKDVEEGDEKFE

SEQ ID NO: 50926 - protein, 109 aa, Homo sapiens
  misc_feature (1)...(109): Xaa = X or * as defined in Table 2
MEKLFNENEGMPSNQGKIDNEEQPPHEGKPEVACILEDKKLENEGNTENTGKRVEEPLKDKEKPESAGKAKGEGKSERKGKSEMQGGSKTEGKPERGGRAEGEGEPDMX

SEQ ID NO: 50927 - protein, 61 aa, Homo sapiens
MIKGLQVLMGRMESVFNHAIRHTVYAALQDFSQVTLMEPLRQAIKKKKNVIQSVLQAIRKT

SEQ ID NO: 50928 - protein, 77 aa, Homo sapiens
  misc_feature (1)...(77): Xaa = X or * as defined in Table 2
MCSSSADQIDLNRLITPGVSAAMYKSLELAIGRFESEDLTSIVELDGLLEINRMTHKLLSRYLTSCPTTATTALPTX

SEQ ID NO: 50929 - protein, 283 aa, Homo sapiens
  misc_feature (1)...(283): Xaa = X or * as defined in Table 2
MAAQVTLEDALSNVDLLEELPLPDQQPCIEPPPSSLLYQPNFNTNFEDRNAFVTGIARYIEQATVHSSMVMGFGLYLMDGSVSNIYKLDAKKRINLSKIDKYFKTDAHYSILSLLLCLSDSPSNSSYVETPRNKEVEKKDDFDWGKYLMEDEEMDIGPYMDTPLWFREFFLELTMGRRIQFPIEMSMPWILTDHILETKEASMMENKNVPVNHRDFWYATYTLYSVSEKTENEEKMSDNASASSGSDQGPSSRQHTMVSFLKPVLKQIIMAGKSMQLLKNLQX

SEQ ID NO: 50930 - protein, 868 aa, Homo sapiens
MAAQVTLEDALSNVDLLEELPLPDQQPCIEPPPSSLLYQPNFNTNFEDRNAFVTGIARYIEQATVHSSMNEMLEEGQEYAVMLYTWRSCSRAIPQVKCNEQPNRVEIYEKTVEVLEPEVTKLMNFMYLQRNAIERFCGEVRRLCHAERRKDFVSEAYLITLGKFINMFAVLDELKNMKCSVKNDHSAYKRAAQFLRKMADPQSIQESQNLSMFLANHNKITQSLQQQLEVISGYEELLADIVNLCVDYYENRMYLTPSEKHMLLKVMGFGLYLMDGSVSNIYKLDAKKRINLSKIDKYFKQLQVVPLFGDMQIELARYIKTSAHYEENKSRWTCTSSGSSPQYNICEQMIQIREDHMRFISELARYSNSEVVTGSGRQEAQKTDAEYRKLFDLALQGLQLLSQWSAHVMEVYSWKLVHPTDKYSNKDCPDSAEEYERATRYNYTSEEKFALVEVIAMIKGLQVLMGRMESVFNHAIRHTVYAALQDFSQLWFREFFLELTMGRRIQFPIEMSMPWILTDHILETKEASMMEYVLYSLDPHIDSRLTTALTRFNKQFLYDEIEARVELDGLLEINRMTHKLLSRYLTLDGFDAMFREANHNHLRQLPELRGTLHTFKSSAGFSANQGIAVVMEELLKVVKSLLQGTILQYVKTLMEVMPKICRLPRHEYGSSELKTVCFQNLREVGNAILFCLLIEQSLSLEEVCDLLHAAPFQNILPRVHVKEGERLDAKMKRLESKYAPLHLVPLIERLGTPQQIAIAREGDLLTKERLCCGLSMFEVILTRIRSFLDDPIWRGPLPSNGVMHVDECVEFHRLWSAMQFVYCIPVGTHEVHSRTSALVMGYTGLAVLIIVLLGQHRRFPVLGISATI

SEQ ID NO: 50931 - protein, 73 aa, Homo sapiens
  DOMAIN (10)..(23): SH3 DOMAIN SIGNATURE domain identified by eMATRIX, accession number PR00452D, p-value=3.077e-09, raw score of 17.02
MWWFGEVQGQKGWFPKSYVKLISGPIRKSTSMDSGSSESPASLKRVASPAAKPVVSGEGLWNCWENREFRKKT

SEQ ID NO: 50932 - protein, 233 aa, Homo sapiens
  DOMAIN (81)..(227): RhoGEF domain identified by PFam, accession name RhoGEF, E- value=0.0012, PFam score of -4.2
MTRHESPGFCCPHGFPNGPVENIPFDPPNHFMERSIFIMGVPPQRESEPTSGAHCGIVGPRCSDLHLLDMLTPTERKRQGYIHELIVTEENYVNDLQLVTEIFQKPLMESELLTEKEVAMIFVNWKELIMCNIKLLKALRVRKKMSGEKMPVKMIGDILSAQLPHMQPYIRFCSRQLNGAALIQQKTDEAPDFKEFVKLEQVPVPGDSYQVSGLQSMQLPVSKALNQTTAFDS

SEQ ID NO: 50933 - protein, 448 aa, Homo sapiens
  DOMAIN (289)..(370): C2 domain identified by PFam, accession name C2, E-value=8.5e -15, PFam score of 62.6
MGPFTASRNATHWSHQGVAVICYVIAMWVLRAAIAQVGAVHERMILENTPENHPDHSHLKHALEKAEELCSQVNEGVREKENSDRLEWIQAHVQCEGLSENLVEVMDPREVLEPRFSAHRVSKGQWREGAVPFLFAERQLVFNSVTNCLGPRKFLHSGKLYKAKSNKELYGFLFNDFLLLTQITKPLGSSGTDKVFSPKSNLQYKMYKTPIFLNEVLVKLPTDPSGDEPIFHISHIDRVYTLRAESINERTAWVQKIKAASELYIETEKKKREKAYLVRSQRATGIGRLMVNVVEGIELKPCRSHGKSNPYCEVTMGSQCHITKTIQDTLNPKWNSNCQFFIRDLEQEVLCITVFERDQFSPDDFLGRTEIRVADIKKDQGSKGPVTKCLLLHEVPTGEIVVRLDLQLFDEPWMDSIISWNQVCCDHESLKMWLIRIQAWTNLERGTF

SEQ ID NO: 50934 - protein, 932 aa, Homo sapiens
  DOMAIN (492)..(513): NEUTROPHIL CYTOSOL FACTOR 2 SIGNATURE domain identified by eMATRIX, accession number PR00499D, p-value=4.349e-09, raw score of 10.18
  DOMAIN (283)..(649): SH3 domain identified by PFam, accession name SH3, E-value=6e -60, PFam score of 212.6
  misc_feature (1)...(932): Xaa = X or * as defined in Table 2
XNKEQEDIVVLKAKKKTLEFELEALNDKKHQLEGKLQDIRCRLTTQRQEIESTNKSRELRIAEITHLQQQLQESQQMLGRLIPEKQILNDQLKQVQQNSLHRDSLVTLKRALEAKELARQHLRDQLDEVEKETRSKLQEIDIFNNQLKELREIHNKQQLQKQKSMEAERLKQKEQERKIIELEKQKEEAQRRAQERDKQWLEHVQQEDEHQRPRKLHEEEKLKREESVKKKDGEEKGKQEAQDKLGRLFHQHQEPAKPAVQAPWSTAEKGPLTISAQENVKVVYYRALYPFESRSHDEITIQPGDIVMVDESQTGEPGWLGGELKGKTGWFPANYAEKIPENEVPAPVKPVTDSTSAPAPKLALRETPAPLAVTSSEPSTTPNNWADFSSTWPTSTNEKPETDNWDAWAAQPSLTVPSAGQLRQRSAFTPATATGSSPSPVLGQGEKVEGLQAQALYPWRAKKDNHLNFNKNDVITVLEQQDMWWFGEVQEFIAMYTYESSEQGDLTFQQGDVILVTKKDGDWWTGTVGDKAGVFPSNYVRLKDSEGSGTAGKTGSLGKKPEIAQVIASYTATGPEQLTLAPGQLILIRKKNPVCQVIGMYDYTAQNDDELAFNKGQIINVLNKEDPDWWKGEVNGQVGLFPSNYVKLTTDMDPSQQFPKIPKRIFMEMTLDANGPKNARKNSSFFEMSGIRGLICPTNPCTNPGPLPDSRRPTGGSKQLFKRLRCTPAMCRDLWTKDQSLLSRLLVDVDKLPVFHTVDGCSDLHLLDMLTPTERKRQGYIHELIVTEENYVNDLQLVTEIFQKPLMESELLTEKEVAMIFVNWKELIMCNIKLLKALRVRKKMSGEKMPVKMIGDILSAQLPHMQPYIRFCSRQLNGAALIQQKTDEAPDFKEFVKLEQVPVPGDSYQVSGLQSMQLPVSKALNQTTAFDS

SEQ ID NO: 50935 - protein, 936 aa, Homo sapiens
  DOMAIN (253)..(267): Src homology 3 (SH3) domain proteins profile domain identified by eMATRIX, accession number BL50002B, p-value=1.000e- 10, raw score of 15.18
  DOMAIN (456)..(637): RhoGEF domain identified by PFam, accession name RhoGEF, E- value=3.5e-31, PFam score of 117.0
MVCGAAAPASLPAAQYIPPSFRRVRSGSGISVISSTSVDQRLPEEPVLEDEQQQLEKKLPVTFEDKKRENFERGNLELEKRRQALLEQQRKEQERLAQLERAEQERKERERQEQERKRQLELEKQLEKQRELERQREEERRKEIERREAAKRQLMAEEKGKQEAQDKLGRLFHQHQEPAKPAVQAPWSTAEKGPLTISAQENVKVVYYRALYPFESRSHDEITIQPGDIVMVKGEWVDESQTGEPGWLGGELKGKTGWFPANYAEKIPENEVPAPVKPVTDSTSAPAPKLALRETPAPLAVTSSEPSTTPNNWADFSSTWPTSTNEKPETDNWDAWAARPFSHRSKCRPVKAEARVKRWRGYKLKPYILGEPKKDNHLNFNKNDVITVLEQQDMWWFGEVQEPPKSTALAAVCQVIGMYDYTAQNDDELAFNKGPDHQHLHLLDMLTPTERKRQGYIHELIVTEENYVNDLQLVTEIFQKPLMESELLTEKEVAMIFVNWKELIMCNIKLLKALRVRKKMSGEKMPVKMIGDILSAQLPHMQPYIRFCSRQLNGAALIQQKTDEAPDFKEFVKRLEMDPRCKGMPLSSFILKPMQRVTRYPLIIKNILENTPENHPDHSHLKHALEKAEELCSQVNEGVREKENSDRLEWIQAHVQCEGLSEQLVFNSVTNCLGPRKFLHSGKLYKAKNNKELYGFLFNDFLLLTQITKPLGSSGTDKVFSPKSNLQYKMYKTPIFLNEVLVKLPTDPSGDEPIFHISHIDRVYTLRAESINERTAWVQKIKAASELYIETEKKKREKAYLVRSQRATGIGRLMVNVVEGIELKPCRSHGKSNPYCEVTMGSQCHITKTIQDTLNPKWNSNCQFFIRDLEQEVLCITVFERDQFSPDDFLGRTEIRVADIKKDQGSKGPVTKCLLLHEVPTGEIVVRLDLQLFDEP

SEQ ID NO: 50936 - protein, 275 aa, Homo sapiens; identical to SEQ ID NO: 33465

SEQ ID NO: 50937 - protein, 76 aa, Homo sapiens
  misc_feature (1)...(76): Xaa = X or * as defined in Table 2
MGTSRRPLWSWLLILALLGPQFLPGPVCGPGPLWQRPPAWLGLLPPSWPRVAPSAPGDSAPLPXPRSQGGYGFSET

SEQ ID NO: 50938 - protein, 97 aa, Homo sapiens
MGTSRRPLWSWLLIRALLGPQFLPGPVSGPGPLWQRPPAWLGLFKLHGTLRAGVRRGGGRGNSGKTELLGLSGGPFQPGGGSRALQPSPRGLVRIRQ

SEQ ID NO: 50939 - protein, 361 aa, Homo sapiens
  DOMAIN (230)..(269): Domain present in ZO-1 and Unc5-like netrin receptors domain identified by eMATRIX, accession number PF00791C, p-value=3.446e- 11, raw score of 20.98
MSGEDGPAAGPGAAAAAARERRREQLRQWGARAGAEPGPGERRARTVRFERAAEFLAACAGGDLDEARLMLRAADPGPGAELDPAAPPPARAVLDSTNADGISALHQLVAWVTSTAGPDPSLPPPSGSVFLHSLFPLLSAVLLPKDALSGALPSRRCTTQVPKHRPPAVAVPKFLGYPTWVYQPLGHVRPLHSPSFHDLMLLALVAPSRLLQMGSFGEACIDENLEVVRFLVEQGATVNQADNEGWTPLHVAASCGYLDIARYLLSHGANIAAVNSDGDLPLDLAESDAMEGLLKAEIARRALPVTGDSRHVPEACFPDFLKQDHWCRFMGWLSGSGWVGVEGCEHGSRQTPGDRVEGKGD

SEQ ID NO: 50940 - protein, 111 aa, Homo sapiens
  DOMAIN (51)..(64): REPEAT PROTEIN ANK NUCLEAR ANKYR domain identified by eMATRIX, accession number PD00078B, p-value=8.500e-11, raw score of 13.14
  misc_feature (1)...(111): Xaa = X or * as defined in Table 2
XSTPPRRRPPAPVLDSTNADGISAVHQACIDENLEAERFLEEQGATVNQADNEGWTPLHVAAFCGYLDIVRYLLSHGANIDVVNRDGDLPLDLAESDAMRGAAEGGDRPPS

SEQ ID NO: 50941 - protein, 54 aa, Homo sapiens
  misc_feature (1)...(54): Xaa = X or * as defined in Table 2
XVDVEAAKRAEEELLLHDTRCWLNGGAMPEARHPRTGASALHVAAAKGYIEVMS

SEQ ID NO: 50942 - protein, 724 aa, Homo sapiens
  DOMAIN (98)..(137): Domain present in ZO-1 and Unc5-like netrin receptors domain identified by eMATRIX, accession number PF00791C, p-value=3.446e- 11, raw score of 20.98
MRDLPGSQWPPCATLSQNLSCSDAAVWQVPKHRPPAVAVPKFLGYPTWVYQPLGHVRPLHSPSFHDLMLLALVAPSRLLQMGSFGEACIDENLEVVRFLVEQGATVNQADNEGWTPLHVAASCGYLDIARYLLSHGANIAAVNSDGDLPLDLAESDAMEGLLKAEIARRGVDVEAAKRAEEELLLHDTRCWLNGGAMPEARHPRTGASALHVAAAKGYIESSGTGNGWTPLHAAAHWGVEDACRLLAEHGGGMDSLTHAGQRPCDLADEEVLSLLEELARKQEDGRGEDGGELRGEGVKTVVNCELRGVGVKTVVNCAGKLRNQKEASQSRGQEPQAPSSSKHRRSSVCRLSSREKISLQDLSKERRPGGAGGPPIQDEDEGEEGPTEPPPAEPRTLNGVSSPPHPSPKSPVLEEAPFSRRFGLLKTGSSGALGPPERRTAEGAPGAGLQRSASSSWLEGTSTQAKELRLARITPTPSPKLPEPSVLIPEPVIPSEAKPSTGPPADSRDRRRSYQMPVRDEESESQRKARSRLMRQSRRSTQGVTLTDLKEAEKAAGKAPESEKPAQSLDPSRRPRVPWEWRTLTALPREQRRPTGRAAREHRKVGKEWRGPAEGEEAEPADRSQESSTLEGGPSARRQRWQRDLNPEPEPESEEPDGGFRTLYAELRRENERLREALTETTLRLAQLKVELERATQRQERFAERPALLELERFERRALERKAA

SEQ ID NO: 50943 - protein, 34 aa, Homo sapiens
MFKRALSLVLMGECVPSLYLGLLYCTLDIKFNVP

SEQ ID NO: 50944 - protein, 47 aa, Homo sapiens
MTNEEPLPKKVRLSETDFKVMARDELILRWKQYEAYVQALGGQDTRP

SEQ ID NO: 50945 - protein, 671 aa, Homo sapiens
  DOMAIN (272)..(292): kw ALLERGEN POLLEN CIM1 HOL-LI domain identified by eMATRIX, accession number DM01724, p-value=4.671e-09, raw score of 8.14
MRQGPYGGGYRGYDDYRGCNDGYGFRSDRFGKDRNYCFSGMSDHRYGDKQCEWWLWRWLWRSEQLSGGYGGGYGGLSSVSGGYGGGYGDQSSVSGGYGGGYGAEWWLWRWLWRSEQPSGGYGGGYGGLSSVSGGYGGGYGGLSSVSGGYGGGYGDQSNVSGGCGGGYGDQSNVSGGYGGGYGDQSNVSGGCGGGYELLSGGYGGGYGGQSSVSGGYGGGYGGQSSVSGGYGGGYGDQSNVSGGCGGGYGDQSNVSGGCGGGYGDQSNVSGGYGGGYGDQSNVSGGYGGGYGDQSNVSGGCGGGYELLSGGYGGGYGGQSSVSGGYGGGYGGQSSVSGGYGGGYGDQSNVSGGCRGGYGGTKETFFNVINDIKVGLTLLCTELNDFIIQLDEEVEGMQSTILVLQQQLKETRQQLAQYQQQQSQASAPSTSRTTASEPVEQSEATSKDCSRLTNGPSYGESPFRRGRSHSPAAEPRQERKGEGREAVGLARSGPRGTMEQLLPGNTPRPFPGAWRELRGPRSSASSVREAAEGRGGPARSEVSPRASREGKVEVLAGATCGCGAASCGGIWAKAARDWPLCVRDAHPLMLQRVGGPGATSRYRPWAASRGRLLLAEAHLREAQSPGRWVRSSLTSLETHRGAIVLWRRRLRCVRGVEGPLLTGTRGRRPCEV

SEQ ID NO: 50946 - protein, 108 aa, Homo sapiens
MTNEEPLPKKVRLSETDFKVMARDELILRWKQYEAYVQALEGKYTDLNSNDVTGLRESEEKLKQQQQESARRENILVMRLATKEQEMQECTTQIQYLKQVQQPSVAQL

SEQ ID NO: 50947 - protein, 352 aa, Homo sapiens; identical to SEQ ID NO: 31174
  DOMAIN (306)..(317): GUANYLIN PRECURSOR SIGNATURE domain identified by eMATRIX, accession number PR00774C, p-value=5.418e-09, raw score of 11.76

SEQ ID NO: 50948 - protein, 310 aa, Homo sapiens; identical to SEQ ID NO: 31184

SEQ ID NO: 50949 - protein, 309 aa, Homo sapiens; identical to SEQ ID NO: 40062

SEQ ID NO: 50950 - protein, 28 aa, Homo sapiens
MDRQPLPEPLELWPKALRLLPRSSWLSG

SEQ ID NO: 50951 - protein, 42 aa, Homo sapiens; identical to SEQ ID NO: 31176

SEQ ID NO: 50952 - protein, 377 aa, Homo sapiens
MWESLELPGNIFNGFDQNADNDMDDEIQAEVISDGDEEFVGNWNKPRDLVPCILATLALTKRGQDTAQTMASEGARPKHWQLPGGVGPVGAQKSRIEVWEPLPIFRRMYGKACMSRQKFAAGAGFSWYVPVAVVGAKVHDVNLHMLSFPSKWKLHTCMKFGAVTQIVTSLGRSSCSLLLEKDPPMVLRPTSPRNISPISNLTKETRFIRGPKTPAPVTDWEGSLPLVFNHCRDASLIIHPGFRGVRPRRDACLSPSPLANLINLTFKVYNNRKKLQFLAFTVRQTSAMSPAHKNFQTPEPQRPGIPPEPPPPGACYKCQKSGHQAKECLQPRIPPKPRPICAGPHWKLDCPTHLASTPRAPGTLAQGSLTASQIFLA

SEQ ID NO: 50953 - protein, 174 aa, Homo sapiens; identical to SEQ ID NO: 32377

SEQ ID NO: 50954 - protein, 138 aa, Homo sapiens; identical to SEQ ID NO: 32475
  misc_feature (1)...(138): Xaa = X or * as defined in Table 2

SEQ ID NO: 50955 - protein, 224 aa, Homo sapiens; identical to SEQ ID NO: 31182

SEQ ID NO: 50956 - protein, 368 aa, Homo sapiens
MEQDGRIEVSTDCLPHNDTNVTIIYTQPSTFIRTKNQVNTHSTWFYFIALKEALKRAIPRRSGSVSLQPLSQEDLGRSQRALGQSSRGSGSGCQGRPMACYVSPFSIMIAEYRRLGNLQRKESFFQLIVLELLSSRAWHWHLVRVIPWQKAGRKDIVSLCDIPVTNAQSESKHKETSDKSILKDTLQNKWLVFAHNFNIMKDKEKNIDLGGRVNDHCVLDGKNVFLTTCSGSLCGCVEKDSDDMVHEPEDTVATKRTQVISRGVADEGHQLTVIIPTGSLLREISLELNHRAELKFYTHRTTTLHFPSPQPLETTIVFYASGRPSILFAFTICCLPTLTPGALEILITNKTEDVGTGDLQGLQTASLL

SEQ ID NO: 50957 - protein, 257 aa, Homo sapiens; identical to SEQ ID NO: 32380
  DOMAIN (141)..(184): kw TRANSCRIPTASE REVERSE II ORF2 domain identified by eMATRIX, accession number DM01354T, p-value=1.000e-40, raw score of 9.48

SEQ ID NO: 50958 - protein, 34 aa, Homo sapiens
MFCRQGWISQSTFSRVGRITKNLLKGWGDYKVPS

SEQ ID NO: 50959 - protein, 139 aa, Homo sapiens; identical to SEQ ID NO: 30816

SEQ ID NO: 50960 - protein, 448 aa, Homo sapiens
MGSQEANGVKSKHGHSLYCGFRGRNGGTRGASEAIRQRQSSAAKLRRSGKESESLGPEFQGLWEWLPALGSCLQQPKAIPLGHPDKSPSSKWLGPHSTPLSPQPASVHTCLFLAFLLPDTQENFLNLIFHTTKTNNGLHSSLCLLYWVSTSPKDSYEIQPQGPLNCQSLLFWGSLKSEMTQGLCRSTSTPFHGGEEQNVPSQWVAQSHRRENRTVGGEAFPGHPPASAITVGDPIPQDGQQNVGRRKFKPKGEEVENFEKNLDECITRITNTEKCLKELMELKAKAQELCEECRSLRSCCDQLEERVSMMEDEMNEMKPNLRLIGVPERDWENGTKLENTLQDIIQENFPNLARQANIQIQEIQRTPQRYSSRRATPRHIIVRFTKVEMKEKMLRAAREKGRVTHKGKPIRLTAISRQKLYKPEESGAQYSTFLKKRIFNPEFHILPN

SEQ ID NO: 50961 - protein, 136 aa, Homo sapiens; identical to SEQ ID NO: 30815

SEQ ID NO: 50962 - protein, 133 aa, Homo sapiens
QFTLKKVAGAKGIVKDLINLTFKVYNNRKKLQFLASTVRQTPATSPAHKNFQTPELQQPGVPPEPPPRGACYKFQKSGHRAKECLQPRIPPKPHPICVGPHWKSDCPTHLAATPRAPGTLAQGSLTPSQMFLA

SEQ ID NO: 50963 - protein, 205 aa, Homo sapiens
MWGIGKQVGGCGWLRGKNRVVGAAKDQSGTGEKFYFIPKAMGAMEGSGQRRTLPDPGAHRNPSGGYSATDCEGSRPAPGEINSHASHTKPVWWFFTQTRMKFGAVTRIGGLPWEVNPLSSCSLLREKIHLPPQVLSPTSPRNISPILNQELATRAGNLATGPRNARSPGFLLSRVPSVRDPTGNRTVRLTWQPLPEPLELWPKAL

SEQ ID NO: 50964 - protein, 120 aa, Homo sapiens
MIGSEKKHKAAQRYYFSVWHPHLKQLQNKPQLGNVARFQQRGGERQELHGQILCKVLSKVADMPGLECIVSRGRAQRRKRGILRRSGSFSLQPLSQEDLGRSQSESLGPEFQGLWEWLPS

SEQ ID NO: 50965 - protein, 159 aa, Homo sapiens
MRKIHLQAQVLRPTSPRNISPILNRRKRRHVLSVDPKLRHRSWTREGSLPLVFNLCRDASLIIHPGFRGVRPRRDTCLGPSPLAASPTFLGEGARACYKCQKSGHQAKECLQPRIPPKLCPICAGPRWKSDCPTHLAATPKAPGTLAQGSLTPSQIFLA

SEQ ID NO: 50966 - protein, 109 aa, Homo sapiens
MDLPSTVRVTRSSASVMVQGTSEAIGQRQSSVAKPRRSGKESKSLGPEFQGLWEWLPEIYFSQFRRLGNPKSRHQQIQCLMGACFVVTERLSFQDSLDLAEPRHSYPLQ

SEQ ID NO: 50967 - protein, 113 aa, Homo sapiens
TLDTHHRHHLHYTSRQLCPTDKTMEFGRDFRIKHYAGDVTYSVEGFIDKNRDFLFQDFKRLLYNSTDPTLRAMWPDGQQDITEVTKRPLTAGTLFKNSMVALVENLASKEPFY

SEQ ID NO: 50968 - protein, 42 aa, Homo sapiens
MEDEEGPEYGKPDFVLLDQVTMEDFMRNLQLKGEWGREDRSH

SEQ ID NO: 50969 - protein, 759 aa, Homo sapiens
  DOMAIN (353)..(382): MYOSIN HEAVY CHAIN SIGNATURE domain identified by eMATRIX, accession number PR00193D, p-value=1.545e-31, raw score of 14.36
MEDEEGPEYGKPDFVLLDQVTMEDFVRNLQLRFEKGRIYTYIGEVLVSVNPYQELPLYGPEAIARYQGRELYERPPHLYAVANAVYKAMKHRSRDTCIVISGESGAGKTEASKHIMQYIAAVTNPSQRAEVERVKDVLLKSTCVLEAFGNARTNRNHNSSRFGKYMDINFDFKGDPIGGHIHSYLLEKSRVLKQHVGERNFHAFYQALDSDEQSHQAVTEAMRVIGFSPEEVESVHRILAAILHLGNIEFVETEEGGLQKEGLAVAEEALVDHVAELTATPRDLVLRSLLARTVASGGRELIEKGHTAAEASYARDACAKAVYQRLFEWVVNRINSVMEPRGRDPRRDGKDTVIGVLDIYGFEVFPVNSFEQFCINYCNEKLQQLFIQLILKQEQEEYEREGITWQSVEYFNNATIVDLVERPHRGILAVLDEACSSAGTITDRIFLQTLDMHHRHHLHYTSRQVPPAVPVPPQWADKTMEFGRDFRIKHYAGDDLKRMLYNSTDPTLRAMWPDGQQDITEVTKRPLTAGTLFKNSMVALVENLASKEPFYVRCIKPNEDKVAGKLDENHCRHQVAYLGLLENAAVSALKEQHGLQGDVAFGHSKLFIRSPRTLVTLEQSRARLIPIIVLLLQKAWRGTLARWRCRRLRAIYTIMRWFRRHKVRAHLAELQRRFQAARQPPLYGRDLVWPLPPAVLQPFQDTCHALFCRWRARQLVKNIPPSDMPQIKAKVAAMGALQGLRQDWDCRRAWALDYLSSGH

SEQ ID NO: 50970 - protein, 63 aa, Homo sapiens
MLTWPPWESVCHYVDLCSYRGLPSHRINKIHIESITKLLDSRCNFVKHDSFLAAISLDHMHRS

SEQ ID NO: 50971 - protein, 129 aa, Homo sapiens
MFDKITSRIQKLCYGLNMDFVDPAQITMKVIQGLYSGVTTVELDTLAAETAATLTTKHPDYAILAARIAVSNLHKETKKVFSELHKALPQVQAAREVSLLLGPSDPSDPVVLEVAVADRDAHWRLWQTP

SEQ ID NO: 50972 - protein, 641 aa, Homo sapiens
  DOMAIN (251)..(296): Ribonucleotide reductase large subunit proteins domain identified by eMATRIX, accession number BL00089C, p-value=4.429e- 34, raw score of 32.01
MSIPEIPDDLKQLYKTVWEISQKTVLKMAAERGAFIDQSQSLNIHIAEPNYGKLTSMHFYGWKQGLKTGMYYLRTRPAANPIQFTLNKEKLKDKEKVSKEEEEKERNTAAMEDCISTLPCLLAFSGFSQISLPTRVGGWENTEVRELVPLAPSLPDAHVLLPWEYEESGGQSHVLAGTEDEERWGKRTPDKESGQPLEAAKGKETGSPLSPPERNANPADTLVLAHCFLLSMKDDSIEGIYDTLKQCALISKSAGGIGVAVSCIRATGSYIAGTNGNSNGLVPMLRVYNNTARYVDQGGNKRIKYLGIQLTRDVKHLFKENYKPLLNEIKEDTNKWKNIPCSWIGKINIVKMAILPKIQCHAHQATNEFFHRIGKNYFKVHMEPKKSLSQKNKAGGIMLPDFKLYYKATVTKTAWYRYQNRDLDQWSRTEPSEIIPHICNHLIFDKPDKNKKWGKDSLFNKWCWENWLAICRKLKLDPFLTPYTKINSRWIKNLHVRPKTMKTLEENLGNTIQDIGMGKDFMSKTPKAMATKAKMDKWSLIKLKSFCSAEETTIRVNRQPTEWEKSFAIYSSDKGLISRIYKELKQSYKKKPHQKVGEGYEQTLLKRRHLCSQQTHGKMLIVTGHQRNANQNRNEIPSHTS

SEQ ID NO: 50973 - protein, 239 aa, Homo sapiens
  DOMAIN (154)..(169): OLFACTORY RECEPTOR SIGNATURE domain identified by eMATRIX, accession number PR00245B, p-value=1.551e-09, raw score of 10.38
MRLPVCNLGFPGPWNMYVHIQEHTYDFKKLAEVTKVVVRNLNKIIDINYYPVPEACLSNGRHRPIGIGVQGMADAFILMRYPFESAEAQLLNKQIFETIYYGALEASCDLAKEQGPYETYEGSPVSKGSWGVTVPLVVLTAKADFCRTAVIRHFTCECIALLSIACGDLTFNNWLGLAMCLVTVISDMALLGTSYTHIIYAAFRISSWGAQAKALHTCGSHLLVILSIYVSGLSTSITF

SEQ ID NO: 50974 - protein, 184 aa, Homo sapiens
  DOMAIN (100)..(145): Ribonucleotide reductase large subunit proteins domain identified by eMATRIX, accession number BL00089C, p-value=6.824e- 25, raw score of 32.01
MANTLPWWPSQHWDIVLANKDRLNSAIIYDRDFSYNYFGFKTLERSYLLKINGKVAERPQHMLMRVSVGIHKEDIDAAIETYNLLSERWFTHASPTLFNAVLLEGIGVAVSCIRATGSYIAGTNGNSNGLVPMLRVYNNTARYVDQDLWDWKVLKEKIAKYGIRNSLLIAPDALQLPLPQILGE

SEQ ID NO: 50975 - protein, 74 aa, Homo sapiens
  DOMAIN (36)..(74): Urease nickel ligands proteins domain identified by eMATRIX, accession number BL01120C, p-value=9.344e-09, raw score of 16.99
SDRLLIKGGRIINDDQSLYADVYLEDGLIKQIGENLIVPGGVKTIEANGRMVIPGGIDVNTYLQKPSQGMTAAD

SEQ ID NO: 50976 - protein, 48 aa, Homo sapiens
  misc_feature (1)...(48): Xaa = X or * as defined in Table 2
XGDLQVTGSGHCPYSTAQKAVGKDNFTLIPEGVNGIEERMTVVWDKAV

SEQ ID NO: 50977 - protein, 391 aa, Homo sapiens
  DOMAIN (334)..(373): Urease nickel ligands proteins domain identified by eMATRIX, accession number BL01120C, p-value=9.344e-09, raw score of 16.99
MHQLLVTYVSCSGAGETCTPACGCFLDVQSLGLFFPLVPDCRQEACCDAFLSIFTHSSVKNQFSHPGSQPGCVQDAGETAVKKTDKVRCLRGAHGLSDRLLIKGGRIINDDQSLYADVYLEDGLINPAYDNPGVLASAGCRNGMPQAGWLKQQKFISHSSGGWKSRIKLPSGLVLPEAFLNFFLRFFLGLQTPPSGLQTPPSGCPHRALSVSRELLSVAATVTLHRSLTRALPRGPPPWGPAPVGPGAPIQGKRKQMNAGHQVVRMLLSASGHLDPECSWQAHTFGEDGRRTGEERISLSQVGHSGVIISSGGGHSGEPRLSLLFASRQIGENLIVPGGVKTIEANGRMVIPGGIDVNTYLQKPSQGMTAADDFFQGTRAALVGGTTMISE

SEQ ID NO: 50978 - protein, 257 aa, Homo sapiens
  DOMAIN (201)..(240): Urease nickel ligands proteins domain identified by eMATRIX, accession number BL01120C, p-value=9.344e-09, raw score of 16.99
  misc_feature (1)...(257): Xaa = X or * as defined in Table 2
MENKVEVQVSLERELRGFGPYQGQCPNADSPQLYEAFTFLKGLGAVILVHAENGDLIAQVSGKNFHSFYLSLILLVAKARELLSVAATVTLHRSLTRALPRGPPPWGPAPVGPGAPIQGKRKQMNAGHQVVRMLLSASGHLDPECSWQAHTFGEDGRRTGEERISLSQVGHSGVIISSGGGHSGEPRLSLLFASRQIGENLIVPGGVKTIEANGRMVIPGGIDVNTYLQKPSQGMTAADDFFQGTRAVLVGGTTMIX

SEQ ID NO: 50979 - protein, 638 aa, Homo sapiens
MHQLLVTYVSCSGAGETCTPACGCFLDVQSLGLFFPLVPDCRQEACCDAFLSIFTHSSVKNQFSHPGSQPGCVQDAGETAVKKTDKVRCLRGAHGLSDRLLIKGGRIINDDQSLYADVYLEDGLIKAKIASLVRKCRERNRLITHLLQELHRHGLGNLLLSELAQNMLNDVALAEYTATFLAPGVPETSHHLDVKSEMTAALRAPGFVLSMFRMLAHLISVVTLQYKHRYPQCTEEETEEQKRILEMGITGPEGHALSRPEELEAEAVFRAITIAGRINCPVYITKVMSKSAADIIALARKKGPLVFGEPIAASLGTDGTHYWSKNWAKAAAFRDFPSPEPGPYHGRLLDLPTGLVSTGIKERMTVVWDKAVATGKMDENQFVAVTSTNAAKIFNLYPRKGRIAVGSDADVVIWDPDKLKTITAKSHKSSKSWEVTLRLLVQAVEYNIFEGMECHGSPLVVISQGKIVFEDGNINVNKGMGRFIPRKAFPEHLYQRVKIRNKLPTPSPFLEPSPNKLSAPRIFASLLTSTRTYMKMGPLLLPCLGLRGPFRGWVFGLQGVSRGMYDGPVYEVPATPKYATPAPSAKSSPSKHQPPPIRNLHQSNFSLSGAQIDDNNPRRTGHRIVAPPGGRSNITSLG

SEQ ID NO: 50980 - protein, 213 aa, Homo sapiens
  DOMAIN (49)..(88): Urease nickel ligands proteins domain identified by eMATRIX, accession number BL01120C, p-value=9.344e-09, raw score of 16.99
MSYQGKKSIPHITSDRLLIKGGRIINDDQSLYADVYLEDGLIKQIGENLIVPGGVKTIEANGRMVIPGGIDVNTYLQKPSQGMTAADDFFQGTRAALVGGTTMIIDHVVPEPGWYDGVREELEVLVQDKGVNSFQVYMAYKDVYQMSDSQLYEAFTFLKGLGAVILAAATCPYSTAQKAVGKDNFTLIPEGVNGIEERMTVVWEKDGGYWQNG

SEQ ID NO: 50981 - protein, 87 aa, Homo sapiens
MDAGVTESGLNVTLTIRLLMHGKEVGSIIGKKGESVKRFREESGARINISEGNCPERIITLTGPTNAIFKAFAMIIDKLEERISTAP

SEQ ID NO: 50982 - protein, 103 aa, Homo sapiens
MAEPSEATQSHSISSSSFGAEPSAPGGGGSPGACPALGTKSCSSSCADSFDSSSSSQPVSLFSTSQVHDLIFWRDVKKTGFVFGTTLIMLLSLAAFSVISVVS

SEQ ID NO: 50983 - protein, 388 aa, Homo sapiens
  DOMAIN (56)..(87): Protein kinases ATP-binding region proteins domain identified by eMATRIX, accession number BL00107A, p-value=1.857e-16, raw score of 18.39
MLFEYINQGDLHEFLIMRSPHSDVGCSSDEDGTVKSSLDHGDFLHIAIQIAAGMEYLSSHFFVHKDLAARNILIGEQLHVKISDLGLSREIYSADYYRVQSKSLLPIRWMPPEAIMYGKFSSDSDIWSFGVVLWEIFSFGLQPYYGFSNQEVIEMVRKRQLLPCSEDCPPRMYSLMTECWNEIPSRRPRFKDIHVRLRSWEGLSSHTSSTTPSGGNATTQTTSLSASPVSNLSNPRYPNYMFPSQGITPQGQIAGFIGPPIPQNQRFIPINGYPIPPGYAAFPAAHYQPTGPPRVIQHCPPPKSRSPSSASGSTSTGHVTSLPSSGSNQEANIPLLPHMSIPNHPGGMGITVFGNKSQKPYKIDSKQASLLGDANIHGHTESMISAEL

SEQ ID NO: 50984 - protein, 367 aa, Homo sapiens
  DOMAIN (76)..(95): Eukaryotic  RNA-binding region RNP-1 proteins domain identified by eMATRIX, accession number BL00030A, p-value=7.000e- 09, raw score of 14.39
MSESFLKPLPEVDAGAILLVQPAELIQEERDERHKTKGRLFRFEPPQSDSDGQRRSILDDYAPGSHDVGDPSTTNLYLGNINPQMNEEMLCQEFGRFGPLASVKIMWPRTDEERARERNCGFVAFMNRRDAERALKNLNGKMIMSFEMKLGWGKAVPIPPHPIYIPPSMMEHTLPPPPSGLPFNAQPRERLKNPNAPMLPPPKNKEDFEKTLSQAIVKVVIPTERNLLALIHRMIEFVVREGPMFEAMIMNREINNPMFSNFITQGEDAPEEKFEASSDWFLRFKERSHLHNIKVQGEAASADVDAVANYPEDLRSLMKVATLNHIVSVDKAAFYSTTTLTFSYHHPDQLAINIEAKPSTSKNAMTH

SEQ ID NO: 50985 - protein, 69 aa, Homo sapiens
MIMSFEMKLGWGKAVPIPPHPIYIPPSMMEHTLPPPQSGLPFNAQPRERLKNPNAPMLPPPKNKEDFEK

SEQ ID NO: 50986 - protein, 427 aa, Homo sapiens
  DOMAIN (235)..(278): 1 kw MIND INHIBITOR DIVISION CONTROL domain identified by eMATRIX, accession number DM01756B, p-value=4.822e-15, raw score of 22.91
MKLMETLNQCINAGHEMTKAIAIAQFNDDSPEARKITRRWRIGEAADLVGVSSQAIRDAEKAGRLPHPDMEIRGRVEQRVGYTIEQINHMRDVFGTRLRRAEDVFPPVIGVAAHKGGVYKTSVSVHLAQDLALKGLRVLLVEGNDPQGTASMYHGWVPDLHIHAEDTLLPFYLGEKDDVTYAIKPTCWPGLDIIPSCLALHRIETELMGKFDEGKLPTDPHLMLRLAIETVAHDYDVIVIDSAPNLGIGTINVVCAADVLIVPTPAELFDYTSALQFFDMLRDLLKNVDLKGFEPDLKVMKFQDELESGKRPKKPGQSFQEQVEHYRDKLLQREKEKELERERERDKKDKEKLESRSKDKKEKDECTPTRKERKRRHSTSPSPSRSSSGRRVKSPSPKSERSERSEKISLKRAHGPGHLHKDSPRRC

SEQ ID NO: 50987 - protein, 952 aa, Homo sapiens
  DOMAIN (874)..(918): XPA protein domain identified by eMATRIX, accession number BL00752B, p-value=9.110e-10, raw score of 19.17
MGQGPEKTPLSSHSSPRNWQPGPQTSGHPWLEGAFLLLATIQSTQAVHAEGHLQAHARLPLAPLQPPFHDRQHPKSRRGRASIFAATAPNGLLLPSYMWTLSCGKVGTAKGIQEERDERHKTKGRLSRFEPPQSDSDGQRRSTNKTEQRQSLTYEKIVIQSKCSQDQQVLERHATAQNKDYISHPPLKLDVVHVQVLANSHSLGEPRPGKKLVSGASDWGRHRGGLSTKQMDASGPSDSDMPSRTRPKSPRKHNYRNESARESLCDSPHQNLSRPLLENKLKAFSIGKMSTAKRTLSKKEQEELKKKEDEKAAAEIYEEFLAAFEGSDGNKVKTFVRGGVVNAAKEEHETDEKRGKIYKPSSRFADQKNPPNQSSNERPPSLLVIETKKPPLKKGEKEKKKSNLELFKEELKQIQEERDERHKTKGRLSRFEPPQSDSDGQRRSMDAPSRRNRSSGVLDDYAPGSHDVGDPSTTNLYLGNINPQMNEEMLCQEFGRFGPLASVKIMWPRTDEERARERNCGFVAFMNRRDAERALKNLNGKMIMSFEMKLGWGKAVPIPPHPIYIPPSMMEHTLPPPPSGLPFNAQPRERLKNPNAPMLPPPKNKEDFEKTLSQAIVKVVIPTERNLLALIHRMIEFVVREGPMFEAMIMNREINNPMFRFLFENQTPAHVYYRWKLYSILQGDSPTKWRTEDFRLVNIIEEKETEDVPDDLDGAPIEEELDGAPLEDVDGIPIDATPIDDLDGVPIKSLDDDLDGVPLDATEDSKKNEPIFKHEESEEEENQNQEEESEDEEDTQSSKSEEHHLYSNPIKEEMTESKFSKYSEMSEEKRAKLREIELKVMKFQDELESGKRPKKPGQSFQEQVEHYRDKLLQREKEKELERERERDKKDKEKLESRSKDKKEKDECTPTRNGNGRGDTVHPPAHLRSSSGRPSEIPITKIRSRSERSERIS

SEQ ID NO: 50988 - protein, 379 aa, Homo sapiens
  DOMAIN (261)..(295): MCM family proteins domain identified by eMATRIX, accession number BL00847C, p-value=8.714e-28, raw score of 18.79
MSGFDDPGIFYSDSFGGDAQADEGQARKSQLQRRFKEFLRQYRVGTDRTGFTFKYRCGSCGAGGSSSSVAAHTRLPACSFDEDLADYLYKQPAEHLQLDIQVMLKSDASPSSIRSLKVGRRAVAAAWCRGLWMQPDLSAKATRISIQCRSCRNTLTNIAMRPGLEGYALPRKCNTKDENKVDFQTLKLQELPDAVPHGEMPRHMQLYCDSRGRDRVGVGIRSSYIRVLGIQVDTDGSGELALGSWLSPAKRLCLHTSGNRNVYEVISKSIAPSIFGGTDMKKAIACLLFGGSRKRLRWDETKGEDNIDFMPTILSRFDMIFIVKDEHNEERDVVSEHSIIKDFTKQVSLPWSGGVSRHGVQVFCWFPPSMQRKVLYRLN

SEQ ID NO: 50989 - protein, 123 aa, Homo sapiens
MSISTGLSATMNGIIESLILPGIISIHPVVRNLAVLCLGCCGLQNQDFARKHFVLLLQVLQIDDVTIKISALKAIFDQLMTFGIEPFKTKKIKTLHCEGTEINSDDEQESKEVEETATAKNVL

SEQ ID NO: 50990 - protein, 158 aa, Homo sapiens
  misc_feature (1)...(158): Xaa = X or * as defined in Table 2
XLSSHLAKDLLVLLNEILEQVKDRTCLRALEKIKIQLEKGNKEFGDQAEAAQDATLTTTTFQNEDEKNKEVYMTPLRGVKATQASKSTQLKTNRGQKKVTVSARTNRRCQTAEADSESDHEVPEPESEMKMRLPRRAKTAALEKSKLNLAQFLNEDLS

SEQ ID NO: 50991 - protein, 44 aa, Homo sapiens
MLLYCFNTGQSNVEAHSRKSSERHQVCSDFDKGNFFFIKANNWT

SEQ ID NO: 50992 - protein, 734 aa, Homo sapiens
  DOMAIN (594)..(610): VENOM ALLERGEN 5 SIGNATURE domain identified by eMATRIX, accession number PR00838F, p-value=9.328e-09, raw score of 10.11
MGAERRLLSIKEAFRLAQQPHQNQAKLVVALSRTYRTMDDKTVFHEEFIHYLKYVMVVYKREPAVERVIEFAAKFVTSFHQPDMEDDWEEEDGGLLNYLFTFLLKSHEANSNAVRFRVCLLINKLLGSMPENAQIDDDVFDKINKAMLIRLKDKIPNVRIQAVVALSRLQDPKDDECPVVNAYATLIENDSNPEVRRAVLSCIAPSAKTLPKIVGRTKDVKEAVRKLAYQVLAEKVHMRAMSIAQRVMLLQQGLNDRSDAVKQAMQKHLLQGWLRFSEGNILELLHRLDVENSSEVAVSVLNALFSITPLSELVGLCKNNDGRKLIPVETLTPEIALYWCALCEYLKSKGDEGEEFLEQILPEPVVYADYLLSYIQSIPVVNEEHRGDFSYIGNLMTKEFIGQQLILIIKSLDTSEEGGRKKLLAVLQEILILPTIPISLVSFLVERLLHIIIDDNKRTQIVTEIISEIRAPIVTVGVNNDPAMNGIIESLVLQIDDVTIKISALKAIFDQLMTFGIEPFKTKKIKTLHCEGTEINSDDEQESKEVEETATAKNVLKLLSDFLDSEVSELRTGAAEGLAKLMFSGLLVSSRILSRLILLWYNPVTEEDVQLRHCLGVFFPVFAYASRTNQECFEEAFLPTLQTLANAPASSPLAEIDITNVAELLVDLTRPSGLNPQAKTSQDYQALTVHDNLAMKICNEILTSPCSPENSSLYKSLEFFRNSVAILQKIFWFY

SEQ ID NO: 50993 - protein, 39 aa, Homo sapiens
  misc_feature (1)...(39): Xaa = X or * as defined in Table 2
MGRRANESLNVLIVYHFLFQKGVCQRLQLVQVVLQHLLX

SEQ ID NO: 50994 - protein, 48 aa, Homo sapiens
  DOMAIN (8)..(28): AAA-protein family proteins domain identified by eMATRIX, accession number BL00674E, p-value=4.462e-21, raw score of 15.24
  misc_feature (1)...(48): Xaa = X or * as defined in Table 2
RLAELTPGFSGADIANICNEAALHAAREGHTSVHTLNFEYAVERVLAX

SEQ ID NO: 50995 - protein, 321 aa, Homo sapiens
  DOMAIN (108)..(128): AAA-protein family proteins domain identified by eMATRIX, accession number BL00674E, p-value=4.462e-21, raw score of 15.24
EARARAPCIVYIDEIDAAGKKRSTTMFGFSNTEEEQTLNQLLVEMDVFYAKIEELKLVNRRAETDHVIVLASTNRADILDGALMRPGRLDRHVFIDLPTLQRKELTPGFSGADIANICNEAALHAAREGHTSVHTLNFEYAVERVLADQHLFTQGAALSGGSLPWEDGPREHFSLNEDDLRKVTPIAYSMVKQVGMAPGIGPISFPEAQEGLMGIGRRPFNQGLQQMMDHEARLLAYRHTEKVLQDNLDKLQALANALLEKEVINYEDIEALIGPPPHGPKKMIAPQRWIDAQEEKQDLGEEETEETQQPPLGGEEPTWPK

SEQ ID NO: 50996 - protein, 854 aa, Homo sapiens
  DOMAIN (318)..(337): ATP-DEPENDENT CLP PROTEASE ATP-BINDING SUBUNIT SIGNATURE domain identified by eMATRIX, accession number PR00300A, p-value= 7.857e-12, raw score of 9.56
MAVLLLLLRALRRGPGPGPRPLWGPGPAWSPGFPARPGRGRPYMASRPPGDLAEAGGRALQSLQLRLLTPTFEGINGLLLKQHLVQNPVRLWQLLGGTFYFNTSRLKQKNKEKDKSKGKAPEEDEEERRRRERDDQMYRERLRTLLMLAKGEVQRVQVVPESDVVEVYLHPGAVVFGRPRLALMYRMQVANIDKFEEKLRAAEDELNIEAKDRIPVSYKRTGFFGNALYSVGMTAVGLAILWYVFRLAGMTGREGGFSAFNQLKMARFTIVDGKMGKGVSFKDVAGMHEAKLEVREFVDYLKSPERFLQLGAKVPKGALLLGPPGCGKTLLAKAVATEAQVPFLAMAGPEFVEVIGGLGAARVRSLFKEARARAPCIVYIDEIDAVGKKRSTTMSGFSNTEEEQTLNQLLVEMDGMGTTDHVIVLASTNRADILDGALMRPGRLDRHVFIDLPTLQERREIFEQHLKSLKLTQSSTFYFPTDTLLVHTLNFEYAVERVLAGTAKKSKNLVQGRTRKWLRFMSPAHPLVGWMLEHTEAVMKVSITPRTNAALGFAQMLPRDQHLFTKEQLFERMCMALGGRASEALSFNEVTSGAQDDLRKVTRIAYSMVKQFGMAPGIGPISFPEAQEGLMGIGQRLQQMMDHEARLLVAKAYRHTEKVLQDNLGQVAGAGKRPSGKGSDKLLRDIEALIGPPPHGPKENDPHRRVSLQKLLTEFCVCESVSPMGKVISAFRVSMEHFEFPRVYRQSVPSVACGHPRGKQSIQASQTDPLFHADGLHEPPQFLWLPRNAKGIGHEKDPVKPIVLSPSRPCHPSSLINGATQSAPGHLGSGRLHHLPPAGQCWDLVQSLRTSLLV

SEQ ID NO: 50997 - protein, 44 aa, Homo sapiens
MFNRPKKKNAINTEMYHEIMRALKAASKDDSIITVLTGNISYTI

SEQ ID NO: 50998 - protein, 264 aa, Homo sapiens
MVLGAKTIKTFTALRHQRSNQNHAVSALVEAPKGTLRAEEREFSVRLGHLESSRSCIVEGESTESGSDELRQDGTTFERIYEDRLGKGRSHGKSRDLASKDSQASPQQARCSSKRGQQQESAGATALRERNLALSSEEPQLQEDVIHKRERKPTEPLHPEDISGVQDFTENWIAGHANCIFNGSLLALSTESKLLSTDTMIFKLRAGPRDAATPPRQAPRDSGQGAQCSGSHRVRRAESRPRDGDGVLGLETGAAFVSEFSAGH

SEQ ID NO: 50999 - protein, 91 aa, Homo sapiens
MLRGKLEKGRPSSVAQEKGVYRKPKFFFSLSLFRVCEPPAWEPWDWSSSAAVFLCLKAFTSSSRDFFLSSSLFFSSWCSFFRRSNFSCSSS

SEQ ID NO: 51000 - protein, 64 aa, Homo sapiens
  misc_feature (1)...(64): Xaa = X or * as defined in Table 2
MESSPAVAGNTIQYTAMDYRTLGXMQHAANSRVNFSSLCLSSESVSLQPGSPGTGAAQPPSFFA

SEQ ID NO: 51001 - protein, 1116 aa, Homo sapiens
  DOMAIN (997)..(1031): 3 RETROVIRAL PROTEINASE domain identified by eMATRIX, accession number DM00892C, p-value=1.740e-11, raw score of 23.55
  DOMAIN (1)..(200): Cell division protein domain identified by PFam, accession name GTP_CDC, E-value=1.2e-70, PFam score of 248.1
  misc_feature (1)...(1116): Xaa = X or * as defined in Table 2
EELKIRRVLHTYHDSRIHVCLYFIAPTGHSLKSLDLVTMKKLDSKVNIIPIIAKADAISKSELTKFKIKITSELVSNGVQIYQFPTDDESVAEINGTMNYTRDVFVITITILDKSGSRAHLPFAVIGSTEELKIGNKMMRARQYPWGTVQVENEAHCDFVKLREMLIRVNMEDLREQTHTRHYELYRRCKLEEMGFKDTDPDSKPFSLQETYEAKRNEFLGELQKKEEEMRQMFVQRVKEKEAELKEAEKELHEKFDRLKKLHQDEKKKLEDKKKSLDDEVNAFKQRKTAAELLQSQGSQAGGSQTLKRDKEKKNASKARSRHWREKSTSREILRRDLEVREQPRRKRTGLTTPDGTRSASSLGSLLGGGEDGWRTSAVGGRLPVAPPLPPLPPPPLPPLPPPPPEPVLEQWRYSHESDWQWALRRSFICRHLHSYPGAALDQLLALSAAWTNHVFLGCRYSPRLMEKILQMAEGIDIGEMPSYDLVLSKPSKGQKRHLSTCDASSSKDERQEDPYGPQTKEVNEQTHFASMPRDIYQDYTQDSFSIQDGNSQYCDSSGFILTKDQPVTANMYFDSGNPAPSTTSQQANSQSTPEPSPSQTFPESVVAEKQYFIEKLTATIWKNLSNPEMTSGSDKINYTYMLTRCIQACKTNPEYIYAPLKEIPPADIPKNKKLLTDGYACEVRCQNIYLTTGYAGSKNGSRDRATELAVKLLQKRIEVRVVRRKFKHTFGEDLVVCQIGMSSYEFPPALKPPEDLVVLGKDASGQPIFNASAKHWTNFVITENANDAIGILNNSASFNKMSIEYKYEMMPNRTWRCRVFLQDHCLAEGYGTKKTSKHAAADEALKILQKTQPTYPSVKSSQCHTGSSPRGSGKKKDIKDLVVYENSSNPVCTLNDTAQFNRMTVEYVYERMTGLRWKCKVILESEVIAEAVGVKKTVKYEAAGEAVKTLKKTQPTVINNLKKGAVEDVISRNEIQGRSAEEAYKQQIKEDNIGNQLLRKMGWTGGGLGKSGEGIREPISVKEQHKREGLGLDVERVNKIAKRDIEQIIRNYARSESHTDLTFSRELTNDERKQIHQIAQKYGLKKRLTATLHYSFHTVWMCSTSKATTAVVELX

SEQ ID NO: 51002 - protein, 277 aa, Homo sapiens
  DOMAIN (39)..(162): Cell division protein domain identified by PFam, accession name GTP_CDC, E-value=2.5e-53, PFam score of 190.6
  misc_feature (1)...(277): Xaa = X or * as defined in Table 2
XSTKRTATSHIVEFIDAQSRGLTSRRTQKFGRVLQTYHDSRIHVCLYFIAPTGHCLKSLDLVTMKKLDSKVNIIPIIAKADAISKSELTNTEELKIGNKMMRARQYPWGTVQVENEAHCDFVKLREMLIRVNMEDLREQTHTRHYELYRRCKLEEMGFKDTDPDSKPFSLQETYEAKRNEFLGELQKKEEEMRQMFVQRVKEKEAELKEAEKELHEKFDRLKKLHQDEKKKLEDKKKSLDDEVNAFKQRKTAAELLQSQGSQAGGSQTLKRDKEKKN

SEQ ID NO: 51003 - protein, 413 aa, Homo sapiens
  DOMAIN (398)..(411): NEMATODE METALLOTHIONEIN SIGNATURE domain identified by eMATRIX, accession number PR00876D, p-value=9.074e-10, raw score of 5.77
MVGIPPPASLLLCSLVSDCCAGNEKGNSPDPLRFLGEAMPCPLAFPRPSNGAFGVGLAMGQTPSYPLVSPGEPNLSASPKVLKKNGKKTAATRLSPGKRRNGVSGNPGKTAPQRKGDAFHKGGGKNCPWGQFGPQKGPNLKLPKPWRQPEPRCFVHPEPLGKKAGGPRLEGRPQPAQMLKIGSFCVKPKLLIAVIECCFHPSVSANRYKSAALATSIIRCSQTLSPPVAGFSGSPQVIKRMMDVIQEIERQLLMVLLENIPEQESRPKRENQSLLNGPQVDTSKAGVVASQDQDAGWNDKRISDALKQGDTRYVNIRQSIPVNLYYLTAFVGADGRTQYRLGELHCQVWGLWFCPCDLGLHGEHLSESGNLQGDEQCLCSPTPRGDMEVSVFSLAQRCPPGCKCENCGLASSE

SEQ ID NO: 51004 - protein, 526 aa, Homo sapiens
  DOMAIN (449)..(494): UDP-glycosyltransferases proteins domain identified by eMATRIX, accession number BL00375F, p-value=7.750e-36, raw score of 16.99
  DOMAIN (1)..(525): UDP-glucoronosyl and UDP-glucosyl transferas domain identified by PFam, accession name UDPGT, E-value=4.1e-60, PFam score of 213.1
MDSLKNENYDLVFVEAFDFCSFLIAEKLVKPFVAILPTTFGSLDFGLPSPLSYVPVFPSLLTDHMDFWGRVKNFLMFFSFSRSQWDMQSTFDNTIKEHFPEGSRPVLSHLLLKAELWFVNSDFAFDFARPLLPNTVYIGGLMEKPIKPVPQGYGPECSVAGHMHVQLIDMHKAGAEYGGDGCFAYGRLNVRVTAMGFAQVQQTVGINRQASAQALHALASQFTQSKQGCWRSTITADDSTPQKAKISHGGGKLNAGTKAGQTHRNRNPHLALMAHSGPDAQHPNKRPPEQQPDHRTQNSGRPPHNGTTPPVSSTKKQRRAPCAVVMNTAVQVHQSPNQRGLPEQHHIETETQFPTTNIPHQLQRYQEGWGSKQPGTWGTNNKHTPKDGKHLAKFGDSGFVLVTLGSMVNTCQNPEIFKEMNNAFAHLPQGVIWKCQCSHWPKDVHLAANVKIVDWLPQSDLLAHPSIRLFVTHGGQNSIMEAIQHGVPMVGIPLFGDQPENMVRVEAKKFGVSIQLKKLKAETLAL

SEQ ID NO: 51005 - protein, 91 aa, Homo sapiens
  DOMAIN (31)..(90): Sec7 domain identified by PFam, accession name Sec7, E-value= 2.8e-14, PFam score of 55.7
QLLEDIQKLKDEIADVFAQIDCFESAGDSRMAHKENELCIGRKKFNMDPAQGIQYLIEHKLLTPDVHDIARFLYKGEGLNKTAIGTYLGES

SEQ ID NO: 51006 - protein, 137 aa, Homo sapiens
  DOMAIN (45)..(67): Sec7 domain identified by PFam, accession name Sec7, E-value= 0.017, PFam score of 13.2
NGTAAPASPMGQGTNMGSSTSDVHSNSTSVGQESGHEDIQTPPPFERFVSMNRGINNGSDLPEDQLRVREAQPTQPGPGESRRDLSLDGWPVFNPDREGWLLKLERGERGVVEGKHESYRISATSAEERDQWIESIR

SEQ ID NO: 51007 - protein, 41 aa, Homo sapiens
MIYKRNKQMEFLRHYFIKSHRHFSINNISVPLQQWLCIHLF

SEQ ID NO: 51008 - protein, 1029 aa, Homo sapiens
  DOMAIN (79)..(101): KINESIN HEAVY CHAIN SIGNATURE domain identified by eMATRIX, accession number PR00380A, p-value=4.857e-24, raw score of 14.18
  DOMAIN (15)..(561): Kinesin motor domain identified by PFam, accession name kinesin, E-value=2.6e-171, PFam score of 582.5
MKEEVKGIPVRVALRCRPLVPKEISEGCQMCLSFVPGEPQVVVGTDKSFTYDFVFDPSTEQEEVFNTAVAPLIKGVFKGYNATVLAYGQTGSGKTYSMGGAYTAEQENEPTVGVIPRVIQLLFKEIDKKSDFEFTLKVSYLEIYNEEILDLLCPSREKAQINIREDPKEGIKIVGLTEKTVLVALDTVSCLEQGNNSRTVASTAMNSQSSRSHAILTISLEQGKKSDKNSSFRSKLHLVDLAGSERQKKTKAEGDRLKEGININRGLLCLGNVISALGDDKKGGFAPYRDSKLTRLLQDSLGGNSHTLMIACAHGGTLPGSITVEPSENLQSLMEKNQSLVEENEKLSRGLSEAAGQTAQMLERIIWTEQANEKMNAKLEELRQHAACKLDLQKLVETLEDQELKENVEIICNLQQLITQLSDETVACMAAAIDTAVEQEAQVETSPETSRSSDAFTTQHALRQAQMSKELVELNKALALKEALARKMTQNDSQLQPIQYQYQDNIKEPELEVINLQKEKEELVLELQTAKKDANQAKLSERRRKRLQELEGQIADLKKKLNEQSKLLKLKESTERTVSKLNQEIRMMKNQRVQLMRQMKEDAEKFRQWKQKRDKEVIQLKERDRKRQYELLKLERNFQKQSNVLRRKTEEAAAANKPSQGCSPETNGRLQISGKETQSHRKILAQDVAQLKEKKESGENPPPKLRRRTFSLTEVRGQVSESEDSITKQIESLETEMEFRSAQIADLQQKLLDAESEDRPKQRWENIATILEAKCALKYLIGELVSSKIQVSKLESSLKQSKTSCADMQKMLFEERNHFAEIETELQAELVRMEQQHPEKVLYLLSQLQQSQMAEKQLEESVSEKEQQLQSTLKCQDEELEKMREVYSSFEYVPPKPKPSRVKEKFLEQSMDIEDLKYCSEHSVNEHEDGDGDDDEGDDEEWKPTKLVKVSREEHPRVFLQGLCRNRQQGKDSLGTVERTQDSESSFKLEDPTEVTPGLSFFNPVCATPNSKILKEMCDVEQKGAKVTY

SEQ ID NO: 51009 - protein, 842 aa, Homo sapiens
MRDAGGAPSPGCSRARSPRGPSTVQGRGRRPPSPGRPSDCARRDPALAAPSAVPRLGLRSQLLTPVPAREPGSSSRRGQRAALLAGYSGRETRGGAGAGEGGEGAGEEGTDEGSTQWAAAGRKELRKGSARKNLNPCSALLPRPGARSLQAVSGLSAPTMARPRLRALLAPSHIRLRQPSNSILFLSNRLWTFKQSGQGSFTELTPEGTLKGSEEVGCTDVRNESIADRGSSQCQNPKAGGHMTSSGNCRGPQRLECVKQKMEQMKEMRAVPGQMCLRFRREVDNRNYNLGVLSILMMFKALRLEKVFLEMQGSTLGLQQEEAREMEKAASLDRKGWEGRALAEAGIERELDQLPLAKEYLPPRIAVRIKCLEGLPAPALLERTALRGVAEEPDGSSHGLGQPHVAKRPSWPGQTAEGASPEKCEPWLFMAEGIGHLTLTRSGRIILNSRPEIRLTVAISKLSWENHQGVKKWNQEGKDQQQICDIKPSLQRNPKGELGDTMNYPADTFILSTTVLFQRVRSLPVLHQSNNLQKAASDRNKPADPEGQRMLTNELDKTASWGSAHSGVGRAHNSGLHTWSLPSWNLKSSKGITDISPQVEFIMHTIRGHKVQQCRFVFGPHMVRAQEVPSTYNPESPDPGAGSFLDVSLSSWVQNGSGRCCLTSAETDLGLWKCFADGPFHIPLRSYSHSACVCMTHHSSFQLLRPPFIGLSICQALSRQPAATTTERSSWRFQSHHELNRSKAECRMSGLNVHWSYMCKTWDSSLTPFSPYPTSGLSSVGIPYTSVASCPIQGGASYPSDELEKEWHQHTDAHCALSVESDFREWPLFCSFLPEAFQDQLP

SEQ ID NO: 51010 - protein, 87 aa, Homo sapiens
  misc_feature (1)...(87): Xaa = X or * as defined in Table 2
RSRAEEEAVAAGGGTPRPLSPRALLWGVQLSTLGAKQAARRNQTVLLVVASPHSLEMANKGNKKRRQFSLEEKMKVVGAVDSGKRKX

SEQ ID NO: 51011 - protein, 289 aa, Homo sapiens
MLGYDNFQASVGWLNRFRDRHGIALKAVCREDSDRLMNGLGIDKINEWHAGEIIKLIADYSPDDIFNADETGVFFQLLPQHTLAAKGDHCRGGKKAKQRLTALFCCNASGTEKMRPLIVGRSASPHCLKNIHSLPCDYRANQWAWMTRDLFNEWLMQVDARMKRAERRILLLIDNCSAHNMLPHLERIQVGYLPSNCTAVLQPLNLGIIHTMKVLYQSHLLKQILLKLNSSEDQEEVDIKQAIDMIAAAWWSVKPSTVVKCWQKAGIVPMEFAECDTESASPVNPDIAH

SEQ ID NO: 51012 - protein, 464 aa, Homo sapiens
MQAETAAGPVGAGPASWLWIWACLLRFWEPLMVSAQGSVIPKVVLARVYTFGPKLNFSNVESWAFIGALMHELSNDGARRQFEFYLEEMILPLMVASAQSGERECHIVVLTDDDVVDWDEEYPPQMGEEYSQKCYPCTYTLFICSIPQSTSTICNTLSSSHTHTGVAYATSSTESSENPKNILPLCKKKRALGFNVATVVGTVSLLPLGGFTYHEITLQELTASLDIALAKTGTSISAIEKSLDSLGGMVFCNGQAQNYLLAEQRGICAVINKTCCTYINVSEKMETDTHTFPKNHSPGQTDHHDLPWAVILRVCADQEDQEKGSWLCPERQRGPLSLKKDNKGVECGLGGGSDRIWRSGCLQDRGEWWMSSPREDVKDDVKGTKPNQKLRTKNREPAEQAVEAGISAAGGEPGADPGEARSAELKKARPEVGVLAAGSSQLGIGNGSQVKQLKQGADSAADNL

SEQ ID NO: 51013 - protein, 74 aa, Homo sapiens
  misc_feature (1)...(74): Xaa = X or * as defined in Table 2
XSDFAVCFDEENALPEESLHYFSNSVTETLSTFLRGRRALNCLLLRCPAHPWAESTVLARTLLASPLRIVSSRX

SEQ ID NO: 51014 - protein, 45 aa, Homo sapiens
MDVSKKSHNQQLDRELGRGQSGIEAGASWRPAWVLGLLPPLGHSL

SEQ ID NO: 51015 - protein, 391 aa, Homo sapiens
  DOMAIN (108)..(134): Signal peptidases I serine proteins domain identified by eMATRIX, accession number BL00501A, p-value=6.946e-09, raw score of 21.02
  DOMAIN (208)..(330): Tudor domain identified by PFam, accession name TUDOR, E- value=2.2e-09, PFam score of 44.6
MGKMFAGEELDAGEKGNREGDDRKSCNKREQSPMGDSFIAIYNPGWIRWQHCAQGQRFLSSAAGWAQGLVKPKLAYRLQATGWLSVKLVLTCAGEPGCTLQCWPQVWLLIAGFLLMLRRIPFAPVEVEVESMDKAGNFIGWLHIDGANLSVLLVEHALSKVHFTAERSSYYKSLLSAEEAAKQKKEKVWAHYEEQPVEEVMPVLEEKERSASYKPVFVTEITDDLHFYVQDVETGTQLEKLMENMRNDIASHPPVEGSYAPRRGEFCIAKFVDGEWYRARVEKVESPAKIHVFYIDYGNREVLPSTRLGTLSPAFKHSGAAQLKPRSMPSLSSRCPKMMMPARTPWTAVVSGYSRTLSACFNVGTPGVAGLPPCQPGSFADFQGRCGGWGW

SEQ ID NO: 51016 - protein, 623 aa, Homo sapiens
  DOMAIN (145)..(161): Thermonuclease family proteins domain identified by eMATRIX, accession number BL01123D, p-value=6.651e-11, raw score of 9.68
  DOMAIN (55)..(433): Staphylococcal nuclease homologues domain identified by PFam, accession name SNase, E-value=5.6e-14, PFam score of 59.9
  misc_feature (1)...(623): Xaa = X or * as defined in Table 2
XGSQPAPRLDSLSPTPTPTLTPPVRPAAPLVAFASPHMASSAQSGGSSGGPAVPTVQRGIIKMVLSGCAIIVRAREFLRKKLIGKEVCFTIENKTPQGREYGMIYLGKDTNGENIAESLVAEGLATRREGMRANNPEQNRLSECEEQAKAAKKGMWSEGNGSHTIRDLKYTIENPRHFVDSHHQKPVNAIIEHVRDGNYYLVTVMLSGIKCPTFLREADGSETSEPFAAEAKFFTESRLLQRDVQIILESCHNQNILGTILHPNGNITELLLKEGFARCVDWSIAVYTRGAEKLRAAERFAKERRLRIWRDYVAPTANLDQKDKQFVAKALNAPEEPETSQGLVQEGEPFSEEATLFTKELVLQREVEVEVESMDKAGNFIGWLHIDGANLSVLLVEHALSKVHFTAERSSYYKSLLSAEEAAKQKKEKVWAHYEEQPVEEVMPVLEEKERSASYKPVFVTEITDDLHFYVQDVETGTQFQKLMENMRNDIASHPPVEGSYAPRRGEFCIAKFVDGEWYRARVEKVESPAKIHVFYIDYGNREVLPSTRLALGCCQLKPRSIAFAFIQVPQDDDARTDAVDSVVRDIQNTQCLLNVEHLSAGCPPCPPAVCRFQRPMWGLGLG

SEQ ID NO: 51017 - protein, 107 aa, Homo sapiens
MTKSFGSVLSIFKTRYFVSALLLPTRKYLALVSCRTSFWTELMMGAAAVGMAAANGGPTTGHEPPDRPRRLGEKTPQPLDIKSSQEKQTLGTKPIDDQDEIVDPGIQ

SEQ ID NO: 51018 - protein, 206 aa, Homo sapiens
MAEGAGEALLVTVHAVIMVILLAQGQGTGRGMSVPGCAPLQTLPYQTLWALHKPACCPYHFSEQLFLPTRVSVMVRESPSVRIPEALARRYFLVGSNNAETKYRVLKIDRTEPKDLVIIDDRHVYTQQEVRELLGRLDLGNRTKMGQKGSSGLFRAVSAFGVVVKVLDGKPRAVSSCVSYHMIQRSGGAWSMEREKNGVDVQRHLD

SEQ ID NO: 51019 - protein, 155 aa, Homo sapiens
  misc_feature (1)...(155): Xaa = X or * as defined in Table 2
MGAAAVGMAAANGGPTTGHEPSDRPRRLGEKTPQALDIKSSQEQHPLGTKPIDDQASPAPHVGSGAGGRIIERSGRGSRDLRAAERGSEGHHLWSKVTISNWKRNDKELQPRLPRPRPTKQQVRGGQRSPRQPPDSPAESLEAVASLRRVRLRPX

SEQ ID NO: 51020 - protein, 560 aa, Homo sapiens
MADIGGHAIYKVEDTNMIYIPNDSVRVTHPDEARYLRIFQNVDLSSNFYFSYSYDLSHSLQYNLTVLRMPLEMLKSEMTQNRQESFDIFEDEGLITQGGSGVFGICSEPYMKYVWNGELLDIIKSTVHRDWLLYIIHGFCGQSKLLIYGRPVYVTLIARRSSKFAGTRFLKRGANCEGDVANEVETEQILCDASVMSFTAGSYSSYVQVRGSVPLYWSQDISTMMPKPPITLDQADPFAHVAALHFDQMFQRFGSPIIILNLVKEREKRKHERILSEELVAAVTYLNQFLPPEHTIVYIPWDMAKYTKSKLCNVLDRLNVIAESVVKKTGFFVNRPDSYCSILRPDEKWNELGGCVIPTGRLQTGILRTNCVDCLDRTNTAQFMVGKCALAYQLYSLGLIDKPNLQFDTDAVRLFEELYEDHGDTLSLQYGGSQLVHRVKTYRKIAPWTQHSKDIMQTLSRYYSNAFSDADRQDSINLFLGVFHPTEGKPHLWELPTDFYLHHKNTMRLLPTRRSYTYWWTPEVIKHLPLPYDEVICAVNLKKLIVEEIPQIWRRDLYPQ

SEQ ID NO: 51021 - protein, 99 aa, Homo sapiens
MGKGDLQAVPGPCSPALHLQPGSSIPCPSSSFSTWLQSSRNFTEDRPVPPPLSRERSSGGLFSRPHTLFAERPGQTTSTRFRSHWRPLIPAPAAHASTK

SEQ ID NO: 51022 - protein, 117 aa, Homo sapiens
QKKQVEHQLEEAKKAINEIHKAQTEQLETINILTLEKADLKTTLYHTKRAARHFEEESKDLAGHLQYALQRIQELERALCAVSTQQQEEDRSLSCSEAVLQWRLQRTIKEQALLNAH

SEQ ID NO: 51023 - protein, 117 aa, Homo sapiens; identical to SEQ ID NO: 47667

SEQ ID NO: 51024 - protein, 171 aa, Homo sapiens
MALARGSRQLGALVWGACLCVLARHPFGFGQVPDNWREVAVGDSTGMARARTSVSQQRHGGSASSVAASAFASTYRQQPSYPQQFPYPQAPFVSQYENYDPASRTYDQGFVYYRPAGGGVGAGGGLKEYQQRKSPGIPAGAKTKKKKTDSSLETTTSGGCHSPGDIQDILK

SEQ ID NO: 51025 - protein, 176 aa, Homo sapiens
  DOMAIN (109)..(123): Phage integrase family domain identified by eMATRIX, accession number PF00589B, p-value=1.621e-11, raw score of 16.17
  DOMAIN (8)..(155): "Phage" integrase family domain identified by PFam, accession name Phage_integrase, E-value=1.2e-06, PFam score of 27.0
  misc_feature (1)...(176): Xaa = X or * as defined in Table 2
MEAITNGMMNLNRQRHQRLVALRIIFAHGDGGQHLDSEEEEAPRPTPNIPEDLESREATPQTLGLESPARWTLKAPPWXVTDRTVRTWIGEAGAAADADGVTFSVPVTPHTFRHSYAMHMLYAGIPLKVLQSLMGHKSISSTEVYTKVFALDVAARHRVQFAMPESDAVAMLKQLS

SEQ ID NO: 51026 - protein, 141 aa, Homo sapiens
MGCWSGNEGAPVAPETGAGCLPWPLRKQFKFTHHPNASAEKARNVLAVETVPGELVGEQAANQPAPGHPNSINFYSLKQWGNELKVSSDESACGLFYSPLSSSMWPGSQMIVMISQYQELAVALESSSVTINQLNENIESL

SEQ ID NO: 51027 - protein, 207 aa, Homo sapiens
  misc_feature (1)...(207): Xaa = X or * as defined in Table 2
MVILEHLQKPLGPEVFQAYDPDSACEGLAFQLLGTPSGLPVECRDQPGEPATEFSCRELEAGSLVYVHRGGPAQDLTFWVSDGLQASPPATLKVMAIQPAIQIHRSTGLHLAQGSAMPILPANLLVETNAVGQDVTESLKQVQLEQDEYAKHIKGERARWQERMWKMSVEARTLKEEKKRDIHRIQELKRSLSELKNQMAVINHKKX

SEQ ID NO: 51028 - protein, 110 aa, Homo sapiens
MKTANNCLSREGKVMLGKVLRSPEPSSQERSEAAGDLGGQSPGQGISILEPGLPPEEQFRGRDSIRAGRLHTGLEHPSPQPRELIRVWACFSLRRLQTRKCFCKGLCFSS

SEQ ID NO: 51029 - protein, 542 aa, Homo sapiens
MFANSGVNKSGKLIRWLAYQPARPEVQTMYRPRRGVLGASRDKGSEWLRIPSPTLSEVTRRFTSFPRFLTVLHSPTTSACLVVWETADFRPRSGDGGQHLDSEEEEAPRPTPNIPEDLESREATSQYQELAVALESSSVTISQLNENIESLKEIPEGNLGIAIKRGATQAFAKENNQKAYKETYGVSHITRHDMLQIPKQQQNEKYQVPQFDQSTIKNIESAKGLDVWDSWPVESYPSSSPIWFVDSEDPNLTSVLERLEDTKNNNLIQPKVIPSLLRLGSKRDYEVAFAHPSPALSNAPYEEPQFAMMITAATNNFAAWDFPDFGTTIKQDFCLLGQTSVDRLLQLSQGQAVKGNQLLPVSLVKRKTTLAPNTQTASPRALARFINAAGTTGFPTGKRAVSATQLMDFADFGTTIKQDFRLLGQTSVDRLLQLSQGQAVKGNQLLPVSLVKRKTTLAPNTQTASPPRVGRFINAAGTTGFPTGKRAVSATQLMGTARDPQIETSHFFTLQSSSCREAVLQWRLQQTIKEQALLNAHVTQTQ

SEQ ID NO: 51030 - protein, 570 aa, Homo sapiens
MALWRGSAYAGFLALALTWRDRKKKFPGDDEAPGVKRTWAAGAGMRGRQWLRKRVEVVCTGRSANTVCAGVRAAGLVEKSPPPSLSRVGRRFRFCGDLDCPDRVLAEISTLAKMVECTGSTLGGGGYKKILKLTADAKFVEEHEGKKDIDSPTFLSSASSWWSSSSAYGSRRPGGFELKLIGQQGESGDVKATVAVLSFILSGAAKHSVDGKSLASELQQLGLPKEHAASPCCCYEEKQSPLQKHLRVCSLRTWSLAARVAEGTAETVDPSAAPKTSVWSSRVCWGRLLATISPSVNETDTCGMEDRRLVVCRPWRAQCHMKAWGWRHPEEGGTHSGAPSAVLQALAVAIQLGGHLADPLLQVDPLSSCGAVSLDILIYLVFYYRTASVPETYIVKTLFKKLESQSLIQSNVLTRSNSMKAERGEEAAKEKSEASRGWFMRFKERSCLHNIKMQGEAASADVEAAASYPKDLAKITDEHGYTKQQVRCIQNSLLLEGNAEEVRKIIVCSMSPPLKPGGPVTLVEEFLCASKASVSAVSGWISKWRNWQEIRRQEEREDRASLPDLQASES

SEQ ID NO: 51031 - protein, 1717 aa, Homo sapiens
  DOMAIN (204)..(226): SPUMAVIRUS ASPARTIC PROTEASE (A9) SIGNATURE domain identified by eMATRIX, accession number PR00920E, p-value=6.870e-09, raw score of 13.24
  DOMAIN (500)..(533): TPR Domain domain identified by PFam, accession name TPR, E- value=0.058, PFam score of 20.0
MERLETINILTLEKADLKTTLYHTKRAARHFEEESKDLAGRLQYSLQRIQELERALCAVSTQQQEEDRGHCLSSPDQNFSLFTIQSSSCREAVLHRRLQQTIKERALLNAHVTQVTESLKQVQLERDEYAKHIKGERARWQERMWKMSVEARTLKEEKKRDIHRIQELERSLSELKNQMGKMGLLQDEAKHLRQEVEGLEGKLQSQVENNQALSLLSKEQKQRLQEQEEMLREQEVQRVREQERLCEQNERLREQQKTLQEQGERLRKQEQRLRKQEERLRKEEERLQKQEKRLWDQEERLWKKEERLQKQEERLALSQNHKLDKQLAEPQCSFEDLNNEKKSALQLEQQVKELQEKLDEVKEMQYVATYQQLTSEKEALHRQLLLQTQLVDQLQQQEAWGKAEHLEAASQQNQQLETQLSLVALPGEDPLMLLVSHLLIALAPHPFREPVVRHFVTCDQQLGIYQKAFEHLGNALTYDPTNYKAISCLKRANYLAPFDWKILYNLGLVHLTMQQYASAFHFLSAAINFQPKMGELYMLLAGLLSTCNPLVNLNYAVLLYNQGEKKNALAQYQEMEKKVSLLKDNSSLEFDSEVCLLLAPKSHNQSNQTRERKGIQISKEEVKLSLFADDMIVYLENLKDSSKKLLELVLLCGPVGPKLHELLDDNVFVPPESLQEVDEFHLILEYQAGEEWGQLKAPHANRFIFSHDLSNGAMNMLEVFVSSLEEFQPDLVVLSGLHMMEGQSKELQRKRLLEVVTSISDIPTGIPVHLELASMTNRELMSSIVHQLFDIGCGPTKSHKAKGQNQLNMFPRVDSTEEAVHLNKIRVLDEGRGGEWLLQSTVHTSMERRWDLIPGCKSSLCHLLSVCPQKSSNIHLDTAEGKERLKGLDQGSRKGNFWGISFPQSQNSHRNHSHQELLLLNNMTVMEQIQQKEYPSPIAAQTKYQDYLCLDLIGLPWVSVALVTPPLAQSHSSLVGDWRCSLMWPQPYLPPHPMMLEESRQNKLAAAKKKLKEYQQRKSPGIPAGAKTKKKKTDSSPETTTSGGGHSPGDSQYQELAVALESSSVTISQLNENIESLKQQKKQVEHQLEEAKKTNNEIHKAQMERLETINILTLEKADLKTTLYHTKRAARHFEEESKDLAGRLQYSLQRIQELERALCAVSTQQQEEDRGHCLSSPDQNFSLFTIQSSSCREAVLHRRLQQTIKERALLNAHVTQVTESLKQVQLERDEYAKHIKGERARWQERMWKMSVEARTLKEEKKRDIHRIQELERSLSELKNQMVENNQALSLLSKEQKQRLQEQEEMLREQEVQRVREQERLCEQNERLREQQKTLQEQGERLRKQEQRLRKQEERLRKEEERLQKQEKRLWDQEERLWKKEERLQKQEERLALSQNHKLDKQLAEPQCSFEDLNNEKKSALQLEQQVKELQEKLDEVKEMQYVATYQQLTSEKEALHRQLLLQTQLVDQLQQQEAWGKAEHLEAASQQNQQLETQLSLVALPGEGDGGQHLDSEEEEAPRPTPNIPEDLESREATSSFMDLPKEKADGTEQVERRELGFVQPSGVTDGMRESFTVYESQGAVPNTRHQEMEDVIRLAQKEEEMKVKLLELQELVLPLVGNHEGHGKFLIAAQNPADEPTPGAPAPPGTWGCRQSLIQSNVLTRSNSMKAERGEEAAKEKSEASREIATATPSFSHHPDQPAAINIKAKHSASKKIMTV

SEQ ID NO: 51032 - protein, 183 aa, Homo sapiens
MRFRFCGDLDCPDWVLAEISTLAKMSSVKLRLLCSQVLKELLGQGIDYEKILKLTADAKFESGDVKATVAELSFILSSAAKHSVRWRILVPVKLQQLGLPKEHAASLCRCYEEKQSPLQKHLRVCSLRMNRLAGVGWRVDYTLSSSLLQSVEEPMVHLRLEVAAAPGTPAQPVAMSLSADKFQ

SEQ ID NO: 51033 - protein, 1262 aa, Homo sapiens
  DOMAIN (846)..(868): SPUMAVIRUS ASPARTIC PROTEASE (A9) SIGNATURE domain identified by eMATRIX, accession number PR00920E, p-value=6.870e-09, raw score of 13.24
MRPGFVVSVGMVEGVPGEPDPYPVLCYTPWPGHDLPASRAALAQGRSWSLHRMIGQDSGRRRSRRQHFAPGTSSGLRSAPGLTRAGPAPPEAVSPSHVIVDSADLAGPEKEIPGPWLPRAMYEAPGVKRAWAAGAGMRGRQWLRKRVEVVCTGRSANTVCAGVRAAGLVEKSPPPSLSRMGRRFRFCGDLDCPDRVLAEISTLAKMVECTGSTLGGGGYKKILKLTADAKFVEEHEGKKDIDSPTFLSSASSWWSSSSAYGSRRPGGFELKLIGQQGESGDVKATVAVLSFILSGAAKHSVDGKSLASELQQLGLPKGAQAQPPPATSRASPFYPQSTRPARAAVMRRSKAPLQKHLRVCSLRTWSLAARVAEGTAETVDPSAAPKTSVWSSRVCWGRLLATISPSVNETDTCGMEDRRLGVQALACTVPHDGLGWRHPEEGGTHSGGSPLEHLEPKKLSLTFAIPGTRPLIMMKVDPNPLRGLKEQSEPILSPDARKGSSGDGEVQRNLVPAAVNPYVMIFLPALFRVLVLAAVFGQLKEYQQRKSPGIPAGAKTKKKKTDSSPETTTSGGCHSPGDSQYQELAVALESSSVTINQLNENIESLKQQKKQVEHQLEEAKKTNNEIHKAQMEQLETINILTLEKADLKTTLYHTKRAARHFEEESKDLAGRLQYSLQRIQELERALCAVSTQQQEEDRGHCLSSPDQNFSLFTIQSSSCREAVLQRRLQQTIKERALLNAHVTQVTESLKQVQLERDEYAKHIKGERARWQERMWKMSVEARTLKEEKKRDIHRIQELERSLSELKNQMAEPPSLAPPAVTSVVEQLQDEAKHLRQEVEGLEGKLQSQVENNQALSLLSKEQKQRLQEQEEMLREQEAQRVREQERLCEQNERLREQQKMLQEQGERLRKQEQRLRKQEERLRKEEERLQKQEKRLWDQEERLWKKEERLQKQEERLALSQNHKLDKQLAEPQCSFEDLNNEKKSALQLEQQVKELQEKLDEVKEMQYMATYQQLTSEKEALHRQLLLQTQFVDQLQQQEAWGKAEHLEAASHQNQQLETQLSLVALPGEGDGGQHLDSEEEEAPRPTPNIPEDLESREATEPEAEAPAPGTGGEFVCGESYRALKEAMVKLKGRESFTVYESQGAVPNTRHQEMEDVIRLAQKEEEMKVKLLELQELVLPLVGNHEGHGKFLIAAQNPADEPTPGAPAPQELGAAGEQDVFYEVSLDNNVEPAPGAAREGSPHDNPTVQQIVQLSPVMQDT

SEQ ID NO: 51034 - protein, 72 aa, Homo sapiens
MGTDRRFDEDDDKSFRRAPSWRKKFRPKDIRGLAAGSAETLPANFRVTSSMSSPSMQPKKMQMDVYPHYFYR

SEQ ID NO: 51035 - protein, 48 aa, Homo sapiens
MSLMSSWLTVCSAPLCSRSNRRALGEEGGEVSHFMVVLSSRTSSLEGG

SEQ ID NO: 51036 - protein, 56 aa, Homo sapiens
  misc_feature (1)...(56): Xaa = X or * as defined in Table 2
DDDKSFRRAPSWRKKFRPKDIRGLAAGSAETLPANFRVTSSMSSPSMQPKKMQMDX

SEQ ID NO: 51037 - protein, 543 aa, Homo sapiens
  DOMAIN (5)..(57): SAM domain (Sterile alpha motif) domain identified by PFam, accession name SAM, E-value=0.02, PFam score of 13.3
MNHEWIGNEWLPSLGLPQYRSYFMECLVDARMLDHLTKKDLRGQLKMVDSFHRNSFQCGIMCLRRLNYDRKELERKREESQSEIKDLGPTSGQHEPDMKACAPQLLRQPTHFLGTVGPRPRGPKVRPLTFMSEPAGKHRLLGRCLMVATLGSTAMFSAAREGLEAGTISSGLSAIEPGLGRQKSLAQQGAYKSGGPVPVLVCTTSCPSAPGTLLNGSAAQRQLSLGGSREGEAPEGEVYSCFTRHLRTKKSTLIVNNSQDVMPLTSHTVLYAYPPAIDSSKTKHLVYPQTENLKPVCCLVDFHKSNIPAQDVPVLVTYETAAEVLQAGLRGAQGGLSGARAVPVPAALQSLLWDRLIPMYSDPPGFSTLLVLAVTAELNASTFEDVTQVSSAYQKTVPVEADVLVWSNDRVIRWILSIGLKEYANNLIESGVHGALLALDETFDFSALALLLQIPTQNTQRAPTTALTLRSKSMTSELEELAQASEACVSCSPRGSDQKAPSSGDLCVDSVGLAEQSGLHSRLRERPAPLCKVCKQQREALAL

SEQ ID NO: 51038 - protein, 253 aa, Homo sapiens
MAQKEDMEERITTLEKRYLAAQREATSVHDLNDKLENEIANKDSMHRQTEDKNRQLQERLELAEQKLQQTLRKAETLPEVEAELAQRVAALSKAEERHGNIEERLRQMEAQLEEKNQELQRARQREKMNEEHNKRLSDTVDKLLSESNERLQLHLKERMAALEDKDQLVLNIEALRAELDHMRLRGASLHHGYGINHRPHLGSVPDFRFPMADGHTDSYSTSAVLRRPQKGRLAALRDEPSKARSLCEIPLLT

SEQ ID NO: 51039 - protein, 860 aa, Homo sapiens
  DOMAIN (591)..(625): Tropomyosins proteins domain identified by eMATRIX, accession number BL00326A, p-value=1.108e-10, raw score of 14.01
  DOMAIN (792)..(849): SAM domain (Sterile alpha motif) domain identified by PFam, accession name SAM, E-value=0.013, PFam score of 14.9
MMCEVMPTISEAEGPPGGGGGHGSGSPSQPDADSHFEQLMVSMLEERDRLLDTLRETQETLALTQGKLHEVGHERDSLQRQLNTALPQEFAALTKELNVCREQLLEREEEIAELKAERNNTRLLLEHLECLVSRHERSLRMTVVKRQAQSPAGVSSEVEVLKALKSLFEHHKALDEKVRERLRVALERCSLLEEELGATHKELMILKEQNNQKKTLTDGVLDINHEQENTPSTSGKRSSDGSLSHEEDLAKVIELQEIISKQSREQSQMKERLASLSSHVTELEEDLDTARKDLIKSEEMNTKLQRDVREAMAQKEDMEERITTLEKRYLAAQREATSVHDLNDKLENEIANKDSMHRQTEDKNRQLQERLELAEQKLQQTLRKAETLPEVEAELAQRVAALSKAEERHGNIEERLRQMEAQLEEKNQELQRARQREKMNEEHNKRLSDTVDKLLSESNERLQLHLKERMAALEDKNSLLREVEMSQISGSPWQMATQTPTAPVQCCGAHRKGRLAALRDEPSKVQTLNEQDWERAQQASVLANVAQAFESDADVSDGEDDRDTLLSSVDLVSASGQADAHTLAMMLQEQLDAINKEIRLIQEEKENTEQRAEEIESRVGSGSLDNLGRFRSMSSIPPYPASSLASSSPPGSGRSTPRRIPHSPAREVDRLGVMTLLPPSREEVRDDKTTIKCETSPPSSPRALRLDRLHKGALHTVSHEDHRGMWLPAEPNVKSGGHHVGPCPTPEIQREIGISNPPAQAEAEAGHPRRSMSLNPARLPPPTSRTTLAYGDMNHEWIGNEWLPSLGLPQYRSYFMECLVDARMLDHLTKKDLRGQLKMVDSFHRNSFRVWNYVPEKVKL

SEQ ID NO: 51040 - protein, 351 aa, Homo sapiens
  DOMAIN (88)..(119): Protein kinases ATP-binding region proteins domain identified by eMATRIX, accession number BL00107A, p-value=5.800e-22, raw score of 18.39
  DOMAIN (1)..(238): Eukaryotic protein kinase domain identified by PFam, accession name pkinase, E-value=1.2e-70, PFam score of 248.1
MKVLRKAALVQRAKTQEHTRTERSVLELVRQAPFLVTLHYAFQTDAKLHLILDYVSGGEMFTHLYQRQYFKEAEVRVYGGEIVLALEHLHKLGIIYRDLKLENVLLDSEGHIVLTDFGLSKEFLTEEKERTFSFCGTIEYMAPEIIRSKTGHGKAVDWWSLGILLFELLTGASPFTLEGERNTQAEVSRRILKCSPPFPPRIGPVAQDLLQRLLCKDPKKRLGAGPQGAQEVRNHPFFQTHLPGFVEQAEALKAKGVQVVACLSVNDAFVTGEWGRAHKAEGKVRLLADPTGAFGKETDLLLDDSLVSIFGNRRLKRFSMVVQDGIVKALNVEPDGTGLTCSLAPNIISQL

SEQ ID NO: 51041 - protein, 409 aa, Homo sapiens
  DOMAIN (151)..(182): Protein kinases ATP-binding region proteins domain identified by eMATRIX, accession number BL00107A, p-value=5.800e-22, raw score of 18.39
  DOMAIN (33)..(301): Eukaryotic protein kinase domain identified by PFam, accession name pkinase, E-value=8.2e-85, PFam score of 295.2
MGDEDDDESCAVELRITEANLTGHEEKVSVENFELLKVLGTGAYGKVFLVRKAGGHDAGKLYAMKVLRKAALVQRAKTQEHTRTERSVLELVRQAPFLVTLHYAFQTDAKLHLILDYVSGGEMFTHLYQRQYFKEAEVRVYGGEIVLALEHLHKLGIIYRDLKLENVLLDSEGHIVLTDFGLSKEFLTEEKERTFSFCGTIEYMAPEIIRSKTGHGKAVDWWSLGILLFELLTGASPFTLEGERNTQAEVSRRILKCSPPFPPRIGPVAQDLLQRLLCKDPKKRLGAGPQGAQEVRNHPFFQGLDWVALAARKIPAPFRPQIRSELDVGNFAEEFTRLEPVYSPPGSPPPGDPRIFQAGHSAVALSRSPGAEKYTFAAEPLHNLHLCHHGHVEHGHNGQALGWLGKEDN

SEQ ID NO: 51042 - protein, 634 aa, Homo sapiens
  DOMAIN (196)..(209): Phorbol esters / diacylglycerol binding domain proteins domain identified by eMATRIX, accession number BL00479C, p-value= 9.357e-11, raw score of 12.01
  DOMAIN (33)..(604): Eukaryotic protein kinase domain identified by PFam, accession name pkinase, E-value=1.8e-117, PFam score of 403.7
  misc_feature (1)...(634): Xaa = X or * as defined in Table 2
MGDEDDDESCAVELRITEANLTGHEEKVSVENFELLKVLGTGAYGKVFLVRKAGGHDAGKLYAMKVLRKAALVQRAKTQEHTRTERSVLELVRQAPFLVTLHYAFQTDAKLHLILDYVSGGEMFTHLYQRQYFKEAEVRVYGGEIVLALEHLHKLGIIYRDLKLENVLLDSEGHIVLTDFGLSKEFLTEEKERTFSFCGTIEYMAPEIIRSKTGHGKAVDWWSLGILLFELLTGASPFTLEGERNTQAEVSRRILKCSPPFPPRIGPVAQDLLQRLLCKDPKKRLGAGPQGAQEVRNHPFFQGLDWVALAARKIPAPFRPQIRSELDGYSFVAPSILFDHNNAVMTDGLEAPGAGDRPGRAAVARSAMMQDSPFFQQYELDLRARAAQEFAVKILSRRLEANTQREVAALRLCQSHPNCAAHCTWSWSCCWGGELLEHICKKRHFSESEASQILRSLVSAVSFMHEEAGVVHRDLKPENILYADDTPGAPSPGVPMQTPSFTLQYAAPELLAQQGYDESCDLWSLGVILYHDAVGAGSLPCGSGQGGQSQAADIMCKIREGRFSLDGEAWQGVSEEAKELVRGLLTVDPAKRLKLEGLRGSSWLQDGSARSSPPLRNARRASSPLGPAVRFXGL

SEQ ID NO: 51043 - protein, 572 aa, Homo sapiens
MLPRLVSNSWAQSVLLPPTVLGSQSPGNLRASRQTQITSPAPGDHSWSPRVEGVITEDLVSHPPGRDGFCCSSVPRAGDRTAVRPLQSVTCRLHPGAKEGSEEGAVHTPPPWSPGPEPFIPLGTPTLAQLRHPPQCTSQCLQELQQMNNHDPKNWQGAVRLITSSDRREARGGFPEVSARKLLGSLPGMQTAEEKVKLSGIDSSKKRKLKMAFNNTKLSHFALIKIRTMMRLFVTYLTGKGSLAHHEPVGRGVDEKGKGGPEGGRDPAPRNYPGGTGLHGTSVNKGAWSEDDTSTYFTGCCEDEVRPDDGRMHECFIILKALFPLAKRVEGIKVANKSFVPWLGPLQPPIGTERPIGDLRAENAKRGLEILEKRFPACSSSVSSCQDGAGSGPSGKGDALPDPGSPSGAPAARTRLSRHQRRPGIYEFAGAEASCRLQPSQPRKSRSPRGDSLPRQPGPRVPQAPTHQLGSPRARTPAPILALPDPQVFQFSCAFENVHNKMLGKMLGDIHVVAVVDLYGEATAATDSRVIDTLCVHLMTLTIFNADFRNFTDGPILQTRKLRLSKAKHLVV

SEQ ID NO: 51044 - protein, 65 aa, Homo sapiens
MWLWEFCHQGWWPQPGPQNPEAVQWAANPPARGSPRLPQCLDGLEGNADIPTMVHGREWWADGAA

SEQ ID NO: 51045 - protein, 41 aa, Homo sapiens
MWGSDRVSVNSGVGARGGWPCDRARPSEEEAALRGVAHVVQ

SEQ ID NO: 51046 - protein, 7 aa, Homo sapiens
MGAQLST

SEQ ID NO: 51047 - protein, 415 aa, Homo sapiens
  DOMAIN (154)..(183): Eukaryotic molybdopterin oxidoreductases proteins domain identified by eMATRIX, accession number BL00559I, p-value=3.531e- 25, raw score of 13.63
  DOMAIN (126)..(245): FAD/NAD-binding Cytochrome reductase domain identified by PFam, accession name Cyt_reductase, E-value=2.3e-57, PFam score of 204.0
MELFLMVLSIEAQLGHMVLFPVWFLYSLLMKLFQRSTPAITLESPDIKYPLRLIDREGPVQRAQVTAQREPARPYVGITFIHGCVEVRHLTRSVHVCASVLGVGVTSYKDKQALGKGGDTKEEWDGGSEAWEPPWEASALGTVQQLWASLQIISHDTRRFRFALPSPQHILGLPVGQHIYLSARIDGNLVVRPYTPISSDDDKGFVDLVIKVYFKDTHPKFPAGGKMSQYLESMQIGDTIEFRGPSGLLVYQGKGKFAIRPDKKSNPIIRTVKSVGMIAGGTGLAQHVRGPAGYFAGITPMLQVIRAIMKDPDDHTVCHLLFANQTEKDILLRPELEELRNKHSARFKLWYTLDRAPEAWDYGQGFVNEEMIRDHLPPPEEEPLVLMCGPPPMIQYACLPNLDHVGHPTERCFVF

SEQ ID NO: 51048 - protein, 246 aa, Homo sapiens
  DOMAIN (56)..(85): Eukaryotic molybdopterin oxidoreductases proteins domain identified by eMATRIX, accession number BL00559I, p-value=3.531e- 25, raw score of 13.63
  DOMAIN (22)..(126): FAD/NAD-binding Cytochrome reductase domain identified by PFam, accession name Cyt_reductase, E-value=6.2e-26, PFam score of 99.6
MGAQLSTLGHMVLFPVWFLYSLLMKLFQRSTPAITLESPDIKYPLRLIDREMEKASHDTRRFRFALPSPQHILGLPVGQHIYLSARIDGNLVVRPYTPISSDDDKGFVDLTEKDILLRPELEELRNKHSARFKLWYTLDRAPEAWGLRPGAFVEWREMIRGPPFHPQREGAAGADVWPPTHDPVRLPSQPGPRGPPHGALLRLLRAGHRSHGHPPLAPNALFTLTPGTSPHRTLGPRVQTGLPVPW

SEQ ID NO: 51049 - protein, 50 aa, Homo sapiens
MKWMFKEDRWRGTQMRGVREEFERNIPTGFRKPCPFWKSYWNDISYIEVS

SEQ ID NO: 51050 - protein, 191 aa, Homo sapiens
MCPSPDYNSKYLQLCLHLQRAGARPSAPEKGRPAAPAAVADRPHIRRAGRRGARRRTGPEEAAVRPSDYPVALSGCGGALHKRAGWEKFARLSGRQLMDLGSTPLRTQGTARGREGEGCRRGDGEKDGGGGGSAASGATACLRNRACSFPWRPLPLSPYARVRSRRLRQRHLSAFPSQPILGWVQCRLRFR

SEQ ID NO: 51051 - protein, 108 aa, Homo sapiens
  DOMAIN (9)..(19): Delta 1-pyrroline-5-carboxylate reductase proteins domain identified by eMATRIX, accession number BL00521C, p-value=3.919e- 10, raw score of 9.24
  DOMAIN (1)..(108): Delta 1-pyrroline-5-carboxylate reductase domain identified by PFam, accession name P5CR, E-value=2.6e-07, PFam score of -25.1
  misc_feature (1)...(108): Xaa = X or * as defined in Table 2
MAFQPAPKVIRCMTNTPVVVQEGATVYATGTHALVEDGQLLEQLMSSVGFCTEVEEDLIDAVTGLSGSGPAYGAAKMLLDSEQHPCQLKDNVCSPGGATIHALHFLEX

SEQ ID NO: 51052 - protein, 48 aa, Homo sapiens
  DOMAIN (15)..(27): Delta 1-pyrroline-5-carboxylate reductase proteins domain identified by eMATRIX, accession number BL00521B, p-value=6.400e- 11, raw score of 10.93
  misc_feature (1)...(48): Xaa = X or * as defined in Table 2
MGVNLTRSNKETVKHSDVLFLAVKPHIIPFILDEIGADVQARHIVVSX

SEQ ID NO: 51053 - protein, 41 aa, Homo sapiens
  misc_feature (1)...(41): Xaa = X or * as defined in Table 2
MGLPRRLAIQLGAQALLGAAKMLLDSEHHPCQLKDNVCSPX

SEQ ID NO: 51054 - protein, 87 aa, Homo sapiens
MYRVAPHLGLSCANLMPLPQEGLEKLGSLTARLRGRSQPECLSVSWRGNAKPAVPEYLLQARPSLGPGWPHHSKPAPPLLALWIRES

SEQ ID NO: 51055 - protein, 242 aa, Homo sapiens
  DOMAIN (120)..(147): SHC PHOSPHOTYROSINE INTERACTION DOMAIN SIGNATURE domain identified by eMATRIX, accession number PR00629F, p-value=2.558e- 26, raw score of 10.95
  DOMAIN (1)..(152): Phosphotyrosine interaction domain (PTB/PID) domain identified by PFam, accession name PID, E-value=8.9e-35, PFam score of 128.1
MGCVEVLQSMSALDFNTWTQVTREAISFVCEAVPGAKGVTRRRKPCNHPLSSILGRSNLKFAAMTITLTISTSSLNVMVADCKQIITNHHMQSISLASSGDPDTAKYVANVAKDPVSQKACHILECPEGLAQDVISTTGQAFKLHFKQYLRKPPKLVTPHDRMTGFDGLAWDEEEEEPPGHQHYNDFLGKESPLWHVVYMRLREGATPGAARPTPPSAQTPSHLGSTLPVGQSVGGDPEVCK

SEQ ID NO: 51056 - protein, 419 aa, Homo sapiens
MSRSYNDELQFLEKINKNCWRIKKGFVPNMQVEGVFYVNDALEKLMFEELRNACRGGGVGGFLPAMKQIGNVAALPGIVHRSIGLPDVHSGYGFAIGNMAAFDMNDPEAVVSPGGVGFDINCGVRLLRTNLDESDVQPVKEQLAQAMFDHIPVGVGSKGVIPMNAKDLEEALEMGVDWSLREGYAWAEDKEHCEEYGRMLQADPNKVSARAKKRGLPQLGTLGAGNHYAEIQVVDEIFNEYAAKKMGIDHKGQVCVMIHSGSRGLGHQVATDALVAMEKAMKRDKIIVNDRQLACARIASPEGQDYLKGMAAAGNYAWVNRSSMTFLTRQAFAKVFNTTPDDLDLHVIYDVSHNIAKVEQHVVDGKERTLLVHRKGSTRAFPPHHPLIAVDYQLTGQPVLIGGTMGTCSYVLTGTGTGA

SEQ ID NO: 51057 - protein, 291 aa, Homo sapiens
MGSWPSDCKKSWRCGAALGSQSEGLCLLKRSWVREDKLSSQEIPFLNILVTILRKATQSIVFYCGNPSRLRNYYQEVGAAVTNNVESALETDDVQIMEKFQMHANNMDMKCDSDEDSDGKERLGMFLQQQSQRYKKQMPTQPLPSLKVIFIHGGGRILTRHKQPRLGAPHPIISGCGSRSQRMSYEDPHYLHCALESVSRSLDLGQHRNPSKLVAIKGFSHVGVYFTHVHGVFDYEPEAHCEVSRPGNNRHGSSTRRHSTSLSSSVQCQTGVSVPDNHAGSEEVARREAHS

SEQ ID NO: 51058 - protein, 282 aa, Homo sapiens
MDGAGSRYPQQTNTGTENQMLHILTYEWELNNENTWTQGGEQHTLGPVGGNTRSLIHGHLRVVCEPSGENPGSLAGGELPTAGCIQVWPDNYVVGRVSEWLRCDNMHHQWLLLAACFWVIFMFMVASKFITLTFKDPDAGRLSGSQLGILFASCHHERCSLNCLACPCGGHMFEGHPPCSGGGSFKCMSSGCLGGFLSSPLLNVGIQMRTDKERQIGSQNADSTSCSCHLLIYITMFLPPNGHPACSGTAHDCPEHEADSEHEDPFPHPYDFILNQPAAPTP

SEQ ID NO: 51059 - protein, 480 aa, Homo sapiens
MGSCGEPSPTQECPQDASREQGGVSSKGTLTHRGQGASEQLLCVLAHLPVPPPTHAHTRPLTLQPTGKELPDSQLVQPLVYMERLELIRNVCRDDALKNLSHTPVSKFVLDRIFVCDKHKILFCQTPKVGNTQWKKVLIVLNGVCGSTECPLGRVLVAGAEEAGEDSKEESQEGWFDLKGLVAVQTGLFLLFPVSVVPYKFPVLMVIVTHSVRHPQGPTLAEPPGSLTVTLSASQSRVSVAGVRSSVCMQRSSSNGRFSPVRSIARGAFSSIEEIPENVVHDHEKNGLPRLSSFSDAEIQKRLKTYFKFFIVRDPFERLISAFKDKFVHNPRFEPWYRHEIAPGIIRKYRRNRTETRGIQFEDFVRYLGDPNHRWLDLQFGDHIIHWVTYVELCAPCEIMYSVIGHHETLEDDAPYILKEAGIDHLVSYPTIPPGITVYNRTKVEHYFLGISKRDIRRLYARFEGDFKLFGYQKPDFLLN

SEQ ID NO: 51060 - protein, 340 aa, Homo sapiens
VTRGTKNLSSGETQQGNVSPRLQKEESVNGCGVTTCTTKWLLLAACFWVIFMFMVASKFITLTFKDPDVYSAKQEFLFLTTMPETPKVGNTQWKKVLIVLNGAFSSIEEIPENVVHDHEKNGLPRLSSFSDAEIQKRLKTYFKFFIVRDPFERLISAFKDKFVHNPRFEPWYRHEIAPGHHQKIQEEPDRGPGGSSFEGFSWRYLGRSRTTGEDLSPEMTLPPPHPSFEDARGLPQACELPRHMTQNPNCYNLVWDGAPMLGLKTSRGKPANYHRIQCKFNTFRIPFISSKMGTAQRPFLITPTHPWTHVTGKVGNPSSPSNKTPAPQVASQQCGFPGNK

SEQ ID NO: 51061 - protein, 45 aa, Homo sapiens
  misc_feature (1)...(45): Xaa = X or * as defined in Table 2
MKVEVLPALTDNYMYLVIDDETKEAAIVDPVQPQKVVDAARKHGX

SEQ ID NO: 51062 - protein, 194 aa, Homo sapiens
  DOMAIN (19)..(177): Metallo-beta-lactamase superfamily domain identified by PFam, accession name lactamase_B, E-value=0.043, PFam score of -12.2
  misc_feature (1)...(194): Xaa = X or * as defined in Table 2
XLRKNLTVDEGTMKVEVLPALTDNYMYLVIDDETKEAAIVDPVQPQKVVDAARKHGVKLTTVLTTHHHWHCYDPRLADLTIQRYPCLLQILKASPSVLAKEALEGLHIMPVIHLQEIGWAYLAYSYLPGPLHSCLGGPYEGSPAPAPTPNQRSTDLGELPHKPPLATEGCSRCAAGFSPPPCHLHCDDLEVTPG

SEQ ID NO: 51063 - protein, 147 aa, Homo sapiens
MLGTAESPRIFHGKRLRSQYAKTGVDSCHLSAHIGDTLFVAGCGKFYEGTADEMCKALLEVLGRLPPDTVGSASLRAGRVYCGHEYTINNLKFARHVEPGNAAIREKLAWAKAPTSPLVTMSHWAPQGCDSVSGDLDGFEECWCGIV

SEQ ID NO: 51064 - protein, 69 aa, Homo sapiens
  misc_feature (1)...(69): Xaa = X or * as defined in Table 2
XLRKNLTVDEGTMKVEVLPALTDNYMYLVIDDETKEAAIVDPVQPQKVVDAARKHGVKLTTVLTTHHHX

SEQ ID NO: 51065 - protein, 250 aa, Homo sapiens
  DOMAIN (54)..(196): Metallo-beta-lactamase superfamily domain identified by PFam, accession name lactamase_B, E-value=2.2e-05, PFam score of 24.0
MVVGRGCSRRSLAALGAACARRGLGPALLGVFCHTDLRKNLTVDEGTMKVEVLPALTDNYMYLVIDDETKEAAIVDPVQPQKVVDAARKHGVKLTTVLTTHHHWDHAGGNEKLVKLESGLKVYGGDDRIGALTHKITHLSTLQAAPPCGPGESTVANEYTIKQTSKFARPRGNRQCPPSGKKLPWAQGEVQHRGAHSAIHPWQREFTYNPLHKSEGRKTVQAARRLIRTPVTTMRAVRREKDQVQRCPGT

SEQ ID NO: 51066 - protein, 1619 aa, Homo sapiens
  DOMAIN (1429)..(1449): NEUTROPHIL CYTOSOL FACTOR 1 SIGNATURE domain identified by eMATRIX, accession number PR00498E, p-value=7.750e-28, raw score of 13.75
  DOMAIN (1401)..(1525): SH3 domain identified by PFam, accession name SH3, E-value= 9.2e-36, PFam score of 132.2
MPLRGLHEVTSPRASAMFPPFPGSGSVKGRVRDVKEPGPITAHRMRFFFRTPAAESEERWSPCSSGVACIPSVGVWRFPSVGVWRFLDGWCLAVSDGWCVARATLSCFGCAMLMYQVAKYPKKGSQAVHRHSRKQSEPPANDIFNAAKAAKSDMQDWMVSMIVDREYSVAVEAVRLLILILKNMEGVLMDVDCESVYPIVLFYPECEIRTMGGREQRQSPGAQRTFFQLLLSFFVESKLHDHAAYLVDNLWDCAGTQLKDWEGLTSLLLEKDQSTCHMEPGPGTFHLLGVQKKTKDRTETRFGEMGQILGKIMMSHQPQPQEEQSPQRSTSGYPLQEVVDDEVSGPSAPGVDPSPPRRSLGWKRKRECLDESDDEPEKELAPEPEETWVAETLCGLKMKAKRRRVSLVLPEYYEAFNRLLEDPVIKRLLAWDKDLRVSDKIPSEPTILGASPKTLPPASRICIRPSNTPPPRNFHMSTVTPMLSYLANDMEEDDEAPKQNIFYFLYEETRSHIPLLRELWFQLCRYMNPRARKNCSQIALFRKYRFHFFCSMRCRAWVSLEELEERPKANELPQPPVPEPANAGKRKVREFNFEKWNARITDLRKQVEELFERKYAQAIKAKGPVTIPYPLFQSHVEDLYVEGLPEGIPFRRPSTYGIPRLERILLAKERIRFVIKKHELLNSTREDLQLDKPASGAEALGSTEAKAVPYQKFEAHPNDLYVEGLPENIPFRSPSWYGIPRLEKIIQVGNRIKFVIKRPELLTHSTTEVTQPRTNTPVKEDWNVRITKLRKQVEEIFNLKFAQALGLTEAVKVPYPVFESNPEFLYVEGLPEGIPFRSPTWFGIPRLERIVRGSNKIKFVVKKPELVISYLPPGMASKINTKALQSPKRPRSPGSNSKVPEIEVTVEGPNNNNPQTSAVRTPTQTNGSNVPFKPRGREFSFEAWNAKITDLKQKVENLFNEKCGEALGLKQAVKVPFALFESFPEDFYVEGLPEGVPFRRPSTFGIPRLEKILRNKAKIKFIIKKPEMFETAIKESTSSKSPPRKINSSPNVNTTASGVEDLNIIQVTIPDDDNERLSKVEKARQLREQVNDLFSRKFGEAIGMGFPVKVPYRKITINPGCVVVDGMPPGVSFKAPSYLEISSMRRILDSAEFIKFTVIRVFLKHSYTRIIHGCFPVTCKELAKSKAEVACIAVYETDVFVVGTERGCAFVNARTDFQKDFAKYLHLRRSLEVPGSTGGHPVMGDTFIRHIALLGFEKRFVPSQHYVYMFLVKWQDLSEKVVYRRFTEIYEFHKTLKEMFPIEAGAINPENRIIPHLPAPKWFDGQRAAENRQGTLTEYCSTLMSLPTKISRCPHLLDFFKVRPDDLKLPTDNQTKKPETYLMPKDGKSTATDITGPIILQTYRAIANYEKTSGSEMALSTGDVVEVVEKSESGWWFCQMKAKRGWIPASFLEPLDSPDETEDPEPNYAGEPYVAIKAYTAVEGDEVSLLEGEAVEVIHKLLDGWWVIRKDDVTGYFPSMYLQKSGQDVSQAQRQIKRGAPRRSSIRNAHSIHQRSRKRLSQDAYRRNSVRFLQQRRRQARPGPQSPGSPLAGVPPRPSADLILNRCSESTKRKLASAV

SEQ ID NO: 51067 - protein, 1162 aa, Homo sapiens; identical to SEQ ID NO: 41192
  DOMAIN (873)..(912): DNA mismatch repair proteins mutL / hexB / PMS1 proteins domain identified by eMATRIX, accession number BL00058B, p-value= 1.257e-33, raw score of 16.83
  DOMAIN (802)..(1139): DNA mismatch repair protein domain identified by PFam, accession name DNA_mis_repair, E-value=5.8e-43, PFam score of 156.2

SEQ ID NO: 51068 - protein, 103 aa, Homo sapiens
MKMIEYGQGQWTVPGLQLTARLCHQGLTATPVTSSLKNILTEMSFYCFDSRNDYSGKKNLLFNNELDFITPADDPFKSWNSKPGRASEGNPLWQAFHIQELRV

SEQ ID NO: 51069 - protein, 51 aa, Homo sapiens
MWKAYLRVCHSEDHRLLAFRGWRRYSETKPKLSSSLKSPKCLRRRLRRAPP

SEQ ID NO: 51070 - protein, 1379 aa, Homo sapiens
  DOMAIN (1176)..(1196): NEUTROPHIL CYTOSOL FACTOR 1 SIGNATURE domain identified by eMATRIX, accession number PR00498E, p-value=7.750e-28, raw score of 13.75
  DOMAIN (1148)..(1272): SH3 domain identified by PFam, accession name SH3, E-value= 9.2e-36, PFam score of 132.2
MPDDDEPKRHVYEVHDYVDNRSDLIECTSHCRLDEYTLSLRYPLWESSCQAVRSPSPMERGTRQPGFRHRVKKLPGDPSPQASKSPPAFRSFQAQRLRQELQMLMTECLTWARNGSSKHPLSLAQKPEFLFHQLQSRDNAICPIAEQKAVLRVPALLHFPCTGLPVAPAAQPPRQQQQQQQQQQQHRGSPPRRTTSPGSRARPRMRSGDRRLSGKLFVTANTSCSPRAGRRAPLLRRSAPRLLLCRRCLPRPAAPPCNLAGLLPFVRPGPAAAAPRARRRAPGSPGRLSGAEGAGAAARPPADEPPRTGRGRTMELHILEHRLQVASVAKESIPLFTYGLIKLAFLSSKTRKQPVLSQAQEATLVPDDDYSPPSKRPKANELPQPPVPEPANAGKRKVREFNFEKWNARITDLRKQVEELFERKYAEALGSTEAKAVPYQKFEAHPNDLYVEGLPENIPFRSPSWYGIPRLEKIIQVGNRIKFVIKRPELLTHSTTEVTQPRTNTPVKEDWNVRITKLRKQVEEIFNLKFAQALGLTEAVKVPYPVFESNPEFLYVEGLPEGIPFRSPTWFGIPRLERIVHGSNKIKFVVKKPELVISYLPPGMASKINTKALQSPKRPRSPGSNSKVPEIEVTVEGPNNNNPQTSAVRTPTQTNGSNVPFKPRGREFSFEAWNAKITDLKQKVENLFNEKCGEALGLKQAVKVPFALFESFPEDFYVEGLPEGVPFRRPSTFGIPRLEKILRNKAKIKFIIKKPEMFETAIKESTSSKSPPRKINSSPNVNTTASGVEDLNIIQVTIPDDDNERLSKVEKARQLREQVNDLFSRKFGEAIGMGFPVKVPYRKITINPGCVVVDGMPPGVSFKAPSYLEISSMRRILDSAEFIKFTVIRSNSRACCGIRFLRGLKVARSSGYIKQRSGPDHELTLDSGKVHLRRSLEVPGSTGGHPVMGDTFIRHIALLGFEKRFVPSQHYDNCKDGPHPNPLGFLQWVVGSWVHTAKPLWRLNGVPRLWLSPRYMFLVKWQDLSEKVVYRRFTEIYEFHKTLKEMFPIEAGAINPENRIIPHLPAPKWFDGQRAAENHQGTLTEYCGTLMSLPTKISRCPHLLDFFKVRPDDLKLPTDNQTKKPETYLMPKDGKSTATDITGPIILQTYRAIANYEKTSGSEMALSTGDVVEVVEKSESGWWFCQMKAKRGWIPASFLEPLDSPDETEDPEPNYAGEPYVAIKAYTAVEGDEVSLLEGEAVEVIHKLLDGWWVIRKDDVTGYFPSMYLQKSGQDVSQAQRQIKRGAPPRRSSIRNVHSIHQRSRKRLSQDAYRRNSVRFLQQRRRQARPGPQSPGSPLEEERQTQRSKPQPAVPPRPSADLILNRCSESTKRKLASAV

SEQ ID NO: 51071 - protein, 1040 aa, Homo sapiens
  misc_feature (1)...(1040): Xaa = X or * as defined in Table 2
XDRIKALSEALPAGRPCGGDRSATDTHGPLAPSRLPSARQLPSAEAAPRRPQPARGPHSPPLGTPGPGAAWRRPHSGIMAQVAMSTLPVEDEESSESRMVVTFLMSALESMCKELAKSKAEVACIAVYETDVFVVGTERGRAFVNTRKDFQKDFVKYCVEEEEKAAEMHKMKSTTQANRMSVDAVEIETLRKTVEDYFCFCYGKALGKSTVVPVPYEKMLRDQSAVVVQGLPEGVAFKHPENYDLATLKWILENKAGISFIIKRPFLEPKKHVGGRVMVTDADRSILSPGGSCGPIKVKTEPTEDSGISLEMAAVTEATILQRAMKAQKWKYQQKILLNMSLSETSEDPEVEVTIEDDDYSPPSKRPKANELPQPPVPEPANAGKRKVREFNFEKWNARITDLRKQVEELFERKYAQAIKAKGPVTIPYPLFQSHVEDLYVEGLPEGIPFRRPSTYGIPRLERILLAKERIRFVIKKHELLNSTREDLQLDKPASGVKEEWYARITKLRKMVDQLFCKKFAEALGSTEAKAVPYQKFEAHPNDLYVEGLPENIPFRSPSWYGIPRLEKIIQVGNRIKFVIKRPELLTHSTTEVTQPRTNTPVKEDWNVRITKLRKQVEEIFNLKFAQALGLTEAVKVPYPVFESNPEFLYVEGLPEGIPFRSPTWFGIPRLERIVRGSNKIKFVVKKPELVISYLPPGMASKINTKALQSPKRPRSPGSNSKVPEIEVTVEGPNNNNPQTSAVRTPTQTNGSNVPFKPRGREFSFEAWNAKITDLKQKVENLFNEKCGEALGLKQAVKVPFALFESFPEDFYVEGLPEGVPFRRPSTFGIPRLEKILRNKAKIKFIIKKPEMFETAIKESTSSKSPPRKINSSPNVNTTASGVEDLNIIQVTIPDDDNERLSKVEKARQLREQVNDLFSRKFGEAIGMGFPVKVPYRKITINPGCVVVDGMPPGVSFKAPSYLEISSMRRILDSAEFIKFTVIRPFPGLVINNQLVDQSESEGPVIQESAEPSQLEVPATEEIKETDGSSQIKQEPDPTW

SEQ ID NO: 51072 - protein, 530 aa, Homo sapiens [sequence omitted]

SEQ ID NO: 51073 - protein, 1076 aa, Homo sapiens
  misc_feature (1)...(1076): Xaa = X or * as defined in Table 2
XDRIKALSEALPAGRPCGGDRSATDTHGPLAPSRLPSARQLPSAEAAPRRPQPARGPHSPPLGTPGPGAAWRRPHSGIMAQVAMSTLPVEDEESSESRMVVTFLMSALESMCKELAKSKAEVACIAVYETDVFVVGTERGRAFVNTRKDFQKDFVKYCVEEEEKAAEMHKMKSTTQANRMSVDAVEIETLRKTVEDYFCFCYGKALGKSTVVPVPYEKMLRDQSAVVVQGLPEGVAFKHPENYDLATLKWILENKAGISFIIKRPFLEPKKHVGGRVMVTDADRSILSPGGSCGPIKVKTEPTEDSGISLEMAAVTVKEESEDPDYYQYNIQAGPSETDDVDEKQPLSKPLQGSHHSSEGNEGTEMEVPAEDSTQHVPSETSEDPEVEVTIEDDDYSPPSKRPKANELPQPPVPEPANAGKRKVREFNFEKWNARITDLRKQVEELFERKYAQAIKAKGPVTIPYPLFQSHVEDLYVEGLPEGIPFRRPSTYGIPRLERILLAKERIRFVIKKHELLNSTREDLQLDKPASGVKEEWYARITKLRKMVDQLFCKKFAEALGSTEAKAVPYQKFEAHPNDLYVEGLPENIPFRSPSWYGIPRLEKIIQVGNRIKFVIKRPELLTHSTTEVTQPRTNTPVKEDWNVRITKLRKQVEEIFNLKFAQALGLTEAVKVPYPVFESNPEFLYVEGLPEGIPFRSPTWFGIPRLERIVRGSNKIKFVVKKPELVISYLPPGMASKINTKALQSPKRPRSPGSNSKVPEIEVTVEGPNNNNPQTSAVRTPTQTNGSNVPFKPRGREFSFEAWNAKITDLKQKVENLFNEKCGEALGLKQAVKVPFALFESFPEDFYVEGLPEGVPFRRPSTFGIPRLEKILRNKAKIKFIIKKPEMFETAIKESTSSKSPPRKINSSPNVNTTASGVEDLNIIQVTIPDDDNERLSKVEKARQLREQVNDLFSRKFGEAIGMGFPVKVPYRKITINPGCVVVDGMPPGVSFKAPSYLEISSMRRILDSAEFIKFTVIRPFPGLVINNQLVDQSESEGPVIQESAEPSQLEVPATEEIKETDGSSQIKQEPDPTW

SEQ ID NO: 51074 - protein, 976 aa, Homo sapiens
  DOMAIN (773)..(793): NEUTROPHIL CYTOSOL FACTOR 1 SIGNATURE domain identified by eMATRIX, accession number PR00498E, p-value=7.750e-28, raw score of 13.75
  DOMAIN (745)..(869): SH3 domain identified by PFam, accession name SH3, E-value= 9.2e-36, PFam score of 132.2
MAQVAMSTLPVEDEESSESRMVVTFLMSALESMCKELAKSKAEVACIAVYETDVFVVGTERRRAFVNTRKDFQKDFVKYCVEEEEKAAEMHKNEIYNPGKSDELQGLPEGVAFKHPENYDLATLKWILENKAGISFIIKSCGPIKVKTEPTEDSGISLEMAAVTVKEESEDPDYYQYNIQGPSETDDVDEKQPLSKPLQGSHHSSEGNEGTEMEVPAEDDDYSPPSKRPKANELPQPPVPEPANAGKRKVREFNFEKWNARITDLRKQVEELFERKYAQAIKAKGPVTIPYPLFQSHVEDLYVEGLPEGIPFRRPSTYGIPRLERILLAKERIRFVIKKHELLEFNTNWKMQGPGQQQVKEDWNVRITKLRKQVEEIFNLKFAQALGLTEAVKVPYPVFESNPEFLYVEGLPEGIPFRSPTWFGIPRLERIVRGSNKIKFVVKKPELVISYLPPWDGMDLFSSGIWVEAIGMGFPVKVPYRKITINPGCVVVDGMPPGVSFKAPSYLEISSMRRILDSAEFIKFTVIRSNSRACCGIRFLRGLKVARSSGYIKQRSGPDHELTLDSGKVHLRRSLEVPGSTGGHPVMGDTFIRHIALLGFEKRFVPSQHYVYMFLVKWQDLSEKVVYRRFTEIYEFHKTLKEMFPIEAGAINPENRIIPHLPAPKWFDGQRAAENRQGTLTEYCSTLMSLPTKISRCPHLLDFFKVRPDDLKLPTDNQTKKPETYLMPKDGKSTATDITGPIILQTYRAIANYEKTSGSEMALSTGDVVEVVEKSESGWWFCQMKAKRGWIPASFLEPLDSPDETEDPEPNYAGEPYVAIKAYTAVEGDEVSLLEGEAVEVIHKLLDGWWVIRKDDVTGYFPSMYLQKSGQDVSQAQRQIKRGAPPRRSSIRNAHSIHQRSRKRLSQDAYRRNSVRFLQQRRRQARPGPQSPGSPLEEERQTQRSKPQPAVPPRPSADLILNRCSESTKRKLASAV

SEQ ID NO: 51075 - protein, 449 aa, Homo sapiens
  misc_feature (1)...(449): Xaa = X or * as defined in Table 2
XGSCGPIKVKTEPTEDSGISLEMAAVTVKEESEDPDYYQYNIQGSHHSSEGNEGTEMEVPAEDDDYSPPSKRPKANELPQPPVPEPANAGKRKVREFNFEKWNARITDLRKQVEELFERKYAQAIKAKGPVTIPYPLFQSHVEDLYVEGLPEGIPFRRPSTYGIPRLERILLAKERIRFVIKKHELLNSTREDLQLDKPASGVKEECTTEVTQPRTNTPVKEDWNVRITKLRKQVEEIFNLKFAQALGLTEAVKVPYPVFESNPEFLYVEGLPEGIPFRSPTWFGIPRLERIVRGTVRTPTQTNGSNVPFKPRGREFSFEAWNAKITDLKQKVENLFNEKCGEALGLKQAVKVPFALFESFPEDFYVEGLPEGVPFRRPSTFGIPRLEKILRNKAKIKFIIKKPEMFETAIKESTSSKSPPRKINSSPNVNTTASGVEDLNIIQVTIPR

SEQ ID NO: 51076 - protein, 79 aa, Homo sapiens
MKPTHNAVPRSFYEPALPWKPSLAARAYPQPCLLDPSRMLRVPPVWKEVSASSLSCPAGCRVLDSRGSSVMRHEIVDPG

SEQ ID NO: 51077 - protein, 137 aa, Homo sapiens
MADSKEGVLPLTAASTAPISFGFTRTSARRRLADSALNEGCEAPGGPQGTRHPFDPEWPSQAATSPAPLKEEEEEESKKSLEERENAGVDPTLAPGRDSGTFAEPGQSTEPGFGATAQEKIKVVELHYDAICPVHGP

SEQ ID NO: 51078 - protein, 349 aa, Homo sapiens
  DOMAIN (200)..(214): NAD:arginine ADP-ribosyltransferases proteins domain identified by eMATRIX, accession number BL01291B, p-value=8.688e- 09, raw score of 9.15
  misc_feature (1)...(349): Xaa = X or * as defined in Table 2
MEALAMNHQLKDSMHTSKIKKKRRKKKPSVPQSHLTLSTEYNINPLLIIPSAALNSYSKYEIHSEGITTKSTKIMYQEERGKKLSEKYCNSVFLFLLYFIRNGWTTVAGAECAMCSRMEEMTSNKTELGPDLGLGVHFKGFDIYSNLVPVSEASIIIAVSSAHRAASLEAVSYAIDTLKAKVPMMVKDIMQQPTPTPYLQWGQAEARWQARVTLNCEGHDKYTLHSRVHVSHEQSLDILTTSQHNTGTKSAMKHQDTVEVLPLSRTCPSPLTTMVPSTTPKAVFVFIQQKRKNRSDSDSTGTGFPSQTGKTPDNVAATGKPSRTVRHLKSLSKKYIAKGNRRTLQGVRX

SEQ ID NO: 51079 - protein, 99 aa, Homo sapiens
MVPLCQVRVAGVRAGLALVSRTSPLAPNLAGVLGSGAPPPPPPGPSCLRALLRLPQQKSGPLRELLSAHGSKDGLVVKAPTHFYDHLFPRLFVLMKLKF

SEQ ID NO: 51080 - protein, 819 aa, Homo sapiens
  DOMAIN (346)..(384): Dehydrogenase E1 component domain identified by eMATRIX, accession number PF00676B, p-value=8.071e-18, raw score of 24.71
  DOMAIN (258)..(584): Dehydrogenase E1 component domain identified by PFam, accession name E1_dehydrog, E-value=2.4e-118, PFam score of 406.6
MSQLRLLPSRLGVQAARLLAAHDVPVFGWRSRSSGPPATFPSSKGGGGSSYMEEMYFAWLENPQSVHKSWDSFFREASEEAFSGSAQPRPPSVVHESRSAVSSRTKTSKLVEDHLAVQSLIRAYQIRGHHVAQLDPLGILDADLDSFVPSDLITTIDKLGWTQREGTGETGRSAFYDLQEADLDKEFQLPTTTFIGGSENTLSLREIIRRLENTYCQHIGLEFMFINDVEQCQWIRQKFETPGVMQFSSEEKRTLLARLVRSMSRFEDFLARKWSSEKRFGLEGCEVMIPALKTIIDKSSEMGIENVILGMPHRGRLNVLANVIRKDLEQIFCQFDPKLEAADEGSGDVKYHLGMYHERINRVTNRNITLSLVANPSHLEAVDPVVQGKTKAEQFYRGDAQGKKVMSILVHGDAAFAGQGVVYETFHLSDLPSYTTNGTVHVVVNNQIGFTTDPRMARSSPYPTDVARVVNAPIFHVNADDPEAVIYVCSVAAEWRNTFNKDVVVDLVCYRRRGHNEMDEPMFTQPLMYKQIHRQVPVLKKYADKLIAEGTVTLQEFEEEIAKYDRICEEAYGRSKDKKILHIKHWLDSPWPGFFNVDGEPKSMTCPATGIPEDMLTHIGSVASSVPLEDFKIHTGLSRILRGRADMTKNRTVDWALAEYMAFGSLLKEGIHVRLSGQDVERGTFRWHHQMATSLTPQGKCAELTAGPKLSTKVKLVAICGPQDHVCVGGVWWNVFAIKCEVNSDRLFVSGTEQYSEYTGYAETYRWSRSHEDGSERDDWQRRCTEIVAIDALHFRRYLDQFVPEKMRRELNKASNLIS

SEQ ID NO: 51081 - protein, 871 aa, Homo sapiens
  DOMAIN (313)..(351): Dehydrogenase E1 component domain identified by eMATRIX, accession number PF00676B, p-value=8.071e-18, raw score of 24.71
  DOMAIN (225)..(551): Dehydrogenase E1 component domain identified by PFam, accession name E1_dehydrog, E-value=2e-120, PFam score of 413.5
MSQLRLLPSRLGVQAARLLAAHDVPVFGWRSRSSGPPATFPSSKGGGGSSYMEEMYFAWLENPQSVHKSWDSFFREASEEAFSGSAQPRPPSVVHESRSAVSSRTKTSKLVEDHLAVQSLIRAYQIRGHHVAQLDPLGILDADLDSFVPSDLITTIDKLAFYDLHEADLDKEFQIIRRLENTYCQHIGLEFMFINDVEQCQWIRQKFETPGVMQFSSEEKRTLLARLVRSMRFEDFLARKWSSEKRFGLEGCEVMIPALKTIIDKSSEMGIENVILGMPHRGRLNVLANVIRKDLEQIFCQFDPKLEAADEGSGDVKYHLGMYHERINRVTNRNITLSLVANPSHLEAVDPVVQGKTKAEQFYRGDAQGKKVMSILVHGDAAFAGQGVVYETFHLSDLPSYTTNGTVHVVVNNQIGFTTDPRMARSSPYPTDVARVVNAPIFHVNADDPEAVIYVCSVAAEWRNTFNKDVVVDLVCYRRRGHNEMDEPMFTQPLMYKQIHRQVPVLKKYADKLIAEGTVTLQEFEEEIAKYDRICEEAYGRSKDKKILHIKHWLDSPWPGFFNVDGEPKSMTCPATGIPEDMLTHIGNGGKPRTPCATAPSRSTESWGFELGYAMASPNALVLWEAQFGDFHNTDQCIIDQFISTGQAKWVRHNGIVLLLPHGMEGMGPEHSSARPERFLQMSNDDSDAYPAFTKDFEVSQLYDCNWIVVNCSTPANYFHVLRRQILLPFRKPLIIFTPKSLLRHPEAKSSFDQMVSGTSFQRVIPEDGAAARAPEQVQRLHLLARERQEAEQVTQVRSWPGCQEEHKNMGYYDYISPRFMTILRRARPIWYVGRDPAAAPATGNRNTHLVSLKKFLDTAFNLQAFEGKTF

SEQ ID NO: 51082 - protein, 353 aa, Homo sapiens
  DOMAIN (56)..(74): TYPE II ANTIFREEZE PROTEIN SIGNATURE domain identified by eMATRIX, accession number PR00356C, p-value=7.366e-11, raw score of 13.33
  DOMAIN (156)..(252): Lectin C-type domain identified by PFam, accession name lectin_c, E-value=4.5e-33, PFam score of 123.3
MRDLDVGFDYPLQALHSDESDVPTHCPSQWWPYAGHCYKIHRDEKKIQRDALTTCRKEGGDLTSIHTIEELDFIISQLGYGRSRGAIQEPGTRVKTLEVYLVFYRIAAELALESQDAEEPYSVASTTTGPWGELPHYCQCSLKAQGLLNQLLVNAAYPRTHPSGSSLVSIESAAESSFLSYRVEPLKSKTNFWIGLFRNVEGTWLWINNSPVSFVNWNTGDPSGERNDCVALHASSGFWSNIHCSSYKGYICKRPKIIDAKPTHELLTTKADTRKMDPSKPSSNVAGVVIIVILLILTGAGLAAYFFYKKRRVHLPQEGAFENTLYFNSQSSPGTSDMKDLVGNIEQNEHSVI

SEQ ID NO: 51083 - protein, 290 aa, Homo sapiens
  DOMAIN (155)..(169): C-type lectin domain proteins domain identified by eMATRIX, accession number BL00615B, p-value=3.400e-12, raw score of 12.25
  DOMAIN (72)..(168): Lectin C-type domain identified by PFam, accession name lectin_c, E-value=1.9e-26, PFam score of 101.3
MCQRNREDQKATWEFWARVTSFQIVPTSSSDPGPGSIAVEVYPPVTEDGWVIYKDYQYYFSKEKETMDNARAFCKRNFGDLVSIQSESEKKCGWKYVNRNDAQSAYFIGLLISLDKKFAWMDGSKVDYVSWATGEPNFANEDENCVTMYSNSGFWNDINCGYPNAFICQRHNSSINATTVMPTMPSVPSGCKEGWNFYSNKCFKIFGFMEEERKNWQEARKACIGFGGNLVSIQNEKEQESGQLLIHTVTFYELEKVLVVGSHDPDRGAQNGALGQGATCTSVFSGLDKT

SEQ ID NO: 51084 - protein, 346 aa, Homo sapiens
  DOMAIN (87)..(107): EOSINOPHIL MAJOR BASIC PROTEIN SIGNATURE domain identified by eMATRIX, accession number PR00770F, p-value=3.129e-09, raw score of 13.79
  DOMAIN (27)..(335): Lectin C-type domain identified by PFam, accession name lectin_c, E-value=3.7e-26, PFam score of 100.3
MATTETGDYEMGEEWRHLPNGIHLPVLTPLSVLGHENSPAAAYEQFLGYSVSTYPGKFTIEDNNGIRTEPNDELWIGLNDIKIQMYFEWSDGTPVTFTKWLRGEPSHENNRQEDCVVMKGKDGYWADRGCEWPLGYICKMKSRSQGPEIVEVEKGCRKMGPSSCRKTSSGLPLILRDDPSLTNPPATIQTDGFVKYGKSSYSLMRQKFQWHEAETYCKLHNSLIASILDPYSNAFAWLQMETSNERVWIALNSNLKSLLLNPHNCLADARSQITQHGFLSMVTVTILSPHIQETGAKLLWNVFEWADCVVIIGGASNEAGKWMDDTCDSKRGYICQTRSGSQNMVK

SEQ ID NO: 51085 - protein, 1184 aa, Homo sapiens
  DOMAIN (837)..(857): EOSINOPHIL MAJOR BASIC PROTEIN SIGNATURE domain identified by eMATRIX, accession number PR00770F, p-value=8.989e-10, raw score of 13.79
  DOMAIN (210)..(1044): Lectin C-type domain identified by PFam, accession name lectin_c, E-value=3.3e-218, PFam score of 738.3
MRLPLLLVFASVIPGAVLLLDTRQFLIYNEDHKRCVDAVSPSAVQTAACNQDAESQKFRWVSESQIMSVAFKLCLGVPSKTDWVAITLYACDSKSEFQKWECKNDTLLGIKGEDLFFNYGNRQEKNIMLYKGSGLWSSLKTSGTQIARVLGGRMDGSGAEPLLTMTQTSYLDIVHEQFEGSESLWNKDPLTSVIYQINSKSALTWHQARKSCQQQNAELLSITEIHEQTYLTGLTSSLTSGLWIGLNSLSFNSGWQWSDRSPFRYLNWLPGSPSAEPGKSCVSLNPGKNAKWENLECVQKLGYICKKGNTTLNSFVIPSESDVPTHCPSQWWPYAGHCYKIHRDEKKIQRDALTTCRKEGGDLTSIHTIEELDFIISQLGYEPNDELWIGLNDIKIQMYFEWSDGTPVTFTKWLRGEPSHENNRQEDCVVMKGKDGYWADRGCEWPLGYICKMKSRSQGPEIVEVEKGCRKGWKKHHFYCYMIGHTLSTFAEANQTCNNENAYLTTIEDRYEQAFLTSFVGLRPEKYFWTGLSDIQTKGTFQWTIEEEVRFTHWNSDMPGRKPGCVAMRTGIAGGLWDVLKCDEKAKFVCKHWAEGVTHPPKPTTTPEPKCPEDWGASSRTSLCFKLYAKGKHEKKTWFESRDFCRALGGDLASINNKEEQQTIWRLITASGSYHKLFWLGLTYGSPSEGFTWSDGSPVSYENWAYGEPNNYQNVEYCGELKGDPTMSWNDINCEHLNNWICQIQKGQTPKPEPTPAPQDNPPVTEDGWVIYKDYQYYFSKEKETMDNARAFCKRNFGDLVSIQSESEKKFLWKYVNRNDAQSAYFIGLLISLDKKFAWMDGSKVDYVSWATGEPNFANEDENCVTMYSNSGFWNDINCGYPNAFICQRHNSSINATTVMPTMPSVPSGCKEGWNFYSNKCFKIFGFMEEERKNWQEARKACIGFGGNLVSIQNEKEQAFLTYHMKDSTFSAWTGLNDVNSEHTFLWTDGRGVHYTNWGKGYPGGRRSSLSYEDADCVVIIGGASNEAGKWMDDTCDSKRGYICQTRSDPSLTNPPATIQTDGFVKYGKSSYSLMRQKFQWHEAETYCKLHNSLIASILDPYSNAFAWLQMETSNERVWIALNSNLTDNQYTWTDKWRVRKDVCTYLKRAPLKTLCILTVSQSPGTSDMKDLVGNIEQNEHSVI

SEQ ID NO: 51086 - protein, 48 aa, Homo sapiens
  DOMAIN (19)..(37): Death effector domain proteins domain identified by eMATRIX, accession number PF01335B, p-value=2.565e-15, raw score of 17.82
  misc_feature (1)...(48): Xaa = X or * as defined in Table 2
XTRVLKISEEDELDTKLTRIPSAKKYKDIIRQPSEEEIIKLAPPPKKA

SEQ ID NO: 51087 - protein, 47 aa, Homo sapiens
  misc_feature (1)...(47): Xaa = X or * as defined in Table 2
MWEKSFKXXGRAGCWKKEXARLVRQYSSLLAQPSVPCPSGHCCRHLP

SEQ ID NO: 51088 - protein, 74 aa, Homo sapiens
MYIKTALPCLPFFVVSSINLLSRPERGWEGNATVKGVAESNCYIVQTKKKAFSKNIKFTCSLRDYLDKVQVRSF

SEQ ID NO: 51089 - protein, 43 aa, Homo sapiens
MQSSSFSVRQNNLKRLTCPPTPYIAVRLPLSCALLSAVCTALF

SEQ ID NO: 51090 - protein, 72 aa, Homo sapiens
  misc_feature (1)...(72): Xaa = X or * as defined in Table 2
MYPQLARSGWGGASWGRQEAGVTHCTVVTWLGGVHKPRGPGYLVKKGFLSKSGRVGGRVGXFEDSLRFAGYQ

SEQ ID NO: 51091 - protein, 40 aa, Homo sapiens
MVGGPCPLSWRMGEGSGMMKFHPSSCSSPVLRPSSVGEPI

SEQ ID NO: 51092 - protein, 36 aa, Homo sapiens
  misc_feature (1)...(36): Xaa = X or * as defined in Table 2
MAEYGTLLQDLTNNITLEDLEQLKSACKEDIPSEKX

SEQ ID NO: 51093 - protein, 146 aa, Homo sapiens
MVPSTVSPEYRWVGASNAGCSMGFDLRDPGKDPWLNTYARPMRDKKGPAGTQETVQHRSTNMELWLFFAPFQVGVEWSLCLPSPLLFPGSTYLSHTLPLIVSSSIVGKMQPLFCFPHFKRYGGSGGKGSRRNVLISICIEIAPTSS

SEQ ID NO: 51094 - protein, 257 aa, Homo sapiens
  DOMAIN (176)..(194): TROPOMYOSIN SIGNATURE domain identified by eMATRIX, accession number PR00194A, p-value=1.474e-20, raw score of 7.86
  DOMAIN (30)..(257): Tropomyosins domain identified by PFam, accession name Tropomyosin, E-value=9.1e-45, PFam score of 142.0
MRDLARDSERNKFIALILTKVEEELTHLQKKLKGTEDELDKYSEDLKDAQEKLELTEKKASDLWPAVPTSGPPPAVLTSAVRPGDLIAPTAAGPGGGERRGRPPRRQRLGGPGRGCAALAGAEPSRASAAARAPLRLRAMAGLNSLEAADEAEDRAQGLQRELDGERERREKAEGDVAALNRRIQLVEEELDRAQERLATALQKTGGGRKSLQMRRERLQNWKRQLMTSEDELYAQKLKYKAISEELDHALNDMTSL

SEQ ID NO: 51095 - protein, 93 aa, Homo sapiens
MNSSSRVSGVASNGPDPHFHPLLPLPHSDAGQPLFGASPRRGLRTRILHCCCSAIPSSGHSILRSCAGAPPVTSLGLVKAKRALEIPGSPETG

SEQ ID NO: 51096 - protein, 71 aa, Homo sapiens
MGSRNSSSAGSGSGDPSEGLPRRGAGLRRSEEEEEEDEDVDLAQALLDSEEENDRAWDGRLGDRYNPPVDA

SEQ ID NO: 51097 - protein, 32 aa, Homo sapiens
MGSRNSSSAGSGSGDPSEGLPRRRGWALPSEV

SEQ ID NO: 51098 - protein, 47 aa, Homo sapiens
MGAGVGLPLRWFTPSQLWVPISGQSLAGLPFIWGVASASKRSVLGCF

SEQ ID NO: 51099 - protein, 115 aa, Homo sapiens
  misc_feature (1)...(115): Xaa = X or * as defined in Table 2
XWSDYIHICNIYGEGDTHTALDLRPDERRFAVFSIAVSSDGREVLGGANDGCLYVFDREQNRRTLQIESHEDDVNAVAFADISSQILFSGGDDAICKVTGQQFIYSGCSTGKVVX

SEQ ID NO: 51100 - protein, 471 aa, Homo sapiens
  misc_feature (1)...(471): Xaa = X or * as defined in Table 2
MGIAGTAAVQDPXSGDPSEGLPRRGAGLRRSEEEEEEDEDVDLAQVLAYLLAQRPTKNGPIFMSGLHRTYHLRFYDCRYGRFRKFKSIKARDVGWSVLDVAFTPDGNHFLYSSWPDERRFAVFSIAVSSDGREVLGGANDGCLTGGTLQIESHEDDVNAEAFADISSQILFSGGEEAICKAWDRRTMRKVCHKSGLYNQADKVLVAHGGMKADCREGMEASRQAATQQNWDYRWQQVPKKAWRKLKLPGDSSLMTYRGHGVLHTLIRCRFSPIHSTGQQFIYSGCSTGKVVVYDLLKWPHCEEADQPQGLWGFVLLVVFLATRRVAVTARHLSRLVVGAAVWRGAGRAFLLIEDLTGSCFEPLPQGLLLHELPDTPHRKQLCSPSTCAMGFLPAPPLRLVFLLNVLLLGLWNFLLLCTVIYFHQYTHKVVGAAVGTFAWYLTYGSWYHQPWSPGSPGHGLFPRPHSSRKHN

SEQ ID NO: 51101 - protein, 52 aa, Homo sapiens
  misc_feature (1)...(52): Xaa = X or * as defined in Table 2
MEMEKEFEQIDKSGSWAAIYQDIRHEASDFPCRVAKLPKNKNRNRYRDVSPX

SEQ ID NO: 51102 - protein, 265 aa, Homo sapiens
  DOMAIN (82)..(103): PROTEIN TYROSINE PHOSPHATASE SIGNATURE domain identified by eMATRIX, accession number PR00700B, p-value=8.017e-10, raw score of 16.80
  DOMAIN (41)..(207): Protein-tyrosine phosphatase domain identified by PFam, accession name Y_phosphatase, E-value=4.9e-06, PFam score of -64.2
MEMEKEFEQIDKSGSWAAHLPGLSNMKPVTSPCRVAKLPKNKNRNRYRDVSPFDHSRIKLRQEDNDYINASLIKMEEAQRSYILTQGPFANTCGHFWEIGVGAEKQGCRHAQQSDGERISGRSFPTRTWSPHAEHIPPPPRPPKRILEPHNGKCREFFPNHQWVKEETQEDKDCPIKEEKGSPLNAAPYGIESMSQDTVFLSRVVGGSLRGAQAASPAKGEPSLPEKDEDHALSYWKPFLVNMCGATGLTGGAYLCYRFLVNSNT

SEQ ID NO: 51103 - protein, 80 aa, Homo sapiens
  DOMAIN (2)..(67): Intermediate filament proteins domain identified by PFam, accession name filament, E-value=1e-21, PFam score of 85.5
  misc_feature (1)...(80): Xaa = X or * as defined in Table 2
XKVRFLEQQNKMLETKWSLLQQQKTARSNMDNMFESYINNLRRQLETLAQEKLKLEAELGNMQGLVEAAMQGSTGNRRPT

SEQ ID NO: 51104 - protein, 75 aa, Homo sapiens
  DOMAIN (7)..(75): Intermediate filament proteins domain identified by PFam, accession name filament, E-value=7.2e-27, PFam score of 102.7
  misc_feature (1)...(75): Xaa = X or * as defined in Table 2
XRRSRSKTLNNKFASFIDKVRFLEQQNKMLETKWSLLQQQKTARSNMDNMFESYINNLRRQLETLGQEKLKLEAD

SEQ ID NO: 51105 - protein, 75 aa, Homo sapiens
  DOMAIN (1)..(50): Intermediate filament proteins domain identified by PFam, accession name filament, E-value=9e-18, PFam score of 70.6
MNKVELESRLEGLTDEINFLRQLYEEEIRELQSQISDTSVVLSMDNSRSSRAVVVKKIETRDGKLVSESSDVLPK

SEQ ID NO: 51106 - protein, 125 aa, Homo sapiens
  DOMAIN (94)..(125): Intermediate filaments proteins domain identified by eMATRIX, accession number BL00226C, p-value=9.400e-19, raw score of 13.23
  DOMAIN (65)..(125): Intermediate filament proteins domain identified by PFam, accession name filament, E-value=1.8e-21, PFam score of 84.5
MPPLLPSTMSIRVTQKSYKVSNFLPPGLQHALLHESARFPHQLLELLPSGQQQLFAVAWAGGYGRLYEEEIRELQSQISDTSVVLSMDNSRSLDMDSIIAEVKAQYEDIANRIRAEAESMYSDQV

SEQ ID NO: 51107 - protein, 85 aa, Homo sapiens
MNEQFYNAIKRGYRMAQPAHASDEISTLNEVNTSSTISCDSPLEPQDEPEPEPQLELQVEPEPELEQLPDSGCPAPRAEAEDSFL

SEQ ID NO: 51108 - protein, 2129 aa, Homo sapiens; identical to SEQ ID NO: 45837
  DOMAIN (1925)..(1956): Protein kinases ATP-binding region proteins domain identified by eMATRIX, accession number BL00107A, p-value=3.842e-18, raw score of 18.39
  DOMAIN (553)..(2069): Eukaryotic protein kinase domain identified by PFam, accession name pkinase, E-value=1.4e-126, PFam score of 433.9

SEQ ID NO: 51109 - protein, 337 aa, Homo sapiens
  DOMAIN (44)..(97): Receptor tyrosine kinase class III proteins domain identified by eMATRIX, accession number BL00240G, p-value=9.308e-24, raw score of 28.45
  DOMAIN (126)..(273): Immunoglobulin domain identified by PFam, accession name ig, E-value=9.9e-07, PFam score of 26.7
MYMSKDESVDYVPMLDMKGDVRYADIESSNYMAPYDKYVPSGGTPYPELPMNEQFYNAIKRGYRMAQPAHASDEMHTFTLSLPRLKPSEAGRYSFLARNPGGWRALTFELTLRYPPEVSVIWTFINGSGTLLCAASGYPQPNVTWLQCSGHTDSNSSCPAGNSPSRFPVILSRAFHTGIGVNQTTLIVINRNAGRIVSTARQQCGQGIPVIEPSVPELVVKPGATVTLRCVGNGSVEWDGPPSPHWTLYSDGSSSILSTNNATFQNTGTYRCTEPGDPLGGSAAIHLYVKGEESEPPPKRPDPAGPTTMGPKINNRNNSALHLLSAGYEQGPERGIV

SEQ ID NO: 51110 - protein, 236 aa, Homo sapiens
  DOMAIN (11)..(27): Protein kinases ATP-binding region proteins domain identified by eMATRIX, accession number BL00107B, p-value=2.929e-10, raw score of 13.31
  DOMAIN (2)..(89): Eukaryotic protein kinase domain identified by PFam, accession name pkinase, E-value=4.3e-27, PFam score of 101.6
  misc_feature (1)...(236): Xaa = X or * as defined in Table 2
XVLRKDPYGKPVDLWACGVILYILLVGYPPFWDEDQHRLYQQIKAGAYDFPSPEWDTVTPEAKDLINKMLTINPSKRITAAEALKHPWISHRSTVASCMHRQETVDCLKKFNARRKLKGAILTTMLATRNFSGGKSGGNKKSDGVKESSESTNTTIEDEDTKVRKQEIIKVTEQLIEAISNGDFESYTKMCDPGMTAFEPEALGNLVEGLDFHRFYFENLWSRNSKNVHTTCMRPL

SEQ ID NO: 51111 - protein, 311 aa, Homo sapiens
  DOMAIN (177)..(216): 'Homeobox' antennapedia-type protein domain identified by eMATRIX, accession number BL00032B, p-value=1.955e-23, raw score of 10.83
  DOMAIN (175)..(216): Homeobox domain identified by PFam, accession name homeobox, E-value=2.9e-11, PFam score of 50.5
  misc_feature (1)...(311): Xaa = X or * as defined in Table 2
MGRLGHAVTPFDGIVELLVHGQLWGVEGSLVLFPGVILYILLVGYPPFWDEDQHRLYQQIKAGAYDGFLGADWGPPKHSTVNGEWGEAGKSGRGELGEVQGLQLSLEHSGETPQREYYSEADASHCIQQILEAVLHCHQMGVVHRDLKPTCFVPGWVSCSYTVMTGYGKTRTKDKYRVVYTDHQRLELEKEFHYSRYITIRRKSELAANLGLTERQEQCEDSGLQAARQSTELSRRKTERCPRELPPTLLGNSSEEESQLETNVTYWEEEQEFEVVSTLRLQHVDRPLSVRCTLRNAVGQDTQEVIVVPHX

SEQ ID NO: 51112 - protein, 1089 aa, Homo sapiens
  DOMAIN (592)..(641): Receptor tyrosine kinase class III proteins domain identified by eMATRIX, accession number BL00240C, p-value=1.000e-40, raw score of 22.58
  DOMAIN (600)..(955): Eukaryotic protein kinase domain identified by PFam, accession name pkinase, E-value=3e-74, PFam score of 260.1
MRLPGAMPALALKGELLLLSLLLLLEPQISQGLVVTPPGPELVLNVSSTFVLTCSGSAPVVWERMSQEPPQEMAKAQDGTFSSVLTLTNLTGLDTGEYFCTHNDSRGLETDERKRLYIFVPDPTVGFLPNDAEELFIFLTEITEITIPCRVTDPQLVVTLHEKKGDVALPVPYDHQRGFSGIFEDRSYICKTTIGDREVDSDAYYVYRLQVSSINVSVNAVQTVVRQGENITLMCIVIGNEVVNFEWTYPRKESGRLVEPVTDFLLDMPYHIRSILHIPSAELEDSGTYTCNVTESVNDHQDEKAINITVVESGYVRLLGEVGTLQFAELHRSRTLQVVFEAYPPPTVLWFKDNRTLGDSSAGEIALSTRNVSETRYVSELTLVRVKVAEAGHYTMRAFHEDAEVQLSFQLQINVPVRVLELSESHPDSGEQTVRCRGRGMPQPNIIWSACRDLKRCPRELPPTLLGNSSEEESQLETNVTYWEEEQEFEVVSTLRLQHVDRPLSVRCTLRNAVGQDTQEVIVVPHSLPFKVVVISAILALVVLTIISLIILIMLWQKKPRYEIRWKVIESVSSDGHEYIYVDPMQLPYDSTWELPRDQLVLGRTLGSGAFGQVVEATAHGLSHSQATMKVAVKMLKSTARSSEKQALMSELKIMSHLGPHLNVVNLLGACTKGGPIYIITEYCRYGDLVDYLHRNKHTFLQHHSDKRRPPSAELYSNALPVGLPLPSHVSLTGESDGGYMDMSKDESVDYVPMLDMKGDVKYADIESSNYMAPYDNYVPSAPERTCRATLINESPVLSYMDLVGFSYQVANGMEFLASKNCVHRDLAARNVLICEGKLVKICDFGLARDIMRDSNYISKGSTFLPLKWMAPESIFNSLYTTLSDVWSFGILLWEIFTLGGTPYPELPMNEQFYNAIKRGYRMAQPAHASDEIYEIMQKCWEEKFEIRPPFSQLVLLLERLLGEGYKKKYQQARLPGFHGLRSPLDTSSVLYTAVQPNEGDNDYIIPLPDPKPEVADEGPLEGSPSLASSTLNEVNTSSTISCDSPLEPQDEPEPEPQLELQVEPEPELEQLPDSGCPAPRAEAEDSFL

SEQ ID NO: 51113 - protein, 338 aa, Homo sapiens
MGNGSGGGGDAQAGRKAELSIQHRKTPEELWLLSGLEGSLEGALPDPQASSFKIVIFPKTCKEDRCGLKTRKSDYMTAFRGGTPLPDLRPSLYPADPGGCAALPPEGVVHRDLKARGEEKPDSRPCSSPFFYLKEIAESRTAPAAQPCSFSRDFMDLPADPHGISGWVCRDSGYLSPEVLRKDPYGKPGTCGLVGVEGSLVLFQGSSCTSCWLVPIAEWDTVTPEAKDLINKMRPLTHPNASQLPKPLSTLDLALSPTSSSTAPRGILHAQTGDRGLPEEVNARRKLKGAPRPAGSDAAREFSAPRGRPVSGPGLAAGRLGRDLSAAAGRSGEFPTES

SEQ ID NO: 51114 - protein, 635 aa, Homo sapiens
MAKVVKLVMIMAYFQEKLSAALLITENGRWRADKTQSPPTIAQNADPTSSRSKLREIPSGLEDMTSVSSMKIPQGHPTSLSGHTWDVRAWMIVHQGLTRLFSHWRQMFGKFSGNCGKPDLRLVTFQQDQGQVINLDYRCPGPGCLEPPPPQRDVWRQSLYGEGLLASRLLQGNTQDFLKGGYRGSLLDSSGPAMERAAGALGDAFSGRVLESRAPGARWDRGMPGGGPRAEIPAPRGDRAGAPRPAPESPPCPRGECLPATPRPEERRTLRVRPARASSAPAAPGQPRDSARPLYTEIGLPPGGKEADRSLQREIQVGDVSGSSQVGDKFRFLLHGIQEPAVTDEPGGPQGGQGPWRAVLRNRKATIRSWPSQREGLVISSPPPALVPQFVIPQFVSIDVGLGEEGYCQLWLNVIVRGPLGYPKKYTSGLLVGQRMQDTLGYREVSNGSGLGLPLLGASERLHRGSAGCPVACSGASGPHLTRSSAMAMQGGAGEGATRGTGVRSAPATTPQHVVCGFNQVTVGTLGGEGFCAATLNKQSAWETEHPKCPLKERDAAARGGSVTRILEGRFCEVVGGIILVFQGEVKSLAQVLKLASVARSDPEVLPGFLSLQPGIVNSGETDGESVVVTKILRI

SEQ ID NO: 51115 - protein, 2980 aa, Homo sapiens
  DOMAIN (2788)..(2819): Protein kinases ATP-binding region proteins domain identified by eMATRIX, accession number BL00107A, p-value=2.174e-14, raw score of 18.39
  DOMAIN (1185)..(2033): RhoGEF domain identified by PFam, accession name RhoGEF, E- value=2.9e-73, PFam score of 256.8
  misc_feature (1)...(2980): Xaa = X or * as defined in Table 2
XCIPSEEVCKRGFTVIVDMRGSKWDSIKPLLKILQESFPCCIHVALIIKPDNFWQKQRTNFGSSKFEFETNMVSLEGLTKVVDPSQLTPEFDGCLEYNHEEWIEIRVAFEDYISNATHMLSRLEELQDILAKKELPQDLEGARNMIEEHSQLKKKVIKAPIEDLDLEGQKLLQRIQSSESFPKKNSGSGNADLQNLLPKVSTMLDRLHSTRQHLHQMWHVRKLKLDQCFQLRLFEQDAEKMFDWITHNKGLFLNSYTEIGTSHPHAMELQTQHNHFAMNCMNVYVNINRIMSVANRLVESGHYASQQIRQIASQLEQEWKAFAAALDERSTLLDMSSIFHQKAEKYMSNVDSWCKACGEVDLPSELQDLEDAIHHHQGIYEHITLAYSEVSQDGKSLLDKLQRPLTPGSSDSLTASANYSKAVHHVLDVIHEVLHHQRHVRTIWQHRKVRLHQRLQLCVFQQEVQQVLDWIENHGEAFLSKHTGVGKSLHRARALQKRHEDFEEVAQNTYTNADKLLEAAEQLAQTGECDPEEIYQAAHQLEDRIQDFVRRVEQRKILLDMSVSFHTHVKELWTWLEELQKELLDDVYAESVEAVQDLIKRFGQQQQTTLQVTVNVIKEGEDLIQQLRDSAISSNKTPHNSSINHIETVLQQLDEAQSQMEELFQERKIKLELFLHVRIFERDAIDIISDLESWNDELSQQMNDFDTEDLTIAEQRLQHHADKALTMNNLTFDVIHQGQDLLQYVNEVQASGVELLCDRDVDMATRVQDLLEFLHEKQQELDLAAEQHRKHLEQCVQLRHLQAEVKQVLGWIRNGESMLNAGLITASSLQEAEQLQREHEQFQHAIEKTHQSALQVQQKAEAMLQANHYDMDMIRDCAEKVASHWQQLMLKMEDRLKLVNASVAFYKTSEQVCSVLESLEQEYKREEDWCGGADKLGPNSETDHVTPMISKHLEQKEAFLKACTLARRNADVFLKYLHRNSVNMPGMVTHIKAPEQQVKNILNELFQRENRVLHYWTMRKRRLDQCQQYVVFERSAKQALEWIHDNGEFYLSTHTSTGSSIQHTQELLKEHEEFQITAKQTKERVKLLIQLADGFCEKGHAHAAEIKKCVTAVDKRYRDFSLRMEKYRTSLEKALGISSDSNKSSKSLQLDIIPASIPGSEVKLRDAAHELNEEKRKSARRKEFIMAELIQTEKAYVRDLRECMDTYLWEMTSGVEEIPPGIVNKELIIFGNMQEIYEFHNNIFLKELEKYEQLPEDVGHCFVTWADKFQMYVTYCKNKPDSTQLILEHAGSYFDEIQQRHGLANSISSYLIKPVQRITKYQLLLKELLTCCEEGKGEIKDGLEVMLSVPKRANDAMHLSMLEGFDENIESQGELILQESFQVWDPKTLIRKGRERHLFLFEMSLVFSKEVKDSSGRSKYLYKSKLFTSELGVTEHVEGDPCKFALWVGRTPTSDNKIVLKASSIENKQDWIKHIREVIQERTIHLKGALKEPIHIPKTAPATRQKGRRDGEDLDSQGDGSSQPDTISIASRTSQNTLDSDKLSGGCELTVVIHDFTACNSNELTIRRGQTVEVLERPHDKPDWCLVRTTDRSPAAEGLVPCGSLCIAHSRSSMEMEGIFNHKDSLSVSSNDASPPASVASLQPHMIGAQSSPGPKRPGNTLRKWLTSPVRRLSSGKADGHVKKLAHKHKKSREVRKSADAGSQKDSDDSAATPQDETVEERGRNEGLSSGTLSKSSSSGMQSCGEEEGEEGADAVPLPPPMAIQQHSLLQPDSQDDKASSRLLVRPTSSETPSAAELVSAIEELVKSKMALEDRPSSLLVDQGDSSSPSFNPSDNSLLSSSSPIDEMEERKSSSLKRRHYVLQELVETERDYVRDLGYVVEGYMALMKEDGVPDDMKGKDKIVFGNIHQIYDWHRDFFLGELEKCLEDPEKLGSLFVKHERRLHMYIAYCQNKPKSEHIVSEYIDTFFEDLKQRLGHRLQLTDLLIKPVQRIMKYQLLLKDFLKYSKKASLDTSELERAVEVMCIVPRRCNDMMNVGRLQGFDGKIVAQGKLLLQDTFLVTDQDAGLLPRCRERRIFLFEQIVIFSEPLDKKKGFSMPGFLFKNSIKVSCLCLEENVENDPCKFALTSRTGDVVETFILHSSSPSVRQTWIHEINQILENQRNFLNALTSPIEYQRNHSGGGGGGGSGGSGGGGGSGGGGAPSGGSGHSGGPSSCGGAPSTSRSRPSRIPQPVRHHPPVLVSSAASSQAEADKMSGTSTPGPSLPPPGAAPEAGPSAPSRRPPGADAEGSEREAEPIPKMKVLESPRKGAANASGSSPDAPAKDARASLGTLPLGKPRAGAASPLNSPLSSAVPSLGKEPFPPSSPLQKGGSFWSSIPASPASRPGSFTFPGDSDSLQRQTPRHAAPGKDTDRMSNVLLGQRASNGSESSSSSNISTMLVTHDYTAVKEDEINVYQGEVVQILASNQQNMFLVFRAATDQCPAAEGWIPGFVLGHTSAVIVENPDGTLKKSTSWHTALRLRKKSEKKDKDGKREGKLENGYRKSREGLSNKVSVKLLNPNYIYDVPPEFVIPLSEVTCETGETVVLRCRVCGRPKASITWKGPEHNTLNNDGHYSISYSDLGEATLKIVGVTTEDDGIYTCIAVNDMGSASSSASLRVLGPGMDGIMVTWKDNFDSFYSEVAELGRGRFSVVKKCDQKGTKRAVATKFVNKKLMKRDQVTHELGILQSLQHPLLVGLLDTFETPTSYILVLEMADQGRLLDCVVRWGSLTEGKIRAHLGEVLEAVRYLHNCRIAHLDLKPENILVDESLAKPTIKLADFGDAVQLNTTYYIHQLLGNPEFAAPEIILGNPVSLTSDTWSVGVLTYVLLSGVSPFLDDSVEETCLNICRLDFSFPDDYFKGVSQKAKEFVCFLLQEDPAKRPSAALALQEQWLQAGNGRSTGVLDTSRLTSFIERRKHQNDVRPIRSIKNFLQSRLLPRV

SEQ ID NO: 51116 - protein, 402 aa, Homo sapiens
  DOMAIN (89)..(124): Matrix protein (MA) p15. domain identified by eMATRIX, accession number PF01140D, p-value=8.430e-09, raw score of 15.54
MSQKCRKDNPRHTSSNNQRRAKSSKRTETNKEEEEKQQKRTQERAAKTDQSDTKGPRRKEKQTDQHGRKRRQHDSEEERRRGTNDAKARRRKENHSRSTRRRTGAEAREQRGRARATEERKRKGDRNETKREQGAEAKEKREKKKRTKTAAQRKNRREDRKKNKKARQEDIVFDLGSHIKCGMSLEKTDQDHEETPQRYHPPHLHSHEPCGRCPVATRSCCEGQCVAIAFLPKKLHGKQAQAGAVLLAGPGMDGIMVTWKDNFDSFYSEVAELGRYDAQPRTPSERAERGEDIPKRCAKDYNRCILIKLQVYATLPAGSWDFLKYSKKASLDTSELEGKIVAQGKLLLQDTFLVTDQDAGLLPRCRERRIFLFEQIVIFSEPLDKKKGFSMPGFLFKNSIKT

SEQ ID NO: 51117 - protein, 74 aa, Homo sapiens
  DOMAIN (12)..(35): Guanine-nucleotide dissociation stimulators CDC24 family sign domain identified by eMATRIX, accession number BL00741B, p-value= 6.000e-14, raw score of 14.27
DLKQRLGHRLQLTDLLIKPVQRIMKYQLLLKDFLKYSKKASLDTSELERAVEVMCIVPRRCNDMMNVGRLQGFD

SEQ ID NO: 51118 - protein, 523 aa, Homo sapiens
  misc_feature (1)...(523): Xaa = X or * as defined in Table 2
MSISFSRVKHSCLCLSVVAAASVIWFVVRAELGSSRCAVVEYPDMAGTKGPYGPGQNQERKRPNPPQGHKSPHRTPKPELNNRTTVHPGLAYNSLSVSSNDASPPASVASLQPHMIGAQSSPGPKRAGNTLRKWLTSPVRRLSSGKADGHVKKLAHKHKKSREVRKSADAGSQKDSDDSAATPQDETVEELKSFGGDSVENLQCKTDVHRNSPAVEQGIRGWPCLIGNALAVNRQQTHMCACLADVMWHEGCQSQQRLGDLVGFVTLAVQGGPHFTAPALLPTLGLGRLSLDSSSRRSASSCFLPQPSAAFSYTSVTCGKFLKTVSKVPVCRRGLAVNRKEAEGRSSESPTSSATFQSPALSWMLVSQRLLLPHMIGAQSSPGPKRPGNTLRKWLTSPVRRLSSGKADGHVKKLAHKHKKSREVRKSADAGSQKDSDDSAATPQDETVEEDTVAQPRGRREGAGRQSGSRAAGPGGRRASAIRGGHARTDVGKRNGTRTRKELMPLHGKRKDAAEHDEPTSAX

SEQ ID NO: 51119 - protein, 2120 aa, Homo sapiens
  DOMAIN (1901)..(1916): POLLEN ALLERGEN POA PI SIGNATURE domain identified by eMATRIX, accession number PR00833H, p-value=8.750e-10, raw score of 2.30
  DOMAIN (107)..(1100): Spectrin repeat domain identified by PFam, accession name spectrin, E-value=3.1e-20, PFam score of 78.4
  misc_feature (1)...(2120): Xaa = X or * as defined in Table 2
XCIPSEEVCKRGFTVIVDMRGSKWDSIKPLLKILQESFPCCIHVALIIKPDNFWQKQRTNFGSSKFEFETNMVSLEGLTKVVDPSQLTPEFDGCLEYNHEEWIEIRVAFEDYISNATHMLSRLEELQDILAKKELPQDLEGARNMIEEHSQLKKKVIKAPIEDLDLEGQKLLQRIQSSESFPKKNSGSGNADLQNLLPKVSTMLDRLHSTRQHLHQMWHVRKLKLDQCFQLRLFEQDAEKMFDWITHNKGLFLNSYTEIGTSHPHAMELQTQHNHFAMNCMNVYVNINRIMSVANRLVESGHYASQQIRQIASQLEQEWKAFAAALDERSTLLDMSSIFHQKAEKYMSNVDSWCKACGEVDLPSELQDLEDAIHHHQGIYEHITLAYSEPLPTTPRPCTMSLDVIHEVLHHQRQLENIWQHRKSRPASEAAAQDVQQVLDWIENHGEAFLSKHTGVGKSLHRARALQKRHEDFEEVAQNTYTNADKLLEAAEQLAQTGECDPEEIYQAAHQLEDRIQDFVRRVEQRKILLDMSVSFHTHVKELWTWLEELQKELLDDVYAESVEAVQDLIKRFGQQQQTTLQVTVNVIKEGEDLIQQLRDSAISSNKTPHNSSINHIETVLQQLDEAQSQMEELFQERKIKLELFLHVRIFERDAIDIISDLESWNDELSQQMNDFDTEDLTIAEQRLQHHADKALTMNNLTFDVIHQGQDLLQYVNEVQASGVELLCDRDVDMATRVQDLLEFLHEKQQELDLAAEQHRKHLEQCVQLRHLQAEVKQVLGWIRNGESMLNAGLITASSLQEAEQLQREHEQFQHAIEKTHQSALQVQQKAEAMLQANHYDMDMIRDCAEKVASHWQQLMLKMEDRLKLVNASVAFYKTSEQVCSVLESLEQEYKREEDWCGGADKLGPNSETDHVTPMISKHLEQKEAFLKACTLARRNADVFLKYLHRNKRMVTHIKAPEQQVKNILNELFQRENRVLHYWTMRKRRLDQCQQYVVFERSAKQALEWIHDNGEFYLSTHTSTGSSIQHTQELLKEHEEFQITAKQTKERVKLLIQLADGFCEKGHAHAAEIKKCVTAVDKRYRDFSLRMEKYRTSLEKALGISSDSNKSSKSLQLDIIPASIPGSEVKLRDAAHELNEEKRKSARRKEFIMAELIQTEKAYVRDLRECMDTYLWEMTSGVEEIPPGIVNKELIIFGNMQEIYEFHNNIFLKELEKYEQLPEDVGHCFVTWADKFQMYVTYCKNKPDSTQLILEHAGSYFDEIQQRHGLANSISSYLIKPVRANSEYSPLLKRAPDVLIENKQDWIKHIREVIQERTIHLKGALKEPIHIPKTAPATRQKGRRDGEDLDSQGDGSSQPDTISIASRTFSRTPWTTISSLVAQRSCTIRRGQTVEVLERPHDKPDWCLVRTTDRSPAAEGLVPCGSLCIAHSRSSMEMEGIFNHKDSLSVSSNDASPPASVASLQPHMIGAQSSPGPKRPGQHPCAKWLTSPVRRLSSGKADGHVKGSWAHKHKKSREVRKSADAGSQKDSDDSAATPQIETVEERGRNEGLSSGTLSKSSSSGMQSCGEEEGEEGADAVPLPPPMAIQQHSLLQPDSQDDKASSRLLVRPTSSETPSAAELVSAIEELVKSKMALEDRPSSLLVDQGDSSSPSFNPSDNSLLSSSSPIDEMEAKEIQLFKEKHTTFCKNMKYQLLLKDFLKYSKKASLDTSELERAVEVMCIVPRRCNDMMNVGRLQGFDGKIVAQGKLLLQDTFLVTDQDAGLLPRCRERRIFLFEQIVIFSEPLDKRKGFSMPGFLFKSSIKVSCLCLEENVENDPCKFALTSRTGDVVETFIMHSSSPSVRQTWIHEINQILENQRNFLNALTSPIEYQRNHSGGGGGGGSGAAAGVGAAAAAGPPVAAAATVAAPAAAAAPPARAGAGPPGSPSLSDTTPPCWSPLQPRARQRQTRCQSESSSSSNISTMLVTHDYTAVKEDEIQQFVIPLSEVTCETGETVVLRCRVCGRPKASITWKGPEHNTLNNDGHYSISYSDLGEATLKIVGVTTEDDGIYTCIAVNDMGSASSSASLRVLGPGMDGIMVTWKDNFDSFYSEVAELGRGKILCSFKKCDSERNQASSGH

SEQ ID NO: 51120 - protein, 141 aa, Homo sapiens
MAASIVRRGMLLARQVVLPQLSPAEEQSQNDEDNQGSEKLVEQLDIEETEQSKLPQYLERFKALHSKLQALGKIESEGLLSLTTQLVKEKLSTCEAEDIATYEQNLQQWHLDLVQLIQREQQQREQAKQEYQAQKAAKASA

SEQ ID NO: 51121 - protein, 106 aa, Homo sapiens
MKSRRYRRKMMDQANDKKVAAIEALNDGELQKAIDLFTDAIKLNPRLGPFLYAQGGASVFRSNYRSQIAAIRDCDRAIDINPDSAQPYKWRGKAHRLFRPLGRSSP

SEQ ID NO: 51122 - protein, 127 aa, Homo sapiens
MEPNVVARISQWADDHLRLVRTSKFTSSSDIPVEFIRRNVKLRGRLRRITENGLEIEHIPITLPIIASLRKEPRGALLVKLAGVELAETGKAWLQKELKPSQLLWFQLLGKENSALFCYLLVNKGGY

SEQ ID NO: 51123 - protein, 120 aa, Homo sapiens
  misc_feature (1)...(120): Xaa = X or * as defined in Table 2
MEPNVGARISQWADDHLRLVXXXXXXXXXXXXXXXXXXXXXXXXXXXXXXXXXXXXXXXXXXNITTGMAIAGISYFLRSIRLASKFTSSLDIPVEFIRRNVKLRGRLRPITENGLEIEHI

SEQ ID NO: 51124 - protein, 111 aa, Homo sapiens
  misc_feature (1)...(111): Xaa = X or * as defined in Table 2
MAGQPAATGSPSADKDGMEPNVVARISQWADDHLRLVRNISTGMAIAGIMLLLRSIRLTSKFTSSSDIPVEFIRRNVKLRGRLRRITENGLEIEHIPITLPIIASLRKEPX

SEQ ID NO: 51125 - protein, 514 aa, Homo sapiens
MVGLNPSPGSKCFIRLPFSGQRGISIAALITNLSPFSSVRDQNGKAVRLPKCNGRCTPLAGKRGPALLAASGGQREGPGTPREGEASCSEAGPSTGRNATHHHRKGPESYIISRTHTPTLILLNYGTLKSGRGQFPARGLRGSPRTALTVLNRRVPAVAAEKGTWATCSLAHRTGGQKSPPRRALLPTSQQKPQTSGEEQGAAATTCFLIQILTLTQEPPSLSAPQLPRKSGTGVAESGLERLLPPLARAGWVYGTLGLHVEPQGCTWNPWLTLSCGAPRLARARSTGNEVLLLPRKFQKFRNPGKKHLYTDSYVYDLIYKVDQKRNFLNPSWETEERGVVMANSPHTRHSRCRPLELIPPQFSVAPRPRRDPRQRPHVVLRVALCRPAPTTRPDCVAPVPGLGAGGRLPTARSEPRRWAPFRPCRQTASRWPRAAPPCSRPPASGPELLRLAAGGAAHLGKAAGSPSPRTGVAPRPAVASGRAPDIRRLNSAPTAFMQGDSTMQEISEQHCGG

SEQ ID NO: 51126 - protein, 61 aa, Homo sapiens
  DOMAIN (29)..(56): Mandelate racemase / muconate lactonizing enzyme family signa domain identified by eMATRIX, accession number BL00908A, p-value= 5.310e-10, raw score of 15.14
MESRGVELPSLWEKALKLIGPEKGVVHLATAAVLNAVWDLWAKQEGKPVWKLLVDMKYCRK

SEQ ID NO: 51127 - protein, 187 aa, Homo sapiens
MDFIQWVISHYYHIYLDVQIVPDSANGNFFKVTSFKALVPLGIGIATGEQCHNRVIFKQLLQAKALQFLQIDSCRLGSVNENLSVLLMAKKFEIPVCPHAGGVGLCELVQHLIIFDYISVSASLENRVCEYVDHLHEHFKYPVMIQRASYMPPKDPGYSTEMKEESVKKHQYPDGEVWKKLLPAQEN

SEQ ID NO: 51128 - protein, 216 aa, Homo sapiens
  DOMAIN (133)..(182): Thymidylate synthase proteins domain identified by eMATRIX, accession number BL00091E, p-value=9.813e-32, raw score of 22.23
  DOMAIN (112)..(216): Thymidylate synthase domain identified by PFam, accession name thymidylat_synt, E-value=1.3e-68, PFam score of 241.4
MVMEMEMVMVMVMEMVMVMVMEMVMVMEMVMVMVMEMVMVMVMEMVMVMEMVMVMVMEMVMVMVMVMVMVMEMEMVMVMEMVMVMEMEMVMVMEMVMVMVMVWRCDGYGDGDDLPLMALPPCHALCQFYVVNSELSCQLYQRSGDMGLGVPFNIASYALLTYMIAHITGLKLQREPRPFPKLRILRKVEKIDDFKAEDFQIEGYNPHPTIKMEMAV

SEQ ID NO: 51129 - protein, 127 aa, Homo sapiens
  DOMAIN (26)..(81): Mandelate racemase / muconate lactonizing enzyme family signa domain identified by eMATRIX, accession number BL00908B, p-value= 1.900e-15, raw score of 37.71
ALKDGWTRFKVKVGADLQDDMRRCQIIRDMIGPEKTLMMDANQRWDVPEAVEWMSKLAKFKPLWIEEPTSPDDILGHATISKCHNRVIFKQLLQAKALQFLQIDSCRLGSVNENLSVLLMAKKFEIP

SEQ ID NO: 51130 - protein, 59 aa, Homo sapiens
  misc_feature (1)...(59): Xaa = X or * as defined in Table 2
MDANQRWDVPEAVEWMSKLAKFKPLWIEEPTSPDDILGHATISKALVPLGIGIATGEQX

SEQ ID NO: 51131 - protein, 1046 aa, Homo sapiens
  DOMAIN (849)..(894): kw TRANSCRIPTASE REVERSE II ORF2 domain identified by eMATRIX, accession number DM01354N, p-value=1.000e-40, raw score of 13.17
  DOMAIN (428)..(510): Src homology domain 2 domain identified by PFam, accession name SH2, E-value=2.3e-50, PFam score of 148.8
MDFIQWVISHYYHIYLDVQIVPDSANGNFFKVTSFKCMDGRLSRVRKRQNPVSRDKGKDLIMGCIKSKENKSPAIKYRPENTPEPVSTSVSHYGAEPTTVSPCPSSSAKGTAVNFSSLSMTPFGGSSGVTPFGGASSSFSVVPSSYPAGLTEHADGLCHKLTTVCPTVKPQTQGLAKDAWEIPRESLRLEVKLGQGCFGEVWMGTMMPEAFLQEAQIMKKLRHDKLVPLYAVVSEEPIYIVTEFMSKGSLLDFLKEGDGKYLKLPQLVDMAAQEDESSSGMRREQSKAVCTDLTPPSGNGRVFKIGIISSFNVSDQQGLSPLASKTSNASQPSVTSDVCQFTSIWLLFVWLYSFTPCMFILEFSKKSETSMDSINFDKVSFLLNFALQLLAASASINSDLYLFILFFAQDSLSQIYNLECAPGKKPGWYFGKMGRKDAERLLLNPGNQRGIFLVRESETTKGAYSLSIRDWDEIRGDNVKHYKIRKLDNGGYYITTRAQFDTLQKLVKHYTGASTPVFDRVTNGVTPTIKDLTGCCVENRLLTSNSSDFFTLINHSNSSKTPFQNTRLVVSRGNSSEKQFAIRFQDGKTDHAIQLSSGKKTALGREALEHPESLDSRKVGQRSRWSSQAASPISGPIQAETALLCPGDQWTQEFHTKGGLKMRSMAHQRPLGLELQKSGSLSSDKTPHAVPRQSATAAAMYSSLDGSVGRRAFPLATVNLLHHEWVSPFKTTSTPVSRLRSIYLSGQVDYNKSNSRRRWKAKVGRGQGSECWAVESEVHSTALALVPLGIGIATGEQCHNRVIFKQLLQAKALQFLQIDSCRLGSVNENLSVLLMAKKFEKIQTTIRDYYKHLYANKLENLEEMDKFLDTYTLPRLNQEEVESLNRPITGAEIVAIINSLPTKKSPGPDGFTAEFYQRRVQETQRGLELLQVTQQVVEAGSPLKTPSPGLPVLPQRQPRRVQGTEEASERCALGFPLAGTQQNHFAAIAYYAFYHFQQNMMDANQRWDVPEAVEWMSKLAKFKPLWIEEPTSPDDILGHATISKGV

SEQ ID NO: 51132 - protein, 189 aa, Homo sapiens
  DOMAIN (71)..(98): Thymidylate synthase proteins domain identified by eMATRIX, accession number BL00091B, p-value=8.714e-30, raw score of 11.47
  DOMAIN (28)..(180): Thymidylate synthase domain identified by PFam, accession name thymidylat_synt, E-value=3.6e-109, PFam score of 376.1
MPVAGSELPRRPLPPAAQERDAEPRPPHGELQYLGQIQHILRCGVRKDDRTGTGTLSVFGMQARYSLRDEFPLLTTKRVFWKGVLEELLWFIKGSTNAKELSSKGVKIWDANGSRDFLDSLGFSTREEGDLGPVYGFQWRHFGAEYRDMESDYSGQGVDQLQRVIDTIKTNPDDRRIIICGLKSKRSFL

SEQ ID NO: 51133 - protein, 404 aa, Homo sapiens
  DOMAIN (209)..(264): Mandelate racemase / muconate lactonizing enzyme family signa domain identified by eMATRIX, accession number BL00908B, p-value= 1.900e-15, raw score of 37.71
  DOMAIN (1)..(366): Mandelate racemase / muconate lactonizing en domain identified by PFam, accession name MR_MLE, E-value=1.6e-07, PFam score of -14.9
MHTDPDYSAAYVVIETDAEDGIKGCGITFTLGKGTEVVVCAVNALAHHVLNKDLKDIVGDFRGFYRQLTSDGQLRWIGPEKGVVHLATAAVLNAVWDLWAKQEGKPVWKLLVDMDPRMLVSCIDFRYITDVLTEEDALEILQKGQIGKKEREKQMLAQGYPAYTTSCAWLGYSDDTLKQLCAQALKDGWTRFKVKVGADLQDDMRRCQIIRDMIGPEKTLMMDANQRWDVPEAVEWMSKLAKFKPLWIEEPTSPDDILGHATISKALVPLGIGIATGEQCHNRVIFKQLLQAKALQFLQIDSCRLGSVNENLSVLLMAKKFEIPVCPHAGGVGLCELVQHLIIFDYISVSASLENRVCEYVDHLHEHFKYPVMIQRASYMPPKDPGYSTEIEGGICKETPVSRW

SEQ ID NO: 51134 - protein, 128 aa, Homo sapiens
MDPRTLVSCIDFRYITDVLTEEDALEKQMLAQGYPAYTTSCAWLGYSDDTLKHLCAQALKDGWTRFKVKVGADLQDDMRRCQIIRDMNGPEKTLMMDANQRWDVPEAVEWMSKLAKFKPLWIEEPTSP

SEQ ID NO: 51135 - protein, 88 aa, Homo sapiens
  misc_feature (1)...(88): Xaa = X or * as defined in Table 2
XATGRAFLFNKVVNLQYSEVQDRVMLTGRHMVRDVSWQKLQLANLGWIYGVWPLKTASDFKGRAGVDPGNVVLVSEEELRALEEHGTT

SEQ ID NO: 51136 - protein, 51 aa, Homo sapiens
PQPLLPPPGERQPIVFLRGEGEELSRLGPRGSPGSRTDIEDLDHYEMKEEP

SEQ ID NO: 51137 - protein, 43 aa, Homo sapiens
MRDCGSRRLCGSWRGCGCWRGCWSWVGKPSMSRGRSHTAASRS

SEQ ID NO: 51138 - protein, 1709 aa, Homo sapiens; identical to SEQ ID NO: 32700
  DOMAIN (797)..(842): kw TRANSCRIPTASE REVERSE II ORF2 domain identified by eMATRIX, accession number DM01354N, p-value=1.000e-40, raw score of 13.17
  DOMAIN (391)..(621): AP endonuclease family 1 domain identified by PFam, accession name AP_endonucleas1, E-value=7e-83, PFam score of 288.8

SEQ ID NO: 51139 - protein, 372 aa, Homo sapiens
  DOMAIN (87)..(132): kw TRANSCRIPTASE REVERSE II ORF2 domain identified by eMATRIX, accession number DM01354N, p-value=1.000e-40, raw score of 13.17
  DOMAIN (17)..(258): Reverse transcriptase domain identified by PFam, accession name rvt, E-value=3.5e-06, PFam score of 18.2
MVSKKELGLAGEKAESNHRARRYKPPLLIPRQTGSGVDLQQTPTDLQLRVLTVRRKTNKQKGHPHQNPICTSPSSKTKEIQTTIREYYQHLYTNKLENLEEMDKFFDTYTLPRLNQEEVESLNRPITGSEIEAIINNLPTKKVQDQMDSQPNSTRVLEVLARAIRQEKEIKGIQLGKEEVKLSLFADDMIVYLENPIVSAQNLLKLTANFSKVSGYKINVQKSQAFLYTNNRQTESQIMSELPFTMASNRIKYLGIQLTRDVKDLFKENYKPLLNEIKEDTNKWKNIPCSWVGRINIMKMAILPKVIYRFNAIPIRLPRTFFIELEKTTLKFIWNQKRAHIAKSILSQKNKAGGITLPDFKLYYKATVTKTA

SEQ ID NO: 51140 - protein, 433 aa, Homo sapiens
  DOMAIN (295)..(340): kw TRANSCRIPTASE REVERSE II ORF2 domain identified by eMATRIX, accession number DM01354N, p-value=1.720e-40, raw score of 13.17
MKLPEEISGSNICCSAIFAVLQPPMLIPRQTGSGVDLQQTPTDLQLRDLTVRRKTNKQKGHPHQNPICMSPSSKTKAPHHTYSKIDHIVGSKALLSKCKRTGIITNCLSDHSAIKLELRIKKLTQNHSTTWKLNNLLLNDYWAHNKMKAEMKMFFETNENKDTTYQNLWDTFKAVCRGKFIALNVHKRKQERSKTDTLTSQLKQLEKQEQTHSKARRRQEITKIRAELKEIETQRTLQKINESRSFFFEKINKIDRLLARLTKKKREKNQIDAIKDDKGDITTDPTEIQTTIREYYKHLYTNKLANLEEMDKFLDTYTLPRLNQEEVESLSRPITGSEIEAIINSLPPPTTARGPGPDGFTAKFYQMYENELVPFLLKRFQNIEKEGLLPNSFYEARIIMLAKPGRDTTKKENFRLISLMKIGAKILKKILAK

SEQ ID NO: 51141 - protein, 343 aa, Homo sapiens
  DOMAIN (129)..(174): kw TRANSCRIPTASE REVERSE II ORF2 domain identified by eMATRIX, accession number DM01354N, p-value=1.000e-40, raw score of 13.17
  misc_feature (1)...(343): Xaa = X or * as defined in Table 2
MLSSVGLLLTHRRKKKSTDTINDESLNKERDMTGNPHIFPRYQEIWQVFVSSGNNYITTATGPTAVPPLLIPRQTGSGVDLQQTPTDLQLRLLTVGRKTNKQKGHPHQNPICTSPSSKTKEIRTTIREYYKHLYANKLENLEEMDKFLDTYTLPRLNQEEVESLHRPITGSEIEAIINSLPTKKSPGPDGFTAEFYQRYKEELTNREPNMSELPFTIASKRIKYLGIQLTRNMKDLFKENYKPLLKEIKEDTNKWKNIPCSWVGRINIMKMAILPKVIYRFTIPIKLPMTFFTELEKTTSKFIWNQKRARIAKSILSRKNKAGGITLPDFKLYYKATVTKTAX

SEQ ID NO: 51142 - protein, 285 aa, Homo sapiens
MHHYTIASLCGHHRVDLHEPRWYSLLHTGLYGYEPIPHATVLNTASHCNTIPPLLIPRQTRSGVDLQQTPTDLQLRVLTVRRKTNKQKGYPHQNPICTSPSSKTKEKSLKDLMELKTMAQELHGECTSLSSQFDQLEEMVSVMEDQMNEMKQEEKFTEKRIKRNQQSLQEIWDYVKRPNLRLTGVPESDGENGTKLENTLQDIIQENFPNLARLANIQIQEIQRTPQRYSSRRATPRHIILRFTKVEMKEKMLRAAREKGRVTHKGKPVRLTADLSAETLQARRQ

SEQ ID NO: 51143 - protein, 666 aa, Homo sapiens
  DOMAIN (145)..(200): kw TRANSCRIPTASE REVERSE II ORF2 domain identified by eMATRIX, accession number DM01354Q, p-value=1.000e-40, raw score of 9.23
  DOMAIN (99)..(323): Reverse transcriptase domain identified by PFam, accession name rvt, E-value=2.7e-21, PFam score of 84.2
MAASLLFPDLGFLASRIPRNGTLGHAVSVIALLEAMDHRREPWNPATSVQLNWDEPKDLAAQEQWTLSCRSVGVCWRSTPDPVCLGISSGGCKTADIGEQQMLLPDRSSGIFVSEEYPAIWKCRNHPSSVSLMLGALDWRCSYSAILVNRIQQHIKKLIRDDQVGFIPGMQGWFTICKSINVIRHINRTKDKNHMIISIDAEKAFDKIQQRFMLKTLNKLVLEVLARAIWQEKEIRGIQLGKEEVKLSLFADDMIVYLENPIVSAQNRLKLIGKFSKVSGYKINVQKSQAFLYTNNRQTESEIMSELPFTIALKRMKYLGIQLTRDVKDLFKENYEPLLNEIKEDTNKWKNIPCSWVERINIMKKAILPKVIYRFNAIPIKLPMTFFTELEKTTLKFIWNQKRAHITKSILSQKNKAGGITLPDFKLHYKAAVTKTAWYWYQNRDIDQRNRTEPTEIMLHIYNHLIFDKPDKNKKWGNDSLFNKWCWENWLAICRKLKRDPFLTPYTKINSRWIEDLNIRPETIKTLEENLGNTIQDIAMGKDFMSKTPKAMATKAKIDKWDLIKLKNFCTAKETTIRVNRQPTEWEKIFAIYSSDKGIISRIYNELKQIYKKKKQPYQKVGKGYKQTLLKRRHLCSQKTHEKMLIITGYQRNANQNHNEIPSYTS

SEQ ID NO: 51144 - protein, 182 aa, Homo sapiens
  DOMAIN (122)..(169): kw TRANSCRIPTASE REVERSE II ORF2 domain identified by eMATRIX, accession number DM01354V, p-value=1.000e-40, raw score of 12.97
MPVTLGTSMRSDSLGEPQTEVEPPLVIPRKTGSGVDLQQTPTDLQLRVLTVRRKTNKQKGHPHQNPICTSPSSKTKAQNLLKLISNFSKVSGYKINVQKSQAFLYNNNRQTESQIMSELPFTIASKRVKYLGIQLTRDVKDLFKENCKPLLKEIKEDTNKWKNIPYSWIGRINIVKMAIQPK

SEQ ID NO: 51145 - protein, 388 aa, Homo sapiens; identical to SEQ ID NO: 37874
  DOMAIN (274)..(320): kw TRANSCRIPTASE REVERSE II ORF2 domain identified by eMATRIX, accession number DM01354O, p-value=1.000e-40, raw score of 8.73

SEQ ID NO: 51146 - protein, 432 aa, Homo sapiens; identical to SEQ ID NO: 32855
  DOMAIN (157)..(202): kw TRANSCRIPTASE REVERSE II ORF2 domain identified by eMATRIX, accession number DM01354N, p-value=1.000e-40, raw score of 13.17
  DOMAIN (243)..(431): Reverse transcriptase domain identified by PFam, accession name rvt, E-value=1.6e-16, PFam score of 68.3

SEQ ID NO: 51147 - protein, 419 aa, Homo sapiens; identical to SEQ ID NO: 32852

SEQ ID NO: 51148 - protein, 256 aa, Homo sapiens
  DOMAIN (84)..(127): 1 kw MIND INHIBITOR DIVISION CONTROL domain identified by eMATRIX, accession number DM01756B, p-value=4.822e-15, raw score of 22.91
  DOMAIN (49)..(163): ParA family ATPase domain identified by PFam, accession name ParA, E-value=3.2e-24, PFam score of 93.9
MHHGWVPDLHIHAEDTLLPFYLGEKDDVTYAIKPTCWPGLDIIPSCLALHRIEAELMGKFDEGKLPTDPHLMLRLAIETVAHDYDVIVIDSAPNLGIGTINVVCAADVLIVPTPAELFDYTSALQFFDMLRDLLKNVDLKGFEPDPLLLIPRQTGSGVDLQQTPTDLQLRVLTVRRKTNKQKGHPHRNPICMSPSSKTKVPQAKGNNVVITSYMTNRGFFEDKKATFAPSFLMNIKGNKTSVVKNSILEQGQLTVN

SEQ ID NO: 51149 - protein, 60 aa, Homo sapiens
MERQDSNPEFLTSTQQSIYNLNNYPLLPLGPPVPRTLARRDSHPQVSGNHQKWLCQGYCH

SEQ ID NO: 51150 - protein, 416 aa, Homo sapiens; identical to SEQ ID NO: 31361

SEQ ID NO: 51151 - protein, 146 aa, Homo sapiens
MDHRREPWNPATSVQLNWDEPKDLAAQEQWTLSCRSVGVCWRSTPDPVCLGISSGGCKTADIGEQQMLLPDRSSGIFVSEEYPAIWKCRNHPSSVSLMLGALDWRCSYSAILVNRIQQHIKKLIRDDQVGFIPGMQGWFTICKSIN

SEQ ID NO: 51152 - protein, 742 aa, Homo sapiens
  DOMAIN (535)..(580): kw TRANSCRIPTASE REVERSE II ORF2 domain identified by eMATRIX, accession number DM01354N, p-value=1.000e-40, raw score of 13.17
  DOMAIN (128)..(361): AP endonuclease family 1 domain identified by PFam, accession name AP_endonucleas1, E-value=2.8e-05, PFam score of -36.5
  misc_feature (1)...(742): Xaa = X or * as defined in Table 2
XTKQNCKDLDEDANGITDEGKEINEKSSQLKNLSELQDTSLQHDDEEESTVISVSEDMNSEGNVDFECDTKLYTFLSSDESQQSENSENEEDTLCFVENSGQRESLSGDTGSLSCDNALFVIDTTPGMSADKNFYLEEEDKASEVAIEEEKEEEEDEKSEEDSSDHDENEDEFSDEEDFLNSTKAKLGRLTPHMAGYSSETKLPEERPGSNICCSPISAVLQPPLLIPRQTGSGVDLQQTPTDLQLRVLTVIKKTNKQKGHPHQNPICTSPSSKTKDRSTRQKVNKDIQELNSALHQADLIDIYRTLHPKSTEYTFFAAPHCTYSKIDHIVGSKALLSKCKRTEIITNCLLDHSAIKLELRIKKFTQNCSTTWKLNNLLLNDYWAHNEIKAEIKMFFETNENKDTTYQNFWDTFKAVCRGKFIALNAHKRKQERSKIDTLTSQLKELEKQEQTHSKASRRQEITKITAELKEIETQKTLQKINESRSWFFEKINKIETASKTNKKREKNPIDAIKNDKGDITTNPTEIQTTIREYYKHLYANKLENLEEMNKFLDTNTIPRLNQEEVESLNRPITGSEIEAIINSLPTKKSPGPHGFTARFYQEYKEELVPFLLKLFQSIEKEGILPNSFYEASIILTPKPGRDTTKKESFRPISLMIINAKILNKILANRIQQHIKKLIHHDQVGFIPGMQDWFKICKSINVIQHINRTKDKNHMIISIDAEKAFDKIQQLFMLKTLSKLX

SEQ ID NO: 51153 - protein, 72 aa, Homo sapiens
SGPSAAGLLEFAGGPLQTLFAWVISSGGCRTADIGELQMLLPDRSSGSFVSEEYPAILISDCCASTEQGSMG

SEQ ID NO: 51154 - protein, 710 aa, Homo sapiens
  DOMAIN (495)..(540): kw TRANSCRIPTASE REVERSE II ORF2 domain identified by eMATRIX, accession number DM01354N, p-value=1.000e-40, raw score of 13.17
  DOMAIN (89)..(319): AP endonuclease family 1 domain identified by PFam, accession name AP_endonucleas1, E-value=7e-83, PFam score of 288.8
MAGYSSETKLPEERSGSNICCSPISAVLQPLLLIPRQTGSGVDLQQTPTDLQLRVLTVRRKTNKQKGHPHQNPICTSPSSKTKGSNSHITILTLNVNGLNAPIKRHRLANWIKSQDPSVCCIQETHLTCRDTHRIKIKGWREIYQANGKQKKAGVAILVSDKTDFKPTKIKRDKEGHYMMVKGSIQQEELTTLNIYAPNTGAPRFIKQVLRDLQRDLDSHTLIMGDFNTPLSTLDRSTRQKVNKDIQDLNSALHQVDLIDIYRTLHPKSTEYTFFSALHHIYSKIDHIVGSKALLSKYKTTEIITNCLSDHSAIKLELRIKKLTQNRSTTWKLNNLLLNDYWVHNKMKAEINTLFETNENKDTTYQNLWDTFKAVCRGKFIALNAHKRKQERSKIDTLTSQLKELEKQEQTHSKASRRQEITKIRAKLKEIETQKILQKINESRSWFFEKINKIDRPLARPIKKKREKNQIDAIKNDKGDITTDPTEIQTTIREYYKHLYANKLENLEEMDKFLNTYTLPRLNQEEVESLNKPITGSEIEAIINSLPTKKKYRTRRIHSRILSEVQGGAVLEVLARAIRQEKEIKCIQLGKEEVKLSLFADDMIVYLENPTVSAQNLLKLISNFSKVSRYKINVQKSQAFLYTNNRQTESQIMSELPFTIASKRIKYLGIQLTRDVKDLFKENYKPLLNEIKEDTNGRAFHAHGLEESIS

SEQ ID NO: 51155 - protein, 452 aa, Homo sapiens
MAGYSSEAKLPEEQSASNICCSPISAVLQAPPLIPRETGSGVDLQQTPTDLQLRDIEDLDHYEMKEEPTSEKKLEDEGTEKENWAILEKIRKTERQGHLNLKEYWQRKSPGIPEGANRKKKINGSSPDTATSGGYHSPGDSATGIYGEGRASSTTLEDLESQYQELAVALDSSSAIISQLTENINSLARVSGGGSAAPLSRALSSLCFGHVRTSKEEKKHEIHRVQKLGFTKTRWVRWGWHDLGGGLASEGCGGDLECPREERLLEEVAKLLEQERWQEEQERLLERERLLDKVEELLEQERLWEQDERLWQQETLWELERMWVLERMLELGWEALYEQRAESHSGFKELNNENKSAMQLEEQVKELKKPGEAEEPRGSKSAAAARPVPVYRSRSPDPTGAWVCGQAVWTPQEHPGLGGEAVGTGEAAGGAGDAACHSFWAAENREINITII

SEQ ID NO: 51156 - protein, 1497 aa, Homo sapiens
  DOMAIN (1405)..(1418): PROTEIN ZINC-FINGER METAL-BINDI domain identified by eMATRIX, accession number PD00066, p-value=4.600e-14, raw score of 13.92
  DOMAIN (725)..(1465): Zinc finger, C2H2 type domain identified by PFam, accession name zf-C2H2, E-value=1.9e-39, PFam score of 144.5
MGLMLGTCRSGCSMRLVSVKLQGSTGGRESPRAELASDLMTTAHPQFTVLCPQDGAETTQGNAPGSQVASHPAPRPFSKWADECATNRSGAQIKELVWEVDNEGCEVCAPSEKPEENAGGSLNQQTSKMDFSAERELGPCAMCVKDIMTQHRERKGRVKRYAEKRESTVNSRVCGRSIKCQQRQRGQSSDCPSLGLVKESLFDISENILGPNIPKTKYTRTYLLSLAVIHHLMPSRLIFLLLVEHSKFQSPKFQMLQDAKLSTNMILKGNTHWSISDFQIWDAQLVLYCDLVGLSFKKKSKLCRRETSKKKERLKNKKAESNENRIARQCPGGTRGNGVERAQAGYDENREVTVDLAMWKALVSSARAVLVACPFFSEEFYFEIPRTFQYLSFYVYDKNVLQRDLRIALRPDSRVRKHHGPPGKRAGGEGAEPHLDVEEMEDSEPRISKDLKDDFHSDTVLSILNEQRIRGILCGFPRVVVKRQETVTDLAAAGKKLGISFLEDLTDRNFSNSPGPYVFCITEKGVVKEEKNEKRHEEPAITNGPRITNAFSIIETENSNNMFSPLDLRASFKKVSDSMRTASLCLERTDVCHEAEPVRTLAEHSYAVSSVAEAYRSQPVREHDGSSPGNTGKENCEALAAKPKTCRKPKTFSIPQDSDSATENIPPPPVSNLEVNQERSPQPAAVLTRSKSPNNEGDVHFSREDENQSSDVPGPPAAEVPPLVYNCSCCSKAFDSSTLLSAHMQLHKPTQEPLVCKYCNKQFTTLNRLDRHEQICMRSSHMPIPGGNQRFLENYPTIGQNGGSFTGPEPLLSENRIGEFSSTGSTLPDTDHMVKFVNGQMLYSCVVCKRSYVTLSSLRRHANVHSWRRTYPCHYCNKVFALAEYRTRHEIWHTGERRYQCIFCLETFMTYYILKNHQKSFHAIDHRLSISKKTANGGLKPSVYPYKLYRLLPMKCKRAPYKSYRNSSYENARENSQMNESAPGTYVVQNPHSSELPTLNFQDTVNTLTNSPAIPLETSACQDIPTSANVQNAEGTKWGEEALKMDLDNNFYSTEVSVSSTENAVSSDLRAGDVPVLSLSNSSENAASVISYSGSAPSVIVHSSQFSSVIMHSNAIAAMTSSNHRAFSDPSYDSKPEPDKVGRFASRPKSIKEKKKTTSHTRGEIPEESNYVADPGGSLSKTTNIAEETSKIETYIAKPALPGTSTNSNVAPLCQITVKIGNEAIVKRHILGSKLFYKRGRRPKYQMQEEPLPQGNDPEPSGDSPLGLCQSECMEMSEVFDDASDQDSTDKPWRPYYNYKPKKKSRQLKKMRKVNWRKEHGNRSPSHKCKYPAELDCAVGKAPQDKPFEEEETKEMPKLQCELCDGDKAVGAGNQGRPHRHLTSRPYACELCAKQFQSPSTLKMHMRCHTGEKPYQCKTCGRCFSVQGNLQKHERIHLGLKEFVCQYCNKAFTLNETLKIHERIHTGEKRYHCQFCFQRFLYLSTKRNPRAEAYSGA

SEQ ID NO: 51157 - protein, 50 aa, Homo sapiens
MSLYVEKGLSWTCVAVYANACKYSRQSDSEAKELSSPCLALPTNPRPLRS

SEQ ID NO: 51158 - protein, 230 aa, Homo sapiens
MKRKRQAAPLFSHQNLVSKEVLQETWDEWCFPKTDSWTLNIIRMAQEGKEENSLIPLLVNPMNIYEEQKIMFLYSLSLPVETLGPASRMDPESERALQAPHSPSKTDGKELAGTMDGEGTLFQTESPQSGSILTEETEVKGPAYSHLTEFAPPPTPMVDHLVASNPFEDDFGAPKVGVAAPPFLGSPVPFGGFRVQGGMAGQPSAPPALQTDDPYSKAHSVTPKSTPRVT

SEQ ID NO: 51159 - protein, 669 aa, Homo sapiens
  DOMAIN (280)..(334): Kinesin light chain repeat proteins domain identified by eMATRIX, accession number BL01160B, p-value=9.495e-11, raw score of 19.54
  misc_feature (1)...(669): Xaa = X or * as defined in Table 2
XSDNSWVLAGSESLPVETLGPASRMDPESERALQAPHSPSKTDGKELAGTMDGEGTLFQTESPQSGSILTEETEVKGTLEGDVCGVEPPGPGDTVVQGDLQETTVAWGPDTQGPGRPEPSTEPAFNPQSSLDQGGGPAAPAVDDDTRRGHGGVCGDGGAGEAGPPQPMVPLAVENQAGGEGAGGELGISLNMCLLGALVLLGLGVLLFSGGLSESETGPMEEVERQVLPDPEVLEAVGDRQDGLREQLQAPVPPDSVPSLQNMGLLLDKLAKENQDIRLLQAQLQAQKEELQSLMHQPKGLEEENAQLRGALQQGEAFQRALESELQQLRARLQGLEADCVRGPDGVCLSGGRGPQGDKAIREQGPREQEPELSFLKQKEQLEAEAQALRQELERQRRLLGSVQQDLERSLQDASRGDPAHAGLAELGHRLAQKLQGLENWGQDPGVSANASKAWHQKSHFQNSREWSGKEKWWDGQRDRKAEHWKHKKEESGRERKKNWGGQEDREPAGRWKEGRPRVEESGSKKEGKRQGPKEPPRKSGSFHSSGEKQKQPRWREGTKDSHDPLPSWAELLRPKYRAPQGCSGVDETYLARLPWAGQLTKELPLSPAFFGEDGIFRHDRLRLRDLVDALEDSLEEVAVQQTGDDDEVDAFEDFIFSHFFGDKALKKS

SEQ ID NO: 51160 - protein, 58 aa, Homo sapiens
MVKIVTVKTQAYQDQKPGTSGLRKRVMVFQSSANYAENLIQSIISTVEPAQRQEATLV

SEQ ID NO: 51161 - protein, 131 aa, Homo sapiens
MVKIVTVKTQAYQDQKPGTSGLRKRVKVFQSSANYAENFIQSIISTVEPAQRQEATLVVGGDGRFYMKEAIQLIARIAAANGQAELTALTRDLALAKGLRVNIYTDCKYAFHILHHHAVIWAERNFLTMQG

SEQ ID NO: 51162 - protein, 74 aa, Homo sapiens
MSQNKAEICSQVRLTQRKELIGTEGTKNCIFAFCCFVWSDHLLGQNTPLGLRFGGGRERQFHVSSQNSLQTCSL

SEQ ID NO: 51163 - protein, 316 aa, Homo sapiens
  DOMAIN (47)..(62): PHOSPHOGLUCOMUTASE/PHOSPHOMANNOMUTASE FAMILY SIGNATURE domain identified by eMATRIX, accession number PR00509A, p-value=1.964e- 17, raw score of 14.01
  DOMAIN (1)..(302): Phosphoglucomutase/phosphomannomutase domain identified by PFam, accession name PGM_PMM, E-value=0.00032, PFam score of -132.3
MAANVLCGLVVSSTPVSAIIGRLVIGQNGILSTPAVSCIIRKIKAIGGIILTASHNPGGPNGDFGIKFNISNGGEFAVILRTGPAPEAITDKIFQISKTIEEYAVCPDLKVDLGVLGKQQFDLENKFKPFTGMFTFLLFLPTPISKLSDFPFNVLVEGLQLWKDFPADTPSSVAPGMASKISSSLIVFQLLFLPPLGNSLEVKSSGEEEGGGWSHGAVEGFQRDAAVCVPQGVRERSPERRAAAPSQASPPSSVDVVSPSLYKLITPSKASAEWSLMGSDVAGMGLTQHRDKGPAAGPKRFQCYSPDAPPQKKATN

SEQ ID NO: 51164 - protein, 399 aa, Homo sapiens
MDLNLMEANDREGDPCDLWVTLHSMGYNKALELTELLAVPPPGSDHIREKDGLWAVLAWLSILATRKQSVEDILKDHWQKYWPEFLHQVSHSPAGVQGLGVICSQPVGLNFVTSSRYDYEEVEAEGANKMMKDLEALMFDRSFVGKQFSANDKVYTVEKADNFEYSDPVDGSISRNQVETDRCVMVYALVLCTVQYPHSGILNLDSRGIFALSGMICKMMCPLYMQKGAPESKKEGELWELRCQLLSFLSADYSRVTALLMNGTIKHQMGIGDEQQVKSSIFLGLRLIFTDGSRIVFRLSGTGSAGATIRLYIDSYEKDVANINQDPHLTPSPVPCRNGGGRERKEGTVTDSPGATWNLRGVSPQEQSADYRREMRKIVGYPKTLTKQYYNEQKAIRNY

SEQ ID NO: 51165 - protein, 103 aa, Homo sapiens
MVKIVTVKTQAYQDQKPGTSGLRKRVKVFQSSANYAENFIQSIISTVEPAQRQEATLVVGGDGRFYMKEAIQLIARIAAANGIGRLVIGQNGILSTPGCILHH

SEQ ID NO: 51166 - protein, 56 aa, Homo sapiens
MHPVSCWVIMSCRPLCTRLILSDSPPGPPSDICVSRKNPSNYPAMVLPQCFTICII

SEQ ID NO: 51167 - protein, 391 aa, Homo sapiens
MSELRLCCDLLVQQVDKTKEVTTTGVSNSEEGIDVGTLLKSTCNTFLKTLEECMQIANAAFTSELLYHTPPGSPQLAMLKSSKMKHPIIPIHNSLERQTELSTCENGSLNMEINGEEEILMKNKNSLYLKSAEIDCSISSEENTDDNITVQGEIMKEDRMENLKNHDNNLSQSGSDSSCSPECLWEEGKEVIPTFFSTMNTSFSDIELLEDSGIPTEAFLASCCAVVPVLDKLGPTVFAPVKMDLVENIKKVNQKYITNKEEFTTLQKIVLHEVEADVAQVRNSATEALLWLKRGLKFLKGFLTEVKNGEKDIQTALNNAYGKTLRQHHGWVVRGVFALALRATPSYEDFVAALTVKEGDHRKEAFSIGMQRDLSLYLPAMKKQMAILDAL

SEQ ID NO: 51168 - protein, 621 aa, Homo sapiens
  DOMAIN (19)..(48): PH domain identified by PFam, accession name PH, E-value= 0.046, PFam score of 12.4
MAVCEIQVHSVDNTRMDLIIPGEQYFYLKARSVAERQRWLVALGSAKACLTDKFAENTENLKTKMSELRLYCDLLVQQVDKTKEVTTTGVSNSEEGIDVGTLLKSTCNTFLKTLEECMQIANAAFTSELLYRTPPGSPQLAMLKSSKKVNQKYITNKEEFTTLQKIVLHEVEADVAQVRNSATEALLWLKRGLKFLKGFLTEVKNGEKDIQTALSFSSNVVLDLETGPRGCIDFVKKEETLKGKCCFVTAIITASLSFFFPLFSFGTIFNGKEKGGCKFDIFVLMFRLISKKTQTQQALRKRFFEKCLHNSYSEPVGSLMHISSGIMVPFSHFEVPAFISRTDTLFEMREDNAYGKTLRQHHGWVVRGVFALALRAAPSYEDFVAALTVKEGDHQKEAFSIGMQRDLSLYLPAMEKQLAILDTLYEVHGLESDEVLYPLGCLDCCPEGEQSWFQKKNVFGCLSQLPVGRGVQLPCGHEGPAKENRVWLCMPLAITPESAEAQNRDNHLWSSVVRVDGELMNDDGLTSALRTQITFGMICCVNALSSENKVVASLLTLVRFTAAPSLPTLHCVSRHLQVEDPHLVMSVCECGTTISLPEPRSQLQCSTAVSQLEDSRRMAEH

SEQ ID NO: 51169 - protein, 114 aa, Homo sapiens
  misc_feature (1)...(114): Xaa = X or * as defined in Table 2
XNYRCLPVGFMWREGDLRDVVLEKAMHKCILKPLKGHVEAMLKDFHMADGSWKQLKENLQLVRQRNPQKLGVFAPTPDFVDVEKIKVKFMTMQKMYSPEKKVMLLLRVCKLIYT

SEQ ID NO: 51170 - protein, 27 aa, Homo sapiens
MLETSPYSFRMNVYEPMNTLQIFSLLL

SEQ ID NO: 51171 - protein, 437 aa, Homo sapiens
  DOMAIN (96)..(133): Small cytokines (intercrine/chemokine) C-C subfamily signatur domain identified by eMATRIX, accession number BL00472C, p-value= 8.225e-09, raw score of 20.76
MLEHGGLIVQEDEVDWSFFVTTMSVRLRFLSPGDTGAVGVVGRSASFAGFSSAQSRRIANLPFPESAALTVSASLKMANLRRARFKRKSINRNSVRSRMPAKSSKMYGTLRKGSVCADPKPQQVKKIFEALKRGLKEYLCVQQAELDHLSGRHKDTRRNSRLGRGKKHQSTSPTTETLFRASAHGIYSIGQCRSCRETPHQRAGKYALPLRGELQSHMAQGVDKSKGKELKVEGRGGGTFAHELLAVEYAGCISPAFRVKVNQTFIDYRTLRLQPAIPQSLPEALRLAADLAEQKQRLEQKMLMDAPKVEFSERVATASGVLIRNYAKVLGLGQNYLFTWLRDNGILIATGERRTSPNKNTYFGHVEAMLNDFHMADGSWKQLKENLQLVLQKNPQELGVFAPTPDFVDVEKIKVKFMTMQKMYTPEKKGMLLMRLC

SEQ ID NO: 51172 - protein, 108 aa, Homo sapiens
  misc_feature (1)...(108): Xaa = X or * as defined in Table 2
MQKKVLSLRLPCEFGAPLKEFAIKESTYTFSLEGSGISFADLFRLIAFYCISRDVLPFTLKLPYAISTAKSEAQLEELAQMGLNFWSSPADSKPPNLPPPHRPLSSDX

SEQ ID NO: 51173 - protein, 709 aa, Homo sapiens
  DOMAIN (599)..(689): Ras association (RalGDS/AF-6) domain identified by PFam, accession name RA, E-value=5.8e-15, PFam score of 63.1
LIDTIASEIGELKQEMVREMVLQPADRAASLSPSMIFLVHKSTKMQKKVLSLRLPCRLCNIPQAQLLVLPIKGELQGPIPWLAAALSSPADSKPPNLPPPHRPLSSDGVCPASLRQLCLINGVHSIKTRTPSELECSQTNGALCFINPLFLKVHSQDLSGGLKRPSTRTPNANGTERTRSPPPRPPPPAINSLHTSPRLARTETQTSMPETVNHNKHGNVALPGTKPTPIPPPRLKKQASFLEAEGGAKTLSGGRPGAGPELELGTAGSPGGAPPEAAPGDCTRAPPPSSESRPPCHGGRQRLSDMSISTSSSDSLEFDRSMPLFGYEADTNSSLEDYEGESDQETMAPPIKSKKKRSSSFVLPKLVKSQLQKVSGVFSSFMTPEKRMVRRIAELSRDKCTYFGCLVQDYVSFLQENKECHVSSTDMLQTIRQFMTQVKNYLSQSFLRMPWEAPFIALTSIDEETKGVARSSQDASATDTVPWQALSILLVAGNFFFLQTIVIVATLSLADVVLEKAMHKCILKPLKGHVEAMLKDFHMADGSWKQLKENLQLVRQRNPQELGVFAPTPDFVDVEKIKVKFMTMQKMYSPEKKVMLQEKLNYLRVAFQEVNSGCTGKTLLVRPYITTEDVCQICAEKFKVGDPEEYSLFLFVDETWQQLAEDTYPQKIKAERATADHSPTSSTLSTNASRNDPYGHHFPGTGKEDLTTS

SEQ ID NO: 51174 - protein, 121 aa, Homo sapiens
MGGIRTILLHLCRHWSETDSNHILPCLPPTNRCHPSFSQHQQLYYSQDDSNRKNFDAYRLYLQSPHSYEDPYFDDRVHFPASTDYSTQYGLKSTTNYVDFYSTKRPSYRAEQYPGSPDSWV

SEQ ID NO: 51175 - protein, 193 aa, Homo sapiens
MAAICCALHEVTSKNMENAKALADSGGIEKLVNITKGRGDRSSLKVVKAAAQVLNTLWQYRDLRSIYKKDGWNQNHFITPVSTLERDRFKSHPSLSTTNQQMSPIIQSVGSTSSSPALLGIRDPRSEYDRTQPPMQYYNSQGDATHKGLYPAQKIADATFQHQALGKRKCTYQLKCMVASDLQQPALSYRSPL

SEQ ID NO: 51176 - protein, 48 aa, Homo sapiens
MRSCEGLVDFTVVCDPHVCEHIRLRQQGGHSPDQRASLQSYRGKDVAT

SEQ ID NO: 51177 - protein, 91 aa, Homo sapiens
MSPIIQSVGSTSSSPALLGVRDPRSEYDRTQPPMQYYNSQGDATHKGLYPESCAYNLFKGYQPKGLLRFHTVPILNRLAIITTLDVPNKSV

SEQ ID NO: 51178 - protein, 46 aa, Homo sapiens [sequence omitted]

SEQ ID NO: 51179 - protein, 1009 aa, Homo sapiens
  DOMAIN (62)..(550): Armadillo/beta-catenin-like repeats domain identified by PFam, accession name Armadillo_seg, E-value=1.6e-09, PFam score of 45.1
  misc_feature (1)...(1009): Xaa = X or * as defined in Table 2
XHDISLRYSARVYLSLAPADFLHREFAWRDPELPEVIHMLQHQFPSVQANAAAYLQHLCFGDNKVKMEVCRLGGIKHLVDLLDHRVLEVQKNACGALRNLVFGKSTDENKIAMKNVGGIPALLRLLRKSIDAELPPRKHLALRPPEHPLPTALKAEMVVFRAQLDLRVLWNLSSCDAVKMTIIRDALSTLTNTVIVPHSGWNNSSFDDDHKIKFQTSLVLRNTTGCLRIGMIIPPQSCEGSAGTCGRCLAQCHRMSTQNLSSAGEEARKQMRSCEGLVDSLLYVIHTCVNTSDYDSKHEPLTLSLLCPSTGHSAHHLSAVTTIQDPPGGRGKWKEQERGTESVRTSKAGQLLGVRMDWTRRGHWKVLDCKGEPERKKDEECLGEERGMQGNSQFLSLIEPGDLQMKLRGCSVQKCFALMCRVVFNYTPCWVSDGGELRVHPEEPVYRLELEVPQARLLGLNELDDLLGKESPSKDSEPSCWGKKKKKKKRTPQEDQWDGVGPIPGLSKSPKGVEMLWHPSVVKPYLTLLAESSNPATLEGSAGSLQNLSAGNWKFAAYIPGGPSEKKRGSPSLWSFMALDVRNKELIGKYAMRDLVNRLPGGNGPSVLSDETMAAICCALHEVTSKNMENAKALADSGGIEKLERLLESPVLELSFLPHTQKVLKLLLCSRAAVWPQDVPQAWMAHFPLLLHDTSLIKQEGRTRESVVKIEGCLSWSCSSDYKFALVSDQRNEIRKVLDQIKLSPSSTHLTSFTSTYCLPAVCQTLFSMLGLQQQTGRMTAPPEVAYVPWVRSSLKVVKAAAQVLNTLWQYRDLRSIYKKDGWNQNHFITPVSTLERDRFKSHPSLSTTNQQMSPIIQSVGSTSSSPALLGIRDPRSEYDRTQPPMQYYNSQGDATHKGLYPGSSKPSPIYISSYSSPAREQNRRLQHQQLYYSQDDSNRKNFDAYRLYLQSPHSYEDPYFDDRVHFPASTDYSTQYGLKSTTNYVDFYSTKRPSYRAEQYPGSPDSWV

SEQ ID NO: 51180 - protein, 785 aa, Homo sapiens
MEPETTATTILASVKEQELQFQRLTRELEVERADCCSCQLERSMLVAESPSIASTCSTEKAFPCRSTDVPNTVHIPPPHYLLHGQPLPVLTETRLPNSYTADLGQSPPGRPPIPTDQPLNTKPPPRVGSPLTLTDAQTRVASPSQGQVGSSSPKRSGMTAVPQHLGPSLQRTVHDMEQFGQQQYDIYERMVPPRPDSLTGLRSSYASQHSQLGQDLRSAVSPDLHITPIYEGRTYYSPVYRSPNHGTVELQGSQTALYRTGSVGIGNLQRTSSQRSTLTYQRNNYALNTTATYAEPYRPIQYRVQECNYNRLQHAVPADDGTTRSPSIDSIHKDPRGVCLGVILSCLRSFHMLSAPVSHLFQGKCRRPYLAGTCVFGWTTKLKEKSLPAKTLSQSCWGKKKKKKKRTPQEDQWDGVGPIPGLSKSPKGVEMLWHPSVVKPYLTLLAESSNPATLEGSAGSLQNLSASNWKFAAYIRGGRPKRKGLPILVELLRMDNDRVVSSGATALRNMALDVRNKELIGKYAMRDLVNRLPGGNGPSVLSDETMAAICCALHEVTSKNMENAKALADSGGIEKLVNITKGRGDRSSLKVVKAAAQVLNTLWQYRDLRSIYKKDGWNQNHFITPVSTLERDRFKSHPSLSTTNQQMSPIIQSVGSTSSSPALLGIRDPRSEYDRTQPPMQYYNSQGDATHKGLYPGSSKPSPIYISSYSSPAREQNRRLQHQQLYYSQDDSNRKNFDAYRLYLQSPHSYEDPYFDDRVHFPASTDYSTQYGLKSTTKLCRLLFH

SEQ ID NO: 51181 - protein, 85 aa, Homo sapiens
MLAPAGTTMIPIHPGGPPSRPAPQEQQGSLLPLNLLCPDRRRHPGLRILASSIPEVTHQPKCHSPTEGPCTNAPASPCLSLPICK

SEQ ID NO: 51182 - protein, 362 aa, Homo sapiens
MLARELPAAVAPAGPASLARWTLGFCDERLVPFDHAESTYGLYRVRATGAAGDHAERATATAYTPATEAAGGHAERAAPTVCTSATGATGYHAKRAVPTACTSATEFSGIPGQLCRSDGSASRLFIFGFEPQDSIESEERALLKTGLPIPESQVITINPELPVEEAAEDYAKKLRQVSPEERPQGSHIHEAATPRATERPSDCHQQELPQGSLADPFEESPLRGHSPALGSLKATRPLLPRLSSPHAQAFQGDSIPVFDLLILGTTPSYRSGRRLWLPSVTPRSQPPQRVTLTLPVLNAARTVIFVATGEGKAAVLKRILEDQEENPLPAALVQPHTGKLCWFLDEAAARLLTVPFEKHSTL

SEQ ID NO: 51183 - protein, 321 aa, Homo sapiens
MAAPAPGLISVFSSSQELGAALAQLAGPARSMLPGRGPRPLGARPPASYPPPSPLPGQAKLKRAGRWASATKRLVPFESRREHVRPLTGRIFSPDCRSPESLGDHLYPRGWPVEEAAEDYAKEAETGIPRGLHPGFRPADPGGGPPMGTTCSLFPDHPLLQEREKIVAPISDSPKATATACDPHTTCPECSTNCHLCGNWRRQGSCSEAHFGGPRRKTRCPAALVQPHTGKLCWFLDRGGRPPPDRALREAFHFLAGQRDAAAGTKEPRGASGRGPPAGRHVSGTLLSKSHVVLLLEAQQPPASSPTRGSTHRLWLWTSGY

SEQ ID NO: 51184 - protein, 50 aa, Homo sapiens
  DOMAIN (3)..(31): 303 kw ACTIVATING RAN GTPASE ISOZYME domain identified by eMATRIX, accession number DM01269A, p-value=1.600e-20, raw score of 23.35
  DOMAIN (1)..(50): RanBP1 domain identified by PFam, accession name Ran_BP1, E- value=1.5e-06, PFam score of 0.8
  misc_feature (1)...(50): Xaa = X or * as defined in Table 2
NGKERGTGDVKLLKHKEKGAIRLLMRRDKTLKICANHYITPMMELKPNAX

SEQ ID NO: 51185 - protein, 67 aa, Homo sapiens
MNLHQMPLLPCSQLHEGHPILLLCPLAWRPHCPFLPLASEDPGSPLVEQGVLSFCSIDFFGIVKLIN

SEQ ID NO: 51186 - protein, 54 aa, Homo sapiens
MEGARHLVTVKLLKHKEKGAIRLLMPEGTKTLERSVANPLPSRRMMGVEAPNAS

SEQ ID NO: 51187 - protein, 89 aa, Homo sapiens
MARDAKYTSESCKGAQGFTAGWTAKSATSLWPSPSGQESTKESENALLAPSSCSGFGRQEQISAQRSWPDLVAVESALSNIFIWNLSPR

SEQ ID NO: 51188 - protein, 62 aa, Homo sapiens
DSEVYLASLEKKLRRIKGLNQEVTSKDMLRTLAQAKKECWDRFLQEKLASEFFVDGLDSDES

SEQ ID NO: 51189 - protein, 171 aa, Homo sapiens
DLWAEICSCLPNPEQEDGANNAFSDSFVDSCPEGEGQREVADFAVQPAVKPWAPLQDSEVYLASLEKKLRRIKGLNQEVTSKDMLRTLAQAKEGMLGIGSSTRKLAFRVSLWDGLDSDESTLEHFKRWLQPDKVAVSTEEVQYLIPPESQVEKPVAEDEPAAGDKPAAAEQ

SEQ ID NO: 51190 - protein, 140 aa, Homo sapiens
MRLLGGGACARRRGGGALGPRVGAGAVLRPPRASWPWAEWDWVSRLFAVAATRLPSAKIHRTRQSGLGITCPRHLHDRKLGEEIKAMMMNAAFLVYFQSHNKPESRNSWVIIGLLPSRKTVEHWCLKESETDPQCLPHMP

SEQ ID NO: 51191 - protein, 80 aa, Homo sapiens
MGFPITGKQRRPKKLFFFGMITCSTSLLGDLPIHILDKVCTRAKFRCAIWFPQQTGVYTVSTLSECWQRFRYFDSIFAYT

SEQ ID NO: 51192 - protein, 39 aa, Homo sapiens
MNLASRGAETRVPAQPRNLWPQEVGSVRAGAGVTAVWDG

SEQ ID NO: 51193 - protein, 101 aa, Homo sapiens
  misc_feature (1)...(101): Xaa = X or * as defined in Table 2
MAHQTGIHXXXXXXXXXXXXXXXXXXXXXXXXXXXXXXXXXXXXXXXXXXXXELKEFFAKARAGSVRLIKVVIEDEQLVLGASQEPVGRWDQDYDRAVLPL

SEQ ID NO: 51194 - protein, 210 aa, Homo sapiens
MTGPCCHCWTPSSPAYLLYRLDSQNAQGLRMALPRLGRLITPPVRLKMLNTCRPVRHLPRLTSAERELQQIRINEVERQRSVLESKHQTLQGLAFPLQPEAQRALQQLKQKMVNYIQMKLDLERETIELSSIKKRMLYSSCKSRLLDSVEQDFHLEIAKKIEIGDGAELTAEFLYDEGAPQANTPFKQAFAKAKGPRGQSGPISASSAAR

SEQ ID NO: 51195 - protein, 103 aa, Homo sapiens
MAFRVHSRNGKSYTFLISSDYERAEWRENIREQQKKCFRSFSLTSVELQMLTNSCVKLQTVHSIPLTINKEDDESPGLYGFLNVIVHSATGFKQSSNLYCTLE

SEQ ID NO: 51196 - protein, 159 aa, Homo sapiens
  DOMAIN (99)..(112): VERTEBRATE METALLOTHIONEIN SIGNATURE domain identified by eMATRIX, accession number PR00860A, p-value=4.060e-09, raw score of 5.46
MSRVGAGACSTCSLCITLRAGLPPGPMHRGPGLPACRCPCGVQDVEGVSVYLVGLGPSHFPPPCVPHSPVSFHAEPPLPWAPWGGGGGRSCPRAALPMSSCSSGSSCCCSPGAADTKAGVSLQHSQGRGHSLPEDSSTAQPLCLSPGGGVETAPSASVL

SEQ ID NO: 51197 - protein, 272 aa, Homo sapiens
  DOMAIN (178)..(201): PI3 KINASE P85 REGULATORY SUBUNIT SIGNATURE domain identified by eMATRIX, accession number PR00678H, p-value=1.741e-11, raw score of 9.13
  DOMAIN (172)..(247): Src homology domain 2 domain identified by PFam, accession name SH2, E-value=9.2e-42, PFam score of 124.0
  misc_feature (1)...(272): Xaa = X or * as defined in Table 2
MAFRVHSRNGKSYTFLISSDYERAEWRENIREQQKKCFRSFSLTSVELQMLTNSCVKLQTVHSIPLTINKEEALQRPVASDFEPQGLSEAARWNSKENLLAGPSENDPNLFVALYDFVASGDNTLSITKGEKLRVLGYNHNGEWCEAQTKNGQGWVPSNYITPVNSLEKHSWYHGPVSRNAAEYLLSSGINGSFLVRESESSPGQRSISLRYEGRVYHYRINTASDGKLYVSSESRFNTLAELVHHHSTVADGLITTLHYPAPKRNKPTVYX

SEQ ID NO: 51198 - protein, 341 aa, Homo sapiens
  DOMAIN (247)..(270): PI3 KINASE P85 REGULATORY SUBUNIT SIGNATURE domain identified by eMATRIX, accession number PR00678H, p-value=1.741e-11, raw score of 9.13
  DOMAIN (241)..(316): Src homology domain 2 domain identified by PFam, accession name SH2, E-value=9.2e-42, PFam score of 124.0
  misc_feature (1)...(341): Xaa = X or * as defined in Table 2
MMEGEGKGPLLRSQSTSEQEKRLTWPRRSYSPRSFEDCGGGYTPDCSSNENLTSSEEDFSSGQSSRVSPSPTTYRMFRDKSRSPSQNSQQSFDSSSPPTPQCHKRHRHCPVVVSEATIVGVRKTGQIWPNDGEGAFHGDAEALQRPVASDFEPQGLSEAARWNSKENLLAGPSENDPNLFVALYDFVASGDNTLSITKGEKLRVLGYNHNGEWCEAQTKNGQGWVPSNYITPVNSLEKHSWYHGPVSRNAAEYLLSSGINGSFLVRESESSPGQRSISLRYEGRVYHYRINTASDGKLYVSSESRFNTLAELVHHHSTVADGLITTLHYPAPKRNKPTVYX

SEQ ID NO: 51199 - protein, 289 aa, Homo sapiens
  DOMAIN (189)..(230): PROTEIN GTPASE DOMAIN ACTIVATION domain identified by eMATRIX, accession number PD00930B, p-value=1.844e-25, raw score of 33.72
  DOMAIN (36)..(239): RhoGAP domain identified by PFam, accession name RhoGAP, E- value=7e-72, PFam score of 252.2
MQKALCAAPDLGTFVTVLTPPPGAQIGSRRERSKVPYIVRQCVEEIERRGMEEVGIYRMSGVAADIQALKAAFNVNNKDVSVMMSEMDVNAIAGTLKLYFRELPEPLFTDEFYPNFAEGIGSSLAASAVGVTMMTSLNCARTRVPGAPCDHLGRGLRLVVTQRSDPLPPAALSDPVAKKSCMLNLLSSLPEANLLTFLFLLDHLERMAEKEAVNKMSLHNLGTVFGPTLLRPSEKESKLPANPSQPITMTDSWSLEVMSQVEVLLYFLRLEAIPALDSKGQSILFFTDV

SEQ ID NO: 51200 - protein, 363 aa, Homo sapiens
  DOMAIN (269)..(292): PI3 KINASE P85 REGULATORY SUBUNIT SIGNATURE domain identified by eMATRIX, accession number PR00678H, p-value=1.741e-11, raw score of 9.13
  DOMAIN (263)..(338): Src homology domain 2 domain identified by PFam, accession name SH2, E-value=9.2e-42, PFam score of 124.0
  misc_feature (1)...(363): Xaa = X or * as defined in Table 2
MVDELEAVPNIPLVPDEELNALKIKISQIKSDIQREKRANKGSKATERLKKKLSEQESLLLLMSPSMAFRVHSRNGKSYTFLISSDYERAEWRENIREQQKKCFRSFSLASVELQMLTNSCVKLQTVHSIPLTINKEDDESPGLYGFLNVIVHSATGFKQSSKALQRPVASDFEPQGLSEAARWNSKENLLAGPSENDPNLFVALYDFVASGDNTLSITKGEKLRVLGYNHNGEWCEAQTKNGQGWVPSNYITPVNSLEKHSWYHGPVSRNAAEYLLSSGINGSFLVRESESSPGQRSISLRYEGRVYHYRINTASDGKLYVSSESRFNTLAELVHHHSTVADGLITTLHYPAPKRNKPTVYX

SEQ ID NO: 51201 - protein, 119 aa, Homo sapiens
  DOMAIN (8)..(34): PROTEIN GTPASE DOMAIN ACTIVATION domain identified by eMATRIX, accession number PD00930A, p-value=8.650e-22, raw score of 25.62
  DOMAIN (8)..(119): RhoGAP domain identified by PFam, accession name RhoGAP, E- value=0.0012, PFam score of -5.3
  misc_feature (1)...(119): Xaa = X or * as defined in Table 2
XRERSKVPYIVRQCVEEIERRGMEEVGIYRVSGRCGRRHPGTEGSLQRSSECRPAQDGMEDLQGGRCISVLFPDNKDVSVMMSEMDVNAIAGTLKLYFRELPEPLFTDEFYPNFAEGIX

SEQ ID NO: 51202 - protein, 1212 aa, Homo sapiens
  DOMAIN (1112)..(1153): PROTEIN GTPASE DOMAIN ACTIVATION domain identified by eMATRIX, accession number PD00930B, p-value=2.241e-27, raw score of 33.72
  DOMAIN (502)..(690): RhoGEF domain identified by PFam, accession name RhoGEF, E- value=6.1e-85, PFam score of 295.6
MVDPVGFAEAWKAQFPDSEPPRMELRSVGDIEQELERCKASIRRLEQEVNQERFRMIYLQTLLAKEKKSYDRQRWGFRRAAQAPDGASEPRASASRPQPAPADGADPPPAEEPEARPDGEGSPGKARPGTARRPGAAASGERDDRGPPASVAALRSNFERIRKGHGQPGADAEKPFYVNVEFHHERGLVKVNDKEVSDRISSLGSQAMQMERKKSQHGAGSSVGDASRPPYRGRSSESSCGVDGDYEDAELNPRFLKDNLIDANGGSRPPWPPLEYQPYQSIYVGGIMEGEGKGPLLRSQSTSEQEKRLTWPRRSYSPRSFEDCGGGYTPDCSSNENLTSSEEDFSSGQSSRVSPSPTTYRMFRDKSRSPSQNSQQSFDSSSPPTPQCHKRHRHCPVVVSEATIVGVRKTGQIWPNDDEGAFHGDADGSFGTPPGYGCAADRAEEQRRHQDGLPYIDDSPSSSPHLSSKGRGSRDALVSGALKSTKASELDLEKGLEMRKWVLSGILASEETYLSHLEALLLPMKPLKAAATTSQPVLTSQQIETIFFKVPELYEIHKESYDGLFPRVQQWSHQQRVGDLFQKLASQLGVYRAFVDNYGVAMEMAEKCCQANAQFAEISENLRARSNKDAKDPTTKNSLETLLYKPVDRVTRSTLVLHDLLKHTPASHPDHPLLQDALRISQNFLSSINEEITPRRQSMTVKKGEHRQLLKDSFMVELVEGARKLRHVFLFTDLLLCTKLKKQSGGKTQQYDCKWYIPLTDLSFQMVDELEAVPNIPLVPDEELDALKIKISQIKSDIQREKRANKGSKATERLEEEACRSRTATARVYTFLISSDYERAEWRENIREQQKKCFRSFSLTSVELQMLTNSCVKLQTVHSIPLTINKEDDESPGLYGFLNVIVHSATGFKQSSNLYCTLEVDSFGYFVNKAKTRVYRDTAEPNWNELDPQALQDRDWQRTVIAMNGIEVKLSVKFNSREFSLKRMPSRKQTGVFGVKIAVVTKRERSKVPYIVRQCVEEIERRGMEEVGIYRVSGVATDIQALKAAFDVNNKDVSVMMSEMDVNAIAGTLKLYFRELPEPLFTDEFYPNFAEGIALSDPVAKESCMLNLLLSLPEANLLTFLFLLDHLKRVAEKEAVNKMSLHNLATVFGPTLLRPSEKESKLPANPSQPITMTDSWSLEVMSQVQVLLYFLQLEAIPAPDSKRQSILFSTEV

SEQ ID NO: 51203 - protein, 983 aa, Homo sapiens
  DOMAIN (962)..(979): GTPase-activator protein for Rho-like GTPases domain identified by eMATRIX, accession number PF00620B, p-value=8.800e- 16, raw score of 14.20
  DOMAIN (502)..(690): RhoGEF domain identified by PFam, accession name RhoGEF, E- value=7.2e-88, PFam score of 305.3
MVDPVGFAEAWKAQFPDSEPPRMELRSVGDIEQELERCKASIRRLEQEVNQERFRMIYLQTLLAKEKKSYDRQRWGFRRAAQAPDGASEPRASASRPQPAPADGADPPPAEEPEARPDGEGSPGKARPGTARRPGAAASGERDDRGPPASVAALRSNFERIRKGHGQPGADAEKPFYVNVEFHHERGLVKVNDKEVSDRISSLGSQAMQMERKKSQHGAGSSVGDASRPPYRGRSSESSCGVDGDYEDAELNPRFLKDNLIDANGGSRPPWPPLEYQPYQSIYVGGMMEGEGKGPLLRSQSTSEQEKRLTWPRRSYSPRSFEDCGGGYTPDCSSNENLTSSEEDFSSGQSSRVSPSPTTYRMFRDKSRSPSQNSQQSFDSSSPPTPQCHKRHRHCPVVVSEATIVGVRKTGQIWPNDGEGAFHGDADGSFGTPPGYGCAADRAEEQRRHQDGLPYIDDSPSSSPHLSSKGRGSRDALVSGALESTKASELDLEKGLEMRKWVLSGILASEETYLSHLEALLLPMKPLKAAATTSQPVLTSQQIETIFFKVPELYEIHKEFYDGLFPRVQQWSHQQRVGDLFQKLASQLGVYRAFVDNYGVAMEMAEKCCQANAQFAEISENLRARSNKDAKDPTTKNSLETLLYKPVDRVTRSTLVLHDLLKHTPASHPDHPLLQDALRISQNFLSSINEEITPRRQSMTVKKGEHRQLLKDSFMVELVEGARKLRHVFLFTELLLCTKLKKQSGGKTQQYDCKCFQMVDELEAVPNIPLVPDEELDALKIKISQIKSDIQREKRANKGSKATERLKKKLSEQEVHSRNGKSYTFLISSDYERAEWRENIREQQKKCFRSFSLDIRGAADAMGKGQVSVKINSREINLEEDASPDNDRGLRSQDCCGHQEREVQGCPTSVRQCVEEIEPPKALEGGWASTACPAGVATDIQALKAAFDVNNKDVSVMMSEMDVNAIAGTLKLYFRELPEPLFT

SEQ ID NO: 51204 - protein, 40 aa, Homo sapiens
  DOMAIN (14)..(25): Kunitz/Bovine pancreatic trypsin inhibito domain identified by PFam, accession name Kunitz_BPTI, E-value=0.057, PFam score of 9.8
MSIANKFLCNTSYNFKSWNHCMGFCNGLHAKVTVFIKRRR

SEQ ID NO: 51205 - protein, 146 aa, Homo sapiens
  DOMAIN (6)..(128): Adaptin N terminal region domain identified by PFam, accession name Adaptin_N, E-value=2.6e-34, PFam score of 126.6
LMTSSTNNWVLIKIIKLFGALTPLEPRLGKKLIEPLTNLIHSTSAMSLLYECVNTVIAVLISLSSGMPNHSASIQLCVQKLRILIEDSDQNLKYLGLLAMSKILKTHPKSVQSHKDLILQCLDDKDRSPDVSRLSSVVCTVPKPEC

SEQ ID NO: 51206 - protein, 75 aa, Homo sapiens
MSFQNLLAKICFHHHFSVVERVDSCASMYSRSIQGHHVCLLVKKGENSVSVDGKCSDSTLLSNLLEEMKATLAKC

SEQ ID NO: 51207 - protein, 156 aa, Homo sapiens
EEQRRPKHRPSEADEEELARRREARKQEQANNPFYIKSSPSPQKRYQDTPGVEHIPVVQIDLSVPLKVPGLPMSDHYVKLEEERRHRQKLEKDKRRKKRKEKEKKGKRRHSSLPTESDEDIAPAQQVDIVTEEMPENALPSDEDDKDPTTPTGSGI

SEQ ID NO: 51208 - protein, 44 aa, Homo sapiens
MLSLRLWNWCHGGEQYGVSFPSLRLFRNTETPRPQNPLRRTFPW

SEQ ID NO: 51209 - protein, 330 aa, Homo sapiens
MFQCVDRSPSADPVPPRMGHTVLTHSSVDSHLGRFPFVVTQYAALNICAVRVDVCVPSRMCTWAWGCCVKCGVLTGLPCMAPWSVGTVPRAALALAANQRRPQPPLGLVWPELVPKSPKPKKKKHRKEKEERTKGKKKSKKQPPGSEEAAGEPVQNGAPEEEQLPVRASMRERTEQIREEAEPGGGRGLALARSPTLGTPVVGCVVLGAGDPSSAPLKPLAPSILGVVAFDLGYWAILESSLRRSSGPPRLMRLFYFQPESSYSLLAENSYVKMTCDIRGSLQEDSQVTVAIVLENRSSSILKGMELSVLDSLNARMARPQGSSVHDGVP

SEQ ID NO: 51210 - protein, 213 aa, Homo sapiens
  DOMAIN (9)..(213): Adaptin N terminal region domain identified by PFam, accession name Adaptin_N, E-value=1.7e-61, PFam score of 217.7
MLTTNQIHLARDLANDIMTLMSHTKPYIRKKAVLIMYKVFLKYPESLRPAFPRLKEKLEDPDPGVQSAAVNVICELARRNPKNYLSLAPLFFKLMTSSTNNWVLIKIIKLFGALTPLEPRLGKKLIEPLTNLIHSTSAMSLLYECVNTVIAVLISLSSGMPNHSASIQLCVQKLRILIEDSDQNLKYLGLLAMSKILKTHPKSVQSHKDLILH

SEQ ID NO: 51211 - protein, 904 aa, Homo sapiens
  DOMAIN (32)..(462): Adaptin N terminal region domain identified by PFam, accession name Adaptin_N, E-value=5.8e-78, PFam score of 272.4
MAFKMVKGSIDRMFDKNLQDLVRGIRNHKEDEAKYISQCIDEIKQELKQDNIAVKANAVCKLTYLQMLGYDISWAAFNIIESFHEGTDVIMLTTNQIRKDLSSPSQYDTGVALTGLSCFVTPDLARDLANDIMTLMSHTKPYIRKKAVLIEPLTNLIHSTSAMSLLYECVNTVIAVLISLSSGMPNHSASIQLCVQKLRILIEDSDQNLKYLGAAGQCPRSWKDPPQVRGSSHKGPSSCSAWDDKDESIRLRALGPCFYGDGVPRKEPGWEIVEGRLMDPRRQGRGVPPTGDELLTKIIDICSQSNYQYITNFEWAHGTGNLIAAQMLDVAIRVKAIRKMSALLDSAHLLASSTQRNGICEVLYAAAWICGEFSEHLQEPHHTLEAMLRPRVTTLPGHIQARNVVKLYASILASKKEQAGEAEGAQAVTQLMVDRLPQFVQSADLEVQERASCILQLVKHIQKLQAKDVPVAEEVSALFCWGAEPSGPPRPQKKVSSPERAGTWTAGTMSHSGTASQRTRGPWPSSTRREQRRPKHRPSEADEKELARRREAGKQEQANNPFYIKSSPSPQKRYQDTPGVEHIPVVQIDLSVPLKVSRAAYVRSYVKLEEERRHPAEAGEGQEEEKEEGEGEEGQAPPQLACPRRATRTSPPPPRVDIVTEEMPENALPSDEDDKDPNDPYRALDIDLDKPLADSEKLPIQKHRNTETVKIPVKKGQFPWRTARSLVAIVLENRSSSILKGMELSVLDSLNARMARPQGSSVHDGVPVPFQLPPGVSNEAQYVFTIQSIVMAQKLKGTLSFIAKNDEGATHEKLDFRLHFSCSFLLDHHSFATVTLLLSCWESGDLSMSSIQSRWAFRDVPFQNLLGEDLFSPPFFRCGASGLLRLHVQPLHPGPPCLPPGDRR

SEQ ID NO: 51212 - protein, 86 aa, Homo sapiens
MMMGLQDAERGQMGITRVQVIGFTHKSARGALTTLLSHGMSCRRRAKRHHISKMLEAFFSESRGHNTSYLLLPYARPSQDQALQGG

SEQ ID NO: 51213 - protein, 26 aa, Homo sapiens
MRISTINGNSFPAIKEHPLHPFSRSS

SEQ ID NO: 51214 - protein, 159 aa, Homo sapiens
MAPAPASAPAPASAPAPAPVPTPAMVSAPSSTVNASASVKTSAGTTDPEEATRLLAERRRPLFKDFSSGVFGFGFVLSFSRQKREELAQRVAEERTTRREEESRRLEAEQAREKEDGHPLGDPGSPPVCQRQTPTFCFQKEEEARVREEACFYLFHFHL

SEQ ID NO: 51215 - protein, 291 aa, Homo sapiens
  DOMAIN (134)..(169): Troponin domain identified by eMATRIX, accession number PF00992A, p-value=5.183e-10, raw score of 16.67
MAPAPASAPAPASAPAPAPVPTPAMVSAPSSTVNASASVKTSAGTTDPEEATRLLAEKRRLAREQREKEERERREQEELERQKREELAQRVAEERTTRREEESRRLEAEQAREKEEQLQRQAEERALREWEEAERAQRQKEEEARVREEAERVRQEREKHFQREEQERLERKKKTSDQRNGDIAKGALTGGTEVSALPCTTNAPGNGKPVGSPHVVTSHQSKVTVESTPDLEKQPNENGVSVQNENFEEIINLPIGSKPSRLDVTNSESPEIPLNPILAFDDEGTLGPLPQ

SEQ ID NO: 51216 - protein, 501 aa, Homo sapiens
  DOMAIN (44)..(97): Clathrin light chain proteins domain identified by eMATRIX, accession number BL00224B, p-value=6.712e-10, raw score of 16.94
  misc_feature (1)...(501): Xaa = X or * as defined in Table 2
XNKPDPPPVLRVDDRQRLARERREEREKQLAAREIVWLEREERARQHYEKHLEERKKRLEEQRQKEERRRAAVEEKRRQRLEEDKERHEAVVRRTMERSQKPKQMHNRWSWGGSLHGSPSIHSAGGFVESSFSSLDLAGLDHHFITFGGTRKADPDRRSVSTMNLSKYVDPVISKRLSSSSATLLNSPDREPGPVKAQRMEAIARRLQLSPWESSVVNRLLTPTHSFLARSKSTAALSGEAASCSPIIMPYKAAHSRNSMDRPKLFVTPPEGSSRRRIIHGTASYKKERERENVLFLTSGTRRAVSPSNPKARQPARSRLWLPSKSLPHLPGTPRPTSSLPPGSVKAAPAQVRPPSPGNIRPVKREVKVEPEKKDPEKEPQKVANEPSLKGRAPLVKVEEATVEERTPAEPEVGPAGTALVEGAGPSAGAGPRAPPLQMRLPMSTLAKAFANKPVQKGSTFTPAALMRALILSSLTVTSPSCRMRAEPYAECRRAQKQRPX

SEQ ID NO: 51217 - protein, 612 aa, Homo sapiens
  DOMAIN (572)..(607): Matrix protein (MA) p15. domain identified by eMATRIX, accession number PF01140D, p-value=5.725e-10, raw score of 15.54
MAELGAGGDGHRGGDGAVRSETAPDSYKVQDKKNASSRPASAISGQNNNHSGNKPDPPPVLRVDDRQRLARERREEREKQLAAREIVWLEREERARQHYEKHLEERKKRLEEQRQKEERRRAAVEEKRRQRLEEDKERHEAVVRRTMERSQKPKQKHNRWSWGGSLHGSPSIHSADPDRRSVSTMNLSKYVDPVISKRLSSSSATLLNSPDRARRLQLSPWESSVVNRLLTPTHSFLARSKSTAALSGEAVIPICPRSASCSPIIMPYKAAHSRNSMDRPKLFVTPPEGSSRRRIIHGTASYKKERERENVLFLTSGTRRAVSPSNPKARQPARSRLWLPSKSLPHLPGTPRPTSSLPPGSVKAAPAQVRPPSPGNIRPVKREVKVEPEKKDPEKEPQKVANEPSLKGRAPLVKVEEATVEERTPAEPEVGPAAPAMAPAPASAPAPASAPAPAPVPTPAMVSAPSSTVNASASVKTSAGTTDPEEATRLLAEKRRLAREQREKEERERREQEELERQKREELAQRVAEERTTRREEESRRLEAEQAREKEEQLQRQAEERALREREEAERAQRQKEEEARVREEAERVRQERREAFRREKSKSALERKKRP

SEQ ID NO: 51218 - protein, 41 aa, Homo sapiens
  DOMAIN (1)..(26): Class I Histocompatibility antigen, domains domain identified by PFam, accession name MHC_I, E-value=0.061, PFam score of 11.2
MSLNEDLQTWTAAQRVAWRIHHTWERPRDWTEVYCICRSPD

SEQ ID NO: 51219 - protein, 228 aa, Homo sapiens
  misc_feature (1)...(228): Xaa = X or * as defined in Table 2
XKPSESVEDELHKVGDLQDPSWTPRYPEKPDPVSRNPLPVPLWALTLGRTGLAAGLRLHHVGPEFLRGAFVGDTRFLSFHSRGENQSVKRGWRRWHRAVGALRKVLEDRRECVTEGPEVPGPAPPPGSAGCDLQDKTQLHPQETIPLLYQLAACVMQYGVEPGDLMVVCPLPDSVRYKAPDPLFKPFAVAYESVHVLTSGHFCLHKVGKSEPHLPIGRTLFSTVSAHS

SEQ ID NO: 51220 - protein, 306 aa, Homo sapiens
MRSYYSRTSVLLDDSVFYLLCLQVLMKQKGPCGKELKSASGHQPVDIPLSLYQCECQVLLLSPSLSSHTIQEAPLGSGRQRGGSVGKHTPSAYGSLQPHDSPVGTVANAIDFSPVSVPGEEREAGQSPQEEVTHREPVVGVMKPALPNTYPDPRSMPAGGALFCPLQPMLQEVLTWGLEDPSTCRQHHLLAMLQVSEQPPSAVTHRGFPCGLRGPEPLPGVMDPPSRSLSRCPGGLKVSFEEAPVRSHHPARQQHLQVRYSGPADPGGGAGPGTSGPSVTHSLRSSRIFLRAPTALCHLLHPRFTL

SEQ ID NO: 51221 - protein, 77 aa, Homo sapiens
MGKALQLLSHVGHRGRCPEDGEPDAARVPVAPPAEAGVSLLPPLTIIIQKFQTQDHMKFWKNLPLHSHHLRLRYHKL

SEQ ID NO: 51222 - protein, 143 aa, Homo sapiens
GSWETQFSNHLNSLTPANIRQEDAFDNNSDIAEDGGQTPYEATFAARLSVPSYNRRSSSTHKWGIHHQSVCMKLKPNTSHIISILMGQPMALVQLETLAPLTYYHSEIPNTRPHEILEKPSLSSATTSSLGTANCDSKEDWLS

SEQ ID NO: 51223 - protein, 63 aa, Homo sapiens
  misc_feature (1)...(63): Xaa = X or * as defined in Table 2
XKFIRVQNEGTGKSSWWMLNPEGGKSGKSPRRRAASMDNNSKFAKSRSRAAKKKASLQSGQEX

SEQ ID NO: 51224 - protein, 837 aa, Homo sapiens
  DOMAIN (34)..(85): 'Paired box' domain proteins domain identified by eMATRIX, accession number BL00034A, p-value=1.000e-40, raw score of 11.69
  DOMAIN (34)..(159): 'Paired box' domain identified by PFam, accession name PAX, E -value=1.2e-91, PFam score of 317.8
MTTLAGAVPRMMRPGPGQNYPRSGFPLEVSTPLGQGRVNQLGGVFINGRPLPNHIRHKIVEMAHHGIRPCVISRQLRVSHGCVSKILCRYQETGSIRPGAIGGSKPKQVTTPDVEKKIEEYKRENPGMFSWEIRDKLLKDAVCDRNTVPSVSSISRILRSKFGKGEEEEADLERKEAEESEKKAKHSIDGILSERASAPQSDEGSDIDSEPDLPLKRKQRRSRTTFTAEQLEELEHVAFERTHYPDIYTREELAQRAKLTEARVQVWFSNRRARWRKQAGANQLMAFNHLIPGGFPPTAMPTLPTYQLSEHSYQPTSIPQAVSDPSSTVHRPQPLPPSTVHQSTIPSNPDSSSAYCLPSTRHGFSSYTDSFVPPSGPSNPMNPTIGNGLSPQNSIRHNLSLHSKFIRVQNEGTGKSSWWMLNPEGGKSGKSPRRRAASMDNNSKFAKSRSRAAKKKASLQSGQEGAGDSPGSQFSKWPASPGSHSNDDFDNWSTFRPRTSSNASTISGRLSPIMTEQDDLGEGDVHSMVYPPSAAKMASTLPSLSEISNPENMENLLDNLNLLSSPTSLTVSTQSSPGTMMQQTPCYSFAPPNTSLNSPSPNYQKYTYGQSSMSPLPQMPIQTLQDNKSSYGGMSQYNCAPGLLKELLTSDSPPHNDIMTPVDPGVAQPNSRVLGQNVMMGPNSVMSTYGSQASHNKMMNPSSHTHPGHAQQTSAVNGRPLPHTVSTMPHTSGMNRLTQVKTPVQVPLPHPMQMSALGGYSSVSSCNGYGRMGLLHQEKLPSDLDGMFIERLDCDMESIIRNDLMDGDTLDFNFDNVLPNQSFPHSVKTTTHSWVSG

SEQ ID NO: 51225 - protein, 159 aa, Homo sapiens
  DOMAIN (133)..(147): FORK HEAD DOMAIN SIGNATURE domain identified by eMATRIX, accession number PR00053A, p-value=2.636e-12, raw score of 8.86
  DOMAIN (70)..(159): Fork head domain identified by PFam, accession name Fork_head, E-value=1.2e-06, PFam score of 30.4
  misc_feature (1)...(159): Xaa = X or * as defined in Table 2
XRSLASPTRPPPARRRRAARLPIPDAAAGLPSASAAAVSADFMSNLSLLEESEDFPQAPGQPWRRRWRRRPPRPPPGGCAGTSRARRRAACTQRHRSSPPPGPLSQHPPVPPAAAGPLAGQPRKSSSSRRNAWGNLSYADLITKAIESSAEKRLTLSQI

SEQ ID NO: 51226 - protein, 17 aa, Homo sapiens
MLKESEKWNMMVHFFKQ

SEQ ID NO: 51227 - protein, 828 aa, Homo sapiens
  DOMAIN (119)..(140): Myc-type 'helix-loop-helix' dimerization domain proteins. domain identified by eMATRIX, accession number BL00038B, p-value= 4.649e-10, raw score of 16.97
  DOMAIN (304)..(347): PAC motif domain identified by PFam, accession name PAC, E- value=1.6e-10, PFam score of 42.5
MSKGGKVVEGEIKEVDSVRIELKDTQLVSAAELIAHLVVERTPPLPIGLQKLSSVLLIAVIIWKEERFGVETIRYFIHRMISSERRKEKSRDAARSRRSKESEVFYELAHQLPLPHNVSSHLDKASVMRLTISYLRVRKLLDAGDLDIEDDMKAQMNCFYLKALDGFVMVLTDDGDMIYISDNVNKYMGLTQVLHCTGHIHVYDTNSNQPQCGYKKPPMTCLVLICEPIPHPSNIEIPLDSKTFLSRHSLDMKFSYCDERITELMGYEPEELLGRSIYEYYHALDSDHLTKTHHDMFTKGQVTTGQYRMLAKRGGYVWVETQATVIYNTKNSQPQCIVCVNYVVSGIIQHDLIFSLQQTECVLKPVESSDMKMTQLFTKVESEDTSSLFDKLKKEPDALTLLAPAAGDTIISLDFGSNDTETDDQQLEEVPLYNDVMLPSPNEKLQNINLAMSPLPTAETPKPLRSSADPALNQEVALKLEPNPESLELSFTMPQIQDQTPSPSDGSTRQSSPEPNSPSEYCFYVDSDMVNEFKLELVEKLFAEDTEAKNPFSTQDTDLDLEMLAPYIPMDDDFQLRSFDQLSPLESSSASPESASPQSTVTVFQQTQIQEPTANATTTTATTDELKTVTKDRMEDIKILIASPSPTHIHKETTSATSSPYRDTQSRTASPNRAGKGVIEQTEKSHPRSPNVLSVALSQRTTVPEEELNPKILALQNAQRKRKMEHDGSLFQAVGIGTLLQQPDDHAATTSLSWKRVKGCKSSEQNGMEQKTIILIPSDLACRLLGQSMDESGLPQLTSYDCEVNAPIQGSRNLLQGEELLRALDQVN

SEQ ID NO: 51228 - protein, 63 aa, Homo sapiens
MSPLPTAETPKPLRSSADPALNQEVALKLEPNPESLELSFTMPQIQDQTPSPSDGSTRQSSPE

SEQ ID NO: 51229 - protein, 56 aa, Homo sapiens
  misc_feature (1)...(56): Xaa = X or * as defined in Table 2
MSEXQLLISAFFFPSHCKIFFLTALFFIHRYCTAQATFTYMIPTVTNLSVGIRNHL

SEQ ID NO: 51230 - protein, 373 aa, Homo sapiens
  DOMAIN (158)..(176): NUCLEAR TRANSLOCATOR SIGNATURE domain identified by eMATRIX, accession number PR00785I, p-value=6.716e-09, raw score of 13.44
  DOMAIN (219)..(262): PAC motif domain identified by PFam, accession name PAC, E- value=1.6e-10, PFam score of 42.5
MKAQMNCFYLKALDGFVMVLTDDGDMIYISDNVNKYMGLTQFELTGHSVFDFTHPCDHEEMREMLTHRNGLVKKGKEQNTQRSFFLRMKCTLTSRGRTMNIKSATWKVLHCTGHIHVYDTNSNQPQCGYKKPPMTCLVLICEPIPHPSNIEIPLDSKTFLSRHSLDMKFSYCDERITELMGYEPEELLGRSIYEYYHALDSDHLTKTHHDMFTKGQVTTGQYRMLAKRGGYVWVETQATVIYNTKNSQPQCIVCVNYVVSGIIQHDLIFSLQQTECVLKPVESSDMKMTQLFTKVESEDTSSLFDKLKKEPDALTLLAPAAGDTIISLDFGSNDTETDDQQLEEVPLYNDVMLPSPNEKLQKYKFGNVSITHR

SEQ ID NO: 51231 - protein, 120 aa, Homo sapiens
  DOMAIN (11)..(20): Zinc finger C3HC4 type (RING finger), proteins. domain identified by eMATRIX, accession number BL00518, p-value=4.000e-11, raw score of 12.23
  DOMAIN (3)..(34): Zinc finger, C3HC4 type (RING finger) domain identified by PFam, accession name zf-C3HC4, E-value=0.00091, PFam score of 16.4
  misc_feature (1)...(120): Xaa = X or * as defined in Table 2
XVYEKPVQVPCGHVFCSACLQECLKPKKPVCGVCRSALAPGVRAVELERQIEKHRRLLAMAARKEFLPCPKIPVPRWLLVPNTKNYIIGRLLRPPIKGCISSSQGNVSKPVTPFLGPLLS

SEQ ID NO: 51232 - protein, 62 aa, Homo sapiens
MRLTVLCAVCLLPGSLALPLPQEAGGMRNTLGLMLLRLGQVSEEMLTFDEDERWTDGQQSRD

SEQ ID NO: 51233 - protein, 1040 aa, Homo sapiens
  misc_feature (1)...(1040): Xaa = X or * as defined in Table 2
MSNANKQKKKTGVMLPRVVLTPLKVNGAHVESASGFSGCHADGESGSPSSSSSGSLALGSAAIRGQAEVTQDPAPLLRGFRKPATGQMKRNRGEEIDFETPGSILVNTNLRALINSRTFHALPSHFQQQLLFLLPEVDRQVGTDGLLRLSSSALNNEFFTHAAQSWRERLADGEFTHEMQVRIRQEMEKEKKVEQWKEKFFEDYYGQKLGLTKEESLQQNVGQEEAEIKSGLCVPGESVRIQRGPATRQRDGHFKKRSRPDLRTRARRNLYKKQESEQAGVAKDAKSVASDVPLYKDGEAKTDPAGLSSPHLPGTSSAAPDLEGPEFPVESVASRIQAEPDNLARASASPDRIPSLPQETVDQEPKDQKRKSFEQAASASFPEKKPRLEDRQSFRNTIESVHTEKPQPTKEEPKVPPIRIQLSRIKPPWVVKGQPTYQICPRIIPTTESSCRGWTGARTLADIKARALQVRGARGHHCHREAATTAIGGGGGPGGGGGGATDEGGGRGSSSGDGGEACGHPEPRGGPSTPGKCTSDLQRTQLLPPYPLNGEHTQAGTAMSRARREDLPSLRKEESCLLQRATVGLTDGLGDASQLPVAPTGDQPCQALPLLSSQTSVAERLVEQPQLHPDVRTECESGTTSWESDDEEQGPTVPADNGPILSLVGDDTLEKGTGQALDSHPTMKDPVNVTPSSTPESSPTDCLQNRAFDDELGLGGSCPPMRESDTRQENLKTKALVSNSSLHWIPIPSNDEVVKQPKPESREHIPSVEPQVGEEWEKAAPTPPALPGDLTAEEGLDPLDSLTSLWTVPSRGGSDSNGSYCQQVDIEKLKINGDSEALSPHGESTDTASDFEGHLTEDSSEADTREAAVTKGSSVDKDEKPNWNQSAPLSKVNGDMRLVTRTDGMVAPQSWVSRVCAVRQKIPDSLLLASTEYQPRAVCLSMPGSSVEATNPLVMQLLQGSLPLEKVLPPAHDDSMKLEEMDSKEQFSSFSCEDQKEVRAMSQDSNSNAAPGKSPGDLTTSRTPRFSSPNVISFGPEQTX

SEQ ID NO: 51234 - protein, 133 aa, Homo sapiens
  DOMAIN (59)..(90): Protein kinases ATP-binding region proteins domain identified by eMATRIX, accession number BL00107A, p-value=2.421e-18, raw score of 18.39
  DOMAIN (3)..(132): Eukaryotic protein kinase domain identified by PFam, accession name pkinase, E-value=2.6e-39, PFam score of 144.0
  misc_feature (1)...(133): Xaa = X or * as defined in Table 2
XDYQLVRKLGRGKYSEVFEAINITNNERVVVKILKQLYQILTDFDIRFYMYELLKALDYCHSKGIMHRDVKPHNVMIDHQQKKLRLIDWGLAEFYHPAQEYNVRVASRYFKGPELLVDYQMYDYSLDMWSLGX

SEQ ID NO: 51235 - protein, 98 aa, Homo sapiens
MREVVVRILKPVKKKKIKREVKILENLRGGTNIIKLIDTVKDPVIKTPALDNYDQLVRIAKVLGTEELYGYLKKYHIDLDPHFNDILGQHSRKRLGKL

SEQ ID NO: 51236 - protein, 99 aa, Homo sapiens
VDKKELTGRTLLSVPGYKEKVEFGVLVSFAYKLGQRHGLEAISIMDSRGALINVPPPFLGLPRFEARKAVLVALKERGLFRGIEDNPMVVPLCNRSKDV

SEQ ID NO: 51237 - protein, 854 aa, Homo sapiens
  DOMAIN (397)..(416): VALYL-TRNA SYNTHETASE SIGNATURE domain identified by eMATRIX, accession number PR00986E, p-value=3.250e-21, raw score of 13.83
  DOMAIN (1)..(599): tRNA synthetases class I (I, L, M and V) domain identified by PFam, accession name tRNA-synt_1, E-value=2e-97, PFam score of 337.1
  misc_feature (1)...(854): Xaa = X or * as defined in Table 2
MPPNRHRMRGETTLWNPGCDHAGIATQVVVEKKLWREQGLSRHQLGREAFLQEVWKWKEEKGDRIYHQLKKLGSSLDWDRACFTMDPKLSAAVTEAFVGLHEKGIIYRSTAFVNWPCTLNSAISDIEVDKKELTGRTLLSVPGYKEKVEFGVLVSFAYKVQGSDXDDEEVVVANKLGSKTMLGDVAVAVPPPKDTRYQHLKGKNVIHPFLSRSLSPLSSDEFVDMDFGTGAVKDHPPRHDQNDYEVGQRHGLEAISIMDSRGAPIKCASAFPGPAAGLRPGKRCWWRXRNRGLFRGIEDNPMVVPLCNRSKDVVEPLLRPQWYVRCGEMAQAASAAVTRGDLRILPEAHQRTWHAWMDNIREWCISRQLWWGHRIPAYFVTVSDPAVPPGESEDLSVFYPGTLLETGHDILFFWVARMVMLGLKLTGRLPFREVYLPCPSCENAHGRKMSKSLGNVIDPLDVHLYGISLQGLHNQLLNSNLDPSEVEKAKEGQKADFPAGVPECGTDALRFGLCAYMSQGSXKXTWNVNRIMGXRQFCNKLWKCTKFALRGLGKGFVPSDTSNSAGHESLADRXIRNLLTEAVRLSNQGFQAYDFPAVTTAQYSFWLYELCDVYLECLKPVLNGVDQVAQAECARQTLYTLPWTLGLRLLSPFMPFVTEELFQRLPRRMPQAPPSLCVTPYPEPSECSWKDPEAEAALELALSITRAVRSLRADYNLTRIRPDCFLEVADEATGALASAVSGYVQALASAGVVAVLALGAPAPQGCAVALASDRCSIHLQLQGLVDPARELGKLQGKRVEAQRKAQRLLETRSASGNPVKVPLEDQEADEAKLQQTEAELRKVDEAIALFQKML

SEQ ID NO: 51238 - protein, 1350 aa, Homo sapiens
  DOMAIN (209)..(252): Elongation factor 1 gamma chain profile domain identified by eMATRIX, accession number BL50040C, p-value=2.143e-16, raw score of 22.62
  DOMAIN (382)..(1094): tRNA synthetases class I (I, L, M and V) domain identified by PFam, accession name tRNA-synt_1, E-value=7.8e-173, PFam score of 587.6
  misc_feature (1)...(1350): Xaa = X or * as defined in Table 2
SQRGEHVGAGCRGGDLRELGSPGEPPTVSARSTPPPGPLGGSQPRPAPGCEVDSPAQSDHLPPVFPLRSDLLITMSTLYVSPHPDAFPSLRALIAARYGEAGEGPGWGGAHPRICLQPPPTSRTSFPPPRLPALEQGPGGLWVWGATAVAQLLWPAGLGGPGGSRAAVLVQQWVSYADTELIPAACGATLPALGLRSSAQDPQAVLGALGRALSPLEEWLRLHTYLAGEAPTLADLAAVTALLLPFRYVLDPPARRIWNNVTRWFVTCVRQPEFRAVLGEVVLYSGARPLSHQPGPEAPALPKTAAQLKKEAKKREKLEKFQQKQKIQQQQPPPGEKKPKPEKREKRDPGVITYDLPTPPGEKKDVSGPMPDSYSPRYVEAAWYPWWEQQGFFKPEYGRPNVSAANPRGVFMMCIPPPNVTGSLHLGHALTNAIQDSLTRWHRMRGETTLWNPGCDHAGIATQVVVEKKLWRDEGLSRHQLGRDVYXQEVWKWKEEKGDRIYHQLKKLGSSLDWDRACFTMDPKLSAAVTEAFVRLHEEGIIYRSTRLVNWSCTLNSAISDIEVDKKELTGRTLLSVPGYKEKVEFGVLVSFAYKVQGSDSDEEVVVATTRIETMLGDVAVAVHPKDTRYQHLKGKNVIHPFLSRSLPIVFDEFVDMDFGTGAGKITPAHDQNDYEVGQRHGLEAISIMDSRGGPHQCASAFPGPAQVLRPGKRCLVALKERGLFRGIEDNPMVVPLCNRSKDVVEPLLRPQWYVRCGEMAQAASAAVTRGDLRILPERHQRTWHAWMDNIREWCMFPGKLWWGHRIPAYFVTVSDPAVPPGEDPDGRYWVSGRNEAEAREKAAKEFGVSPDKISLQQDEDVLDTWFSSGLCPLIQFWAWPNQSEDLSVFYPWDTCLETGHDILVIWVARMVMLGLKLTGRLHFREVYLHAIVRDAPGRKMKQVFXGNVIDSPGTFIYGISLQGLHNQLLNSNLGIPARLEKAKEGQKADFPAGIPECGTDALRFGLCAYMSQGRDINLDVNRILGYRHFCNKLWNATKFALRGLGKGFVPSPTSQPGGHESLVDRWIRSRLTEAVRLSNQGFQAYDFPAVTTAQYSFWLYELGNVYLKCLKPVLNGVDQVAAECARQTLYTCLDVGLRLLSPFIPFVTEELFQRLPRRMPQAPPSLCVTPYPEPSECSWKDPEAESRPLIWRXAFTRAVRPLRADYNLHPESGPTCFLEVADEATGALESAVSGYVQGPGQAQVVVVCCXALGAPRPPRGCAVALASDRCSIHLQLQGLVDPGRELGKLQAKRVEAQRQAQRLRERRAASGNPVKVPLEVQEADEAKLQQTEAELRKVDEAIALFQKML

SEQ ID NO: 51239 - protein, 251 aa, Homo sapiens
  misc_feature (1)...(251): Xaa = X or * as defined in Table 2
MDMGAIKEGESRRPGDRMTVAGTKLLHLQSTHLDFISLSGAPSGALELSKAQPAHAQDTRVLMKMVIIWDLSQVPLQPGHDGHSFRIHDYLYFQVLSPGDIRYIFTATPAKDFGGIFHTRYEQIHLVPAEPPEACGELSNGFFIQDQIALVERGGCSFLSKTRVVQEHGGRGGDHLXQRSXQMTASTWQMIQDSTQRTADIPALFLLGRDGYMIRRSLEQHGLPWAIISIPVNVHQHSPPLSCCNRPFLFW

SEQ ID NO: 51240 - protein, 130 aa, Homo sapiens; identical to SEQ ID NO: 50677

SEQ ID NO: 51241 - protein, 253 aa, Homo sapiens; identical to SEQ ID NO: 50678

SEQ ID NO: 51242 - protein, 300 aa, Homo sapiens; identical to SEQ ID NO: 50679
  DOMAIN (212)..(255): 1 kw MIND INHIBITOR DIVISION CONTROL domain identified by eMATRIX, accession number DM01756B, p-value=4.822e-15, raw score of 22.91
  DOMAIN (177)..(290): ParA family ATPase domain identified by PFam, accession name ParA, E-value=1e-15, PFam score of 65.7

SEQ ID NO: 51243 - protein, 721 aa, Homo sapiens; identical to SEQ ID NO: 50680
  DOMAIN (358)..(379): GLUTELIN SIGNATURE domain identified by eMATRIX, accession number PR00211B, p-value=4.721e-10, raw score of 0.86

SEQ ID NO: 51244 - protein, 630 aa, Homo sapiens; identical to SEQ ID NO: 50681
  DOMAIN (160)..(192): ABC transporters family proteins domain identified by eMATRIX, accession number BL00211B, p-value=8.714e-27, raw score of 13.37
  DOMAIN (42)..(234): ABC transporter domain identified by PFam, accession name ABC_tran, E-value=1.8e-26, PFam score of 101.4

SEQ ID NO: 51245 - protein, 960 aa, Homo sapiens; identical to SEQ ID NO: 50682
  DOMAIN (50)..(67): WILM'S TUMOUR PROTEIN SIGNATURE domain identified by eMATRIX, accession number PR00049B, p-value=5.800e-09, raw score of 14.50
  DOMAIN (835)..(960): Similarity to lectin domain of ricin domain identified by PFam, accession name Ricin_B_lectin, E-value=2.9e-09, PFam score of 44.2

SEQ ID NO: 51246 - protein, 594 aa, Homo sapiens; identical to SEQ ID NO: 50683
  misc_feature (1)...(594): Xaa = X or * as defined in Table 2

SEQ ID NO: 51247 - protein, 90 aa, Homo sapiens
RRPRQRPTDQTQWFSILPDFSLDLQEGPSVESQTHSDPHIPPVDPTTHLTFNHLSIVCVSLTLSLPHLGSPCLWSPALVSQEAASHQDRR

SEQ ID NO: 51248 - protein, 327 aa, Homo sapiens
  misc_feature (1)...(327): Xaa = X or * as defined in Table 2
RHQRAPEQGPDASWKMLDSLLALGGLVLLRDSVEWEGRSLLKALVKKSALCGEQVHILGCEVSEKEFREGFDSXXSTIRLVYHDFFRDPLNWSKTEEGLVPGGPLGALRSMCKRTDPVPVTIALDSLSWLLLRLHCTTLCQALHAVEPSRTLVLGDSSSVGKVSVLGLLHERLPRPAPVVALSSLAQTKVTLGGYHGARPSAHILCRRPRQRPNYQTQWFSILPDFSLGSPRGALCRVPALIPIPHITPGGIPHNSFXPFNLHLSKKEREARDSLILPFQFSSEKQQALLRPRPGQATSHIFYEPDAYDDLDQEDPDDDLNILPGQI

SEQ ID NO: 51249 - protein, 295 aa, Homo sapiens
  misc_feature (1)...(295): Xaa = X or * as defined in Table 2
GLVMEIGMHHHEHHHLQAPNKEDILKISEDERMELSKSFRVYCIILVKPKDVSLWAAVKETWTKHCDKAEFFSSENVKVFESINMDTNDMWLMMRKAYKYAFDKYRDQYNWFFLARPTTFAIIENLKYFLLKKDPSQPFYLGHTIKSGDLEYVGMEGGIVLSVESMKRLNSLLNIPEKCPEQGGMIWKISEDKQLAVCLKYAGVFAENAEDADGKDVFNSQICWAFYXRWQXLITPNQVVEGCCSDMAVTFNGLTPNQMHVMMYGVYRLRAFGPYFSMMHWFSYLQMVLTMTEKW

SEQ ID NO: 51250 - protein, 364 aa, Homo sapiens
  DOMAIN (29)..(177): Proteasome activator pa28 beta subunit domain identified by PFam, accession name PA28_beta, E-value=2.1e-83, PFam score of 290.5
MAKPCGVRLSGEARKQMETDKQEKKEVHKCGFLPGNEKVLSLLALVKPEVWTLKEKCILVITWIQHLIPKIEDGNDFGVAIQEKVLERVNAVKTKVEAFQTTISKYFSERGDAVAKASKETHVMDYRALVHERDEAAYGELRAMVLDLRAFYASLAMGEVEISALAYVKMCLHAARYPHAAVNGLFLAPAPRSGECLCLTDCVPLFHSHLALSVMLEVALNQVDVWGAQAGLVVAGYYHANAAVNDQSPGPLALKIAGRIAEFFPDAVLIMLDNQKLVPQPRVPPVIVLENQGLRWVPKDKNLVMWRDWEESRQMVGALLEDRAHQHLVDFDCHLDDIRQDWTNQRLNTQITQWVGPTNGNGNA

SEQ ID NO: 51251 - protein, 89 aa, Homo sapiens
  DOMAIN (1)..(89): Proteasome activator pa28 beta subunit domain identified by PFam, accession name PA28_beta, E-value=1.4e-08, PFam score of 11.8
  misc_feature (1)...(89): Xaa = X or * as defined in Table 2
EGVHSQVNLFPIKGNQTHVPASHGTDSALPPTLQMDYRALVHEPDXAAYGELRAMVLDLRAFYAELYHIISSNLEKIVNPKGEEKPFMY

SEQ ID NO: 51252 - protein, 261 aa, Homo sapiens
  DOMAIN (102)..(261): Proteasome activator pa28 beta subunit domain identified by PFam, accession name PA28_beta, E-value=1e-22, PFam score of 88.9
  misc_feature (1)...(261): Xaa = X or * as defined in Table 2
SSMAKPCGVRLSGKGRKQVEVFYRNLFQEAEEFLLRFLPPESHIPXNRLLQEDFPFNVAXLLNLSSGAPLDIPPSPDPPPKDDEMETDKQEKKEVPKCDFLPGNEKCPCPCLPLVKPRSLDLSKEKCILVITWGSRHLDPPRFEDGKXFWGXAIPGEGAWRGXNAVKDPKWEAFPATPISQVLSSERGDACGPRPPQETHVMDYRALVHERDEAAYGELRAMVLDLRAFYAELYHIISSNLEKIVTPRGEEKPIYVLEPGD

SEQ ID NO: 51253 - protein, 106 aa, Homo sapiens
  misc_feature (1)...(106): Xaa = X or * as defined in Table 2
AKRSRIHVGVVIVDSDGAELGRDAAALSEKPPSLTIGLHMELVGMGGEPALTATPANCPEYPAKPSSIEQQXQSQVQXXQXQVRHGSGPLHRTPRQLFLCSRQFAL

SEQ ID NO: 51254 - protein, 72 aa, Homo sapiens
  misc_feature (1)...(72): Xaa = X or * as defined in Table 2
SPEESPPACPRQVFPLYHLQRGQGKRVQVGXGGSLWITTKTRLLPGGVGDNEVAPGSWHLALVFRLLSSGRP

SEQ ID NO: 51255 - protein, 1213 aa, Homo sapiens
  DOMAIN (450)..(485): Troponin domain identified by eMATRIX, accession number PF00992A, p-value=1.000e-09, raw score of 16.67
  misc_feature (1)...(1213): Xaa = X or * as defined in Table 2
MSEETLQSKLAAAKKKIQDILNVLVSDLNRSNGVVLPTLDKWKDAPEAWDLCLALRSICGLAIQLLGAAPLTRAANFSVAEVTDVRDSARRWETRKAPYLSCRIALRMNEAAVFRHLVPGVYFPRCDQGCQLTAALGCGAGVQSHVGPVTVTTGPDSVTAADAAGLCRVLRAVGWGGSECRLTPHPYKFHVEPYGGRLVPPRLSVDPGSSRREATSKVAVDLLVLDAAGADGPVSQSPVWKEAAGVVSQLRGGRQDLFHSGNWDRADVAPTPPPFPPCHVGRNPTSKLAAAKKKLRDYQWRNSPGVPTGVKKKIKNCSNPETTTSGGCHSPGDVMEACRQIQLERDTFAEILKGERATWQQRMNQMSEQMHTLREEKECIMNRLQELETSLVELRKQMTELPALAPPARPSEVEQQLQEEAEHLREELESLAGQLQAQVQDNEGLSCLNREQEERLLELERAAELWRKQTGRRVGEKEGRGGEEEEDEVXGGEGEGEEEEEEEEKEKEEEASRPMKSILQDLESQESMVAFLTSAVASADGEQARLRGQLKEQRLRCRCLAHLLAWAQKQPEAAAPAPGTGMDSVCGGTHRALQGAMEKLQSCFMQLMQEKVDLKERVEELEHRCIQLSGETDTIDLCQVTLTSSVEPAQGEAGEGSPLDNPSAQQIMQLFGEMQNPQERPGLGSIPCILFSHQADKNHQCCCVLGSLLSEGEESPSPELIHIYQKFDFKAFSFQAPSHVVTATFPYTTMLSIWVAACHIHSALDTYIKPRAGAAMAGPSPLLPNLVTGHGGSTPFLEEGEPATRLSDRGTDMMSDTSSGSLEVSPGSRETSFATVSPGESGRGWEDGDTCSECSCRESGASGSSFEELDLEDSPSTKDLLKLLRHMLNCDVGLWSSPTTLKECSSGIHKVNHPMIADCFHHQFPGVPICGILSHQYCFPRCDQGFQLTAALGCGAGVQSHFGPVTTGPHRWPDSVTAPDTAGLCRVLRAVGWGGSECRLTPHPYKFHVEPYEVRTQRQAEGAGVGLLAVNVTRDEEDLLGGAPGPQNERGVCAEPTLQRRSDPVDKKLLANPTTQLIHFNCPDTSHPTSSISWMKNYKRFHKKHHIRTSRVLSSLAILHTWLLVNQTVVLGGEVKLRCEVCRDLAFGGEQQQAFGYIFCHSGPEGGGGGGLKRYPFSDAGLGTVQSGTQLERKGRLPGCGGVFVSRCSRSMV

SEQ ID NO: 51256 - protein, 269 aa, Homo sapiens
  DOMAIN (204)..(258): Proliferating cell nuclear antigen proteins domain identified by eMATRIX, accession number BL01251D, p-value=4.000e-35, raw score of 23.72
  DOMAIN (10)..(266): Proliferating cell nuclear antigen domain identified by PFam, accession name PCNA, E-value=1.8e-147, PFam score of 503.3
  misc_feature (1)...(269): Xaa = X or * as defined in Table 2
KPRCCHSATMFEVPLVQGSILKKVLEALKDLINEACWDISSSGVNLQSMDSSHVSLLQFTLPSEGFDTYRCDCNLAMGVNLTIMSKILKCAGNEDIVTLRIEDNVNTLVLVFEASNQEKVSDYEIKLMDLDVEQLGIAEQEYHYVVKMLSGEFASICXDLSHIGDAVVISGVKDGIIFSASGDLGNKNKLSQTSTVDKEEEAVTMEMNEPVQLTFALRYLNFLTKATPLSSMVTLNMSADIHLVVDYKIADVGHLKYYLAPKMEDEEGP

SEQ ID NO: 51257 - protein, 131 aa, Homo sapiens
  DOMAIN (1)..(37): Proliferating cell nuclear antigen proteins domain identified by eMATRIX, accession number BL01251A, p-value=4.240e-31, raw score of 17.37
  DOMAIN (1)..(131): Proliferating cell nuclear antigen domain identified by PFam, accession name PCNA, E-value=5.4e-10, PFam score of 46.6
MFEARLVQGSILKKVLEALKDLINEACWDISSSGVNLQSMDSSHVSLVQLTLRSEGFDTYRCDRNLAMGAPAMEFPYTLGPEYNPDTLALVFEAPNQGEVSDYEMKVMDLDVDKPGIPGTEVQRFSKDALL

SEQ ID NO: 51258 - protein, 73 aa, Homo sapiens
NNQKLSRLIVSFSLFHFRSTGGPSGRSGHRMVAWKRQLILFGGFHESTRLVPRTEKSFSSEALRSGLFIERAF

SEQ ID NO: 51259 - protein, 130 aa, Homo sapiens
  DOMAIN (59)..(86): Protamine P1 proteins domain identified by eMATRIX, accession number BL00048, p-value=3.779e-12, raw score of 6.39
  misc_feature (1)...(130): Xaa = X or * as defined in Table 2
RAQPHLYPEAARTRGRKXLHFCAPSSAPRAPVSERRCAGRFLSWCPVAAWDPARWARRARRRRRAAARRRRPPRWRRRCLSARGRRRSLNSSKTKNTKCLNSINQRLKILSLQKDLMCGTAGRCKTLTEQ

SEQ ID NO: 51260 - protein, 570 aa, Homo sapiens
MCPKSVNIHETQSVPKACVNIHEALSVPEVCVSIHEAQSMPEVCVTTPATTVAWPKSVSISRQGESEKLRAQRNLRRRQDETASGTLDGIPGQDELRSTGAVNEVWATLPVTGQCRFLIRHKGAKERKMPLLSTKRGQPRGHPALVVYACCDCVLVTRTNQSLHWPRQCQHYEYPGQTSSKPRSPPIQDESDGRLWGHSLSTPVMCGSVLRRLRKAAHHAHPHNAHGDTESRRLRLEKEAEDPMRLTAALLSLVFRGPCLGVTSGPVPSLCSLKAVPRLVSLTSPQTPFPDPVQILALLTGTWPGLATDYSINGTALGTRIQAVDCGTGPVPALFRQISGAPTGCHTLRMGRRVPHSPGPQGPGGDSTGEKPRKYIDVSLQQGPTQGPALCQALSLRVKKDVDKGTRHSDMFLLKPEDGREDKWVWTRMNPSGVKPTPRSGFSVAMAPNHQTLFFGGVCDEEEEESLSGEFFNDLYFYDATRNRWFEGQLKGPALSVYLISAISHQSSQAVDAADSCQADRPQGGSEPPALRYGDQAVKGLARRHWKRPEPFAVGLESSPAASQPVGLRS

SEQ ID NO: 51261 - protein, 130 aa, Homo sapiens
FKSVQFLMSGLFPMLRTLTAAVLLTRDYIYYNDVYAFNLDTFTWSKLSPSGTGPTPRSGCQMSVTPQGGIVVYGGYSKQRVKKDVDKGTRHSDMFLLKPEDGREDKWVWTRMNPSGVKPTPRSGFSVAMA

SEQ ID NO: 51262 - protein, 462 aa, Homo sapiens
MDAPLPRLRTASLLSMFHSTSSPGIHWGKAKTSVHRKTWTESWQQLFKFTTSHAGDTPDALQGTDEHFGNDETEGMENSSEAARAAVSSSVKQVGPWNAGSIKKGISERRKQFCGQKQVCSAVISASVTPVRGPRARCRRRSSKTEPRKGPSRTSTRKRLELGAGSDSISVRRAPPHEHLFPSGERGPFSFLVSRRGLGPGKMGKKGKKEKKGRGAEKTAAKMEKKVSKRSRKEEPGVCRRIRPDLGVECSAAAAHGFPNRGQFYGLPCARHSSLGFTPHEQSPNDDEVQPRSKTALSSSSKAFAEDLEALIAHFQTLDAKRTQTVELPCPPPSPRKCRGSQFVVTEDSVRKGTALRLNASLSVHPEKDELILFGGEYFNGQKTFLYNELYVYNTRKDTWTKVDIPSPPPRRCAHQAVVVPQGGGQLWVFGGEFASPNGEQFYHYKDLWVLHLATKTWEQVK

SEQ ID NO: 51263 - protein, 923 aa, Homo sapiens
  DOMAIN (163)..(216): Myelin P0 protein domain identified by eMATRIX, accession number BL00568C, p-value=9.079e-09, raw score of 12.78
SFSEANISTAKKTFLYNELYVYNTRKDTWTKVDIPSPPPRRCAHQAVVVPQGGGQLWVFGGEFASPNGEQFYHYKDLWVLHLATKTWEQVKSTGGPSGRSGHRMVAWKRQLILFGGFHESTRDYIYYNDVYAFNLDTFTWSKLSPSGTVPTPRSGCQMSVTPQGGIVVYGGYSKQMPPHSGQSRGRKPGSCLLLLLLLLLLLLLLLLCVLPLGYSLIELSSSYRLHGNEPVPATFHGLNSHMGLVATILDNVNPEHSISAESFIGQAALVWSTLELDVVKGKFFRETLMSTVLPKPECYKNHLEGSWLASANLSLVAAGTSSPGTKPGCAEARSIHGADQQMVVQDAPSYVNISRSGSSGKLWPLHQSCVPSSLVLHHSGAVRRQVVRVRMCFMQAVVVPQGGGQLWVFGGEFASPNGEQFYHYKDLWVLHLATKTWEQVKPGMLTSQMKSLLWVGRVQTDSLPWAHLLEEDMTIALQWDPEGAVVWGFAGSVTRIVGICSKGIGMHCGYLVTLGVALAPLLGRQLRMAAPTSCAAPAASHTAGSVVRGTSVAAALGLDCLINRHLIPRMLANERKTVFLADTPPSPVPAVCVCGSASSGYFIKAESKHVASVTGSSFRVVLSGRVLLLRVSALHSRGQMRCCVAVKVHGQCIHLCMHRSTWEMIGTVWLDEDIDVCSSLCCGVPHPGEGGGRRPERREGFPKTRVKEVKKQNATTVKVQSGIRHNLASYRPLQGVAPKHCKIKPGNWARPCSRVPSPSYELRNLIPSLQTYRGRTWLISPFPQEAEAPSANWPLAKETCRAMPPGDCNKEELVCGDSVFPEPHSGRDLSHVLVEGHQVTSGHAWLRRAEWSLVPVRRGQSGGQSPREQHLHVALTGLETTHCPPQQPGPNFPLQFTSCYARRTVLSRQKSLPGDKILNAATN

SEQ ID NO: 51264 - protein, 967 aa, Homo sapiens
  DOMAIN (872)..(902): RIBOSOMAL PROTEIN L20 SIGNATURE domain identified by eMATRIX, accession number PR00062B, p-value=8.929e-09, raw score of 16.66
  misc_feature (1)...(967): Xaa = X or * as defined in Table 2
VRGPRARCRRRSSKTEPRKGPSRTSTRKRLELGAGSDSISVRRAPPHEHLFPSGERGPFSFLVSRRGLGPGKMGKKGKKEKKGRGAEKTAAKMEKKVSKRSRKEEPGVCRRIRPDLGVECSAAAAHGFPNRGQFYGLPCARHSSLGFTPHEQEDLEALIAHFQTLDAKRTQTVEVPCPPPSPRKCRGSQFVVTEDSVRKGTALRLNASLSVHPEKDELILFGGEYFNGQKTFLYNELYVYNIRKDTWTKVDIPSPPPRRCAHQAVVVPQVGGQLWVFGGEFGLSQRRAVLPLQGSLGPAFGHQDLGTSQPGMVTSQMKSLLWVGRVQTDSLPWAQPLEEDMTIALQWDPEGAVVWGFAGSVTRIVGICSKGIGMHCGYLVTLGVALAPLLGRQLRMAAPTSCAAPAASHTAGSVVRGTSVAAALGLDCLINRHLIPRMLANEKKTVFLADTPPSPVPAVCVCGSASSGYFIKAESKHVASVTGSSFRVVLSGRVLLLRVSALHSRGQMRCWDYIYYNDVYAFNLDTFTWSKLSPSGTGPTPRSGCQMSVTPQGGIVVYGGYSKQRQGESEKLRAQRNLRRRQDETASGTLDGIPGQDELRSTGAVNEVWATLPVTGQCRFLIRHKGAKERKRVKKDVDKGTRHSDMFLLKPEDGREDKWVWTRMNPSGVKPTPRSGFSVAMAPNHQTLFFGGVCDEEEEESLSGEFFNDLYFYDATRNRWFEGQLEGTQVXKEETQAGQKRGARRWVAGRRVGELAPRGLCSWSRRWWPRMAPWSPLSRCSPRQARRGSPGLRTKTALRRPAAPHLGRVHAPTPCWLXSMGCSTSMGACLRPATARSPSATCTAWTCTGWRRGRPWWRWTQLRXRVCAFILLLKKLRSGWRRRDTRKRTVRRLRAPRVGSTTKTAERRAVRRTEKSPCQGRLASAVPTSAQDPAVLSEALGASVRPDAQERAEGGWPRPGCELSPMV

SEQ ID NO: 51265 - protein, 69 aa, Homo sapiens
  DOMAIN (1)..(27): 6-phosphogluconate dehydrogenases domain identified by PFam, accession name 6PGD, E-value=4.9e-16, PFam score of 66.7
DGYRHEMLPASLIQAQRDYFGAHTYELWAKPGQFIHTNWTGHGGTVSSSSYNAFALFSVQFFKSVVRDS

SEQ ID NO: 51266 - protein, 104 aa, Homo sapiens
  DOMAIN (28)..(52): 6-PHOSPHOGLUCONATE DEHYDROGENASE SIGNATURE domain identified by eMATRIX, accession number PR00076A, p-value=3.382e-24, raw score of 12.00
  DOMAIN (36)..(54): 6-phosphogluconate dehydrogenases domain identified by PFam, accession name 6PGD, E-value=1.9e-08, PFam score of 38.2
EPLRVFPSLVLRASPLLGSALSAAMAQADIALIGLAVMGQNLILNMNDHGFVVSGVGALSSLWFPGALAEAGDRFGSLRVSWPCFANVLCCCSWHFCMERRSTL

SEQ ID NO: 51267 - protein, 191 aa, Homo sapiens
  DOMAIN (134)..(163): 6-PHOSPHOGLUCONATE DEHYDROGENASE SIGNATURE domain identified by eMATRIX, accession number PR00076D, p-value=4.162e-33, raw score of 13.48
  DOMAIN (5)..(183): 6-phosphogluconate dehydrogenases domain identified by PFam, accession name 6PGD, E-value=3.5e-129, PFam score of 442.6
LIGLAVMGQNLILNMNDHGFVTVSKVDDFLANEAKGTKVVGAQSLKEMVSKLKKPRRIILLVKAGQAVDDFIEKLRRCRDLKAKGILFVGSGVSGGEEGARYGPSLMPGGNKEAWPHIKTIFQGIAAKVGTGEPCCDWVGDEGAGHFVKMVHNGIEYGDMQLICEAYHLMKDVLGMAQDEMALCPIFCSVF

SEQ ID NO: 51268 - protein, 579 aa, Homo sapiens
  DOMAIN (206)..(235): 6-PHOSPHOGLUCONATE DEHYDROGENASE SIGNATURE domain identified by eMATRIX, accession number PR00076D, p-value=4.162e-33, raw score of 13.48
  DOMAIN (49)..(480): 6-phosphogluconate dehydrogenases domain identified by PFam, accession name 6PGD, E-value=8.1e-218, PFam score of 737.0
  misc_feature (1)...(579): Xaa = X or * as defined in Table 2
AYANLGTRFWREPLRVFPSLVLRASPLFGSALSAAMAQADIALIVLFVMGHNLILNMKDHGFEVCAFNRTVSKVDDFLANEAKGTKVVGAQSLKEMVSKLNKPPRDQYLLCVKAGQAVDDFIEKLVPLLDTGDIIIDGGNSEYXGTPQDGCRDLKAKGILFEGSGVSAGEEGDRYGPSLMPGGNKEAWPHIKTIFQGIAAKVGTGEPCCDWVGDEGAGHFVKMVHNGIEYGDMQLICEAYHLMKDVLGMAQDEMAQAFEDWNKTELDSFLIEITANILKFQDTDGKHLLPKIQGTSAGARRGNRGSGTWPFSGPGKYGVPVTLIGEAVFARCLSSLKDERIQASKKLKGPQKFQFDGDXEIISWEDIRKALYASKIISYAQGFMLLRHAATEFGWTLNYGGIALMWRGGCIIRSVFLGKIKDAFDRNPELQNLLLDDFFKVQLFENCQDSWRRAVSTGVQGWAFPMPLFYRLPLSIXTGTSHEMLPAQPSSRLQRGLLSGAHTLXNSWAKPGAVLFHTNWTGHGGTVSSSSYQCLDHAAPVTLHDSTVPGHSIGLNGTAHLALCPIFCSVFFKSVVRDS

SEQ ID NO: 51269 - protein, 190 aa, Homo sapiens
  misc_feature (1)...(190): Xaa = X or * as defined in Table 2
MRWRSKSAWRAEPKSRTNSGTASNVSPSRPLECXRFLRLVSGELILALIAFICIETIMACSPCEGLYFFEFVSCSAFVVTGVLLIMFSLNLHMRIPQINWNLTDLVNTGLSAFLFFIASIVLAALNHRAGAEIAAVIFGFLATAAYAVNTFLAVQKWRVSVRQQSTNDYIRARTESRDVDSRPEIQRLDT

SEQ ID NO: 51270 - protein, 122 aa, Homo sapiens
LGSGDLPWEINPLSSCSLLREKDPPTTSGPQTTSPRNISPISNPHTRTSKRLNRSGQAFLQNLLPQELATSARNLTTRPRNACSPGFLLSRVPSVRDPTGNWTVQLTWQPLSEPLELWPKAL

SEQ ID NO: 51271 - protein, 688 aa, Homo sapiens
  DOMAIN (620)..(675): kw TRANSCRIPTASE REVERSE II ORF2 domain identified by eMATRIX, accession number DM01354Q, p-value=1.000e-40, raw score of 9.23
  DOMAIN (86)..(303): AP endonuclease family 1 domain identified by PFam, accession name AP_endonucleas1, E-value=2.9e-32, PFam score of 120.6
LRSGDLPWEINPLSSCSLLHEKDPPTTSGPQTTSPRNISPISNPRQRRHILSMDPKLRRRSWTWVGSLPLVFNHCRDASLIIHPGFRGVRPRRDVCLGPSPLATITDAELYVTLTVEGKSIPFLIDTEATHSTLPSFKGPVALASIHVQNVQIKRDKEGHYIMVKGSIQQEELTILNMYAPNTGAPRFIKQVLNDLQRDLDSHTIIMGDFNTPLSTLDRSTRQKVNKDIQDLNSALHQADLIDIYRTLHTKSTECTFFSAPHRTYSKIDHIVGSKALLSKCKRTEIIINCLSDHSAIKLELRIKKLTQNHSTTWKLNNLLLNDYWVHKEMKAEIKMFFEINENKNTTYQNLWDTFKAVCRGKFIALNAYKRKQERSKIDTLTSQLEELEKQEQTRSKASRREEITKIRAELKEIETQKTLQKINESRSWFFEKINKIDILLARLIKKKREKNQIDAIKNDKGDIATDPTEIQTTIREYYKHLCPNKLENLEEMDKFLDTYTLPRLNQEEDESLNRPITGSEIVAIINSLPTKKSPGPDGFTAKFYQRYKEELVPFLQKYKEELVPFLLKLFQSIEKEGILPNSFSEASIILIPKPGRDTTKKENFRPISLMNIDAKILNKILANQIQQHIKKLIHHDQVGFIPGMQGWFNIRKSINVIQHINRTKDKNHMIISIDAEKAFDKIQQPSC

SEQ ID NO: 51272 - protein, 60 aa, Homo sapiens
MEEKEERKRRRKRKRRREEGRDGERKRMEKQKENQDPKDPPTTSGPQTTSPRNISPISNP

SEQ ID NO: 51273 - protein, 80 aa, Homo sapiens
LGSRTFPWEINPPSSCSLLREKDPPTTSGPQTTRPRNISPISNLVSGLFLLSSPTSLTIPQPLSSFNLDDTLQSLPSLNF

SEQ ID NO: 51274 - protein, 70 aa, Homo sapiens
LGSGDLPWEINTQSSCSLLCEKDPPTTSGPQTTSPRNISPISNPDPTGNRTVQLTWQPVPEPLELWPKAL

SEQ ID NO: 51275 - protein, 100 aa, Homo sapiens
LGSGDLPWEINPLSSCSLLREKEPPTTSGPQTTRPRNISPISNPELATLAGNLATGPRNARSPGFLLSHVLSVWDPTENQTVQLTWQPLPQPLELWPKAL

SEQ ID NO: 51276 - protein, 70 aa, Homo sapiens
  misc_feature (1)...(70): Xaa = X or * as defined in Table 2
LRSGDLLWEINPLSSXSLLHEKDPPTTSSPQTTSPRNISPISNPDPTENQTVQLTWQPLPEPLELWPKAL

SEQ ID NO: 51277 - protein, 70 aa, Homo sapiens
  misc_feature (1)...(70): Xaa = X or * as defined in Table 2
LGSGDLPXEINPPSSCSLLREKDPPTTSGPQTTSPRNISPISNPDPTGNRTVQLTWQPLPQPLELWPKAL

SEQ ID NO: 51278 - protein, 32 aa, Homo sapiens
LGSGDLPWEINPLSSCSLLHEKDPPTTSGPQT

SEQ ID NO: 51279 - protein, 225 aa, Homo sapiens
  misc_feature (1)...(225): Xaa = X or * as defined in Table 2
GGGFSDRDRTIALQPGQQIWMWGIGKQVGGCGWLRGKNRVVGAAKDQSGTGEKFYFIPKAMGAMEGSGQRRTLPDPGAHRNPSGGYSATDCEGSRPAPGEINSHASHTKPVWWFFTQTRMKFGAVTRIGGLPWEVNPLSSCSLLREKDPPTTSGPQSNQPRKHPPISNPELVHVPEIWPLGQGMPAARIPPKPRPICVGPHXKSTVQLTWQPLPEPLELWPRLSD

SEQ ID NO: 51280 - protein, 253 aa, Homo sapiens
LGSGDLPWEINPLSSCSLLREKDPPTTSGPPTTSPRNISPISNPGETKETRFIRGPKTPAPVTDWEGSLPLVFNHCRDASLIIHPRFKGVRPRRDACLGPSPLAASPTFLGKGQRLKTDTARLPRKPPRPSRTLSFSTAPRILSIVVPGSGHTLAFLDVTRHRLYRESKPVVGEEVDYSEWLSDVGKSEWSFSTCASSTSVNKHDTGRRLLGKRGGGMECSKGLCNFITMTKNIRSLAQMTIWQYLSPCREPV

SEQ ID NO: 51281 - protein, 145 aa, Homo sapiens
MKPSCLNLVLIPPIHSCVTLAPPLSPFTDSFRTQPTCTQVIKSFIAHTKPVWWSLHTDAHKIWCRDSDRGTSLGRSIPCPPALCSVRKIHLRPQVLGPISSRNISPISNPRQKGHVLSMNPKLRHRSRTGKAAFPWCLIIAGTPL

SEQ ID NO: 51282 - protein, 103 aa, Homo sapiens
LRSGDLPWEINPLSSCSLLHEKDPPTTSGPQTTSPRNISPISNPRQRRHILSMDPKLRRRSWTWVGSLPLVFNHCRDASLIIHPGFRGVRPRRDVCLGPSPLA

SEQ ID NO: 51283 - protein, 77 aa, Homo sapiens
PNSSWMRGEPKKDPPTTSGPQTTSPRNISPISNPGRLSDYSPRFQRCQTTQGRLPWSFTLSGKSRFSGEGATWGLKT

SEQ ID NO: 51284 - protein, 531 aa, Homo sapiens
  DOMAIN (452)..(463): RNase H domain identified by eMATRIX, accession number PF00075B, p-value=1.346e-09, raw score of 12.56
  DOMAIN (385)..(518): Reverse transcriptase domain identified by PFam, accession name rvt, E-value=4.3e-05, PFam score of 2.7
MNNDPYIPASAFGARPVKTTEAPPLSTLRPLPLPTKEQPPLTVIFHYLPKSYKTAPPLSPFADSLFGLSPPAPNEINSHVAHTKPVWWSLHTDAYEIWCRDSDRGTSLGRSIPCPPVLCSVRKIHLRPQVLRPTSPRNISPILNQTKETCFIRGPKTPVPVTDWEGSLPLVFNNCRDTSLIIHPRFKGVRPRRDACLGPSPLAASPAFLGKGQAAPRQAELGPNSSSASAPPPYNLFITSPPHTWSGLQFRSVTSPPPPAQQFTLKKVAGAKGIVKTITDAELRVTLTVEGRDSLTKLSASLTIPGLQPHLIAVLLPNPKPPSRLPLISPYLNPQVWDISTPSLATDHMPITIPLKPNHPYPTQRQYPIPQHALKGLKPVITRLLQHGLLKPINSPYHSPILPVLKPDKAYKLVQNLRLINQIVLPIHPMVPNPYTLLSSIPPSTTHYSVLDLKHAFFTIPLHPSSQPLFAFTWTDPDTHQAQQITWAVLPQAFTDSPHYFSQAQISSSSVTYLGIILIKTHVLSLLFVFD

SEQ ID NO: 51285 - protein, 683 aa, Homo sapiens
MGKFVKVERQVQDMGKKLDFLVDMHMQHMERLQVQVTEYYPTKGTSSPAEAEKKEDNRYSDLKTIICNYSETGPPEPPYSFHQVTIDKVSPYGFFAHDPVNLPRGGPSSGKVQATPPSSATTYVERPTVLPILTLLDSRVSCHSQADLQGPYSDRISPRQRRSITRDSDTPLSLMSVNHEELERSPSGFSISQDRDDYVFGPNGGSSWMREKRYLAEGETDTDTDPFTPSGSMPLSSTGDGISDSTVPLFLSSEILQKQVGQSITSMLGFLSRGPSMKLCMGLACVLSLWNTVSGIKGEAKKEKGMTFLPTTDSKKFFSLLSVTSYSSFAFHKFSVAVYNISNLKTVDPAKFPTRYCYCLNNRTNDLSDFTALLVDIIGNSTSYLTEIFKSTSILSVNQSNESDCIFICVMTGKSGRNLSDFWEIEEKYPIINYTFTSGLSGVLALLLTQSLFGGLFTRTRMKFGAVTRIGGPPLGNQSPSSCSLLHEKDPPTTSGPQTDQPKKHLTNFKSAARPTFLGQGQVPLNPFSFTLSGKSCFPRRQEPPNRLFPHPNLLSLCPNPLFLCPNPFSTFLEGKNHHPHPFSVSQVFSLGLPPSLWEHSPMAHRLRVQPRQQPPDIHKQVISLQSGHSLLVKSQSWSQDPIKFQLPHHHKNTASVCINPSVYEKEEERYGDLFMRKNQKTS

SEQ ID NO: 51286 - protein, 276 aa, Homo sapiens
MTIKACAESTDGGPARRHLTHEFRFRSLPTIKKTNASEYLGCPALYVKTTTRQARRQARRLGQRPKPDFPKFLSLLGTEIIEMQSSSSSAPCPGARFMEFDDMKENIHQSDILRYLSLDIRESEISKTGEVTNSFRNSKTSKAKVAIVGFSHRPQDNFICEQKSWSSLGIEWARHARKRPVWWSLHTDAHEIWCMTRIGGPPLGDQSPVLRSLLREKDPPTISGPQTTSPRNISPISNPIAIRYKFRFGLNRYEEVSRDYRCAVRTVQTIQIYSGS

SEQ ID NO: 51287 - protein, 54 aa, Homo sapiens
  misc_feature (1)...(54): Xaa = X or * as defined in Table 2
XDKPDKPDDKPDDSGKDPKPDFPKFLSLLGTEIIENAVEFILRSMSKEHRIYGI

SEQ ID NO: 51288 - protein, 146 aa, Homo sapiens
MEEKEERKRRRKRKRRREEGRDGERKRMEKQKENQDPTQPTCTQQFTLKKVAGAKGTVKTITDIELQVTLTVEARLRPGPQTNQPKKHLINFKSGPHWKSDCSTHLAATPRAPGTLAQGSLTDSFPDLLGLAAEDRCCPIASVEAP

SEQ ID NO: 51289 - protein, 48 aa, Homo sapiens
MFLGLVGLRTRCRRWIFLTEQRAGGRGIDLPREVPRSESRHQISCASV

SEQ ID NO: 51290 - protein, 85 aa, Homo sapiens
MTTPNKTPPGADPKQLERTGTVREIGSQAVWSLSSCKPGFGVDQLRDDNLETYWQSDGSQPHLVNIQFSNLSWWNQVAWIHVPLT

SEQ ID NO: 51291 - protein, 83 aa, Homo sapiens
MTSLSCDPCSTPLAKPAAGGAENLSFGKQPGLETNILKMTTPNKTPPGADPKQLERTGTVREIGSQAVWSLSSCNTMIRSGTH

SEQ ID NO: 51292 - protein, 151 aa, Homo sapiens
  misc_feature (1)...(151): Xaa = X or * as defined in Table 2
MQMELAGTCRDQVRIRCLGMQIVKLAEKKRIVLKESIFAVLTSVLTKDDWWNLLLKAIYSLCDLSRFQEAELLVDSSLEYYSFYDDRQKRKELEYFGLSAAFWTKIQKGIQLYQFLSRFETAFLELLCVQMQFCFHFGLFSHPVSVLKKRX

SEQ ID NO: 51293 - protein, 794 aa, Homo sapiens
  DOMAIN (95)..(106): PROTEIN REPEAT MUSCLE CALCIUM-BI domain identified by eMATRIX, accession number PD00301A, p-value=1.900e-09, raw score of 10.24
  DOMAIN (149)..(489): TPR Domain domain identified by PFam, accession name TPR, E- value=7.9e-10, PFam score of 46.1
MSGFSPELIDYLEGKISFEEFERRREERKTREKKSLQEKGKLSAEENPDDSEVPSSSGINSTKSQDKDVNEGETSDGVRKSVHKVFASMLGENEDDEEEEEEEEEVEEEEETPEQPTAGDVFVLEMVLNRETKKMMKEKRPRSKLPRALRGLMGEANIRFARGEREEAILMCMEIIRQAPLAYEPFSTLAMIYEDQGDMEKSLQFELIAAHLNPSDTEEWVRLAEMSLEQDNIKQAIFCYTKALKYEPTNVRYLWERSSLYEQMGDHKMAMDGYRRILNLLSPSDGERFMQLARDMAKSYYEANDVTSAINIIDEAFSKHQGLVSMEDVNIAAELYISNKQYDKALEIITDFSGIVLEKKTSEEGTSEENKAPENVTCTIPDGVPIDITVKLMVCLVHLNILEPLNPLLTTLVEQNPEDMGDLYLDVAEAFLDVGEYNSALPLLSALVCSERYNLAVVWLRHAECLKALGYMERAAESYGKVVDLAPLHLDARISLSTLQQQLGQPEKALEALEPMYDPDTLAQDANAAQRELEVIASSFYSVVFTRAKYSSLEYYSFYDDRQKRKELEYFGLSAAILDKNFRKAYNYIRIMVMENVNKPQLWNIFNQVTMHSQDVRHHRFCLRLMLKNPENHALCVLNGHNAFVSGSFKHALGQYVQAFRTHPDEPLYSFCIGLTFIHMASQKYVLRRHALIVQGFSFLNRYLSFTWALPGIILQFGAVAFISWGLIHLAIPLIIQEGPGELPPLVVRRGIRNLDQLDLRRSLLPTTCSLIYSEQWGITGMGSNAFVYLLVLY

SEQ ID NO: 51294 - protein, 91 aa, Homo sapiens
  DOMAIN (46)..(66): DNAJ PROTEIN FAMILY SIGNATURE domain identified by eMATRIX, accession number PR00625A, p-value=3.700e-15, raw score of 12.84
  DOMAIN (35)..(90): DnaJ domain identified by PFam, accession name DnaJ, E-value= 0.0002, PFam score of 20.4
  misc_feature (1)...(91): Xaa = X or * as defined in Table 2
XDLCENGGKRPTTNSSASFTKEQADAIRRIRNSKDSWDMLGVKPGASRDEVNKAYRKLAVLLHPDKCVAPGSEDAFKAVVNARTALLKNIK

SEQ ID NO: 51295 - protein, 268 aa, Homo sapiens; identical to SEQ ID NO: 42487

SEQ ID NO: 51296 - protein, 149 aa, Homo sapiens
MAPVEHVVADAGAFLRHAALQDIGKNIYTIREMGLHVLAVNGMLIREARELHLCAAMAVSRQRLDMNPSVLLTLWEQDPEESVRDRQRRRHPAHALLPQPQGGKYAINPHLTEDQRFPQLADSSQKGQGRKTNVFAPDYIAGVSPFVGE

SEQ ID NO: 51297 - protein, 121 aa, Homo sapiens
MVFPERLLRVMDTLLILALRAIISFLTKSRCPFRRENANADAFSNKRWPRTQECGSRAMQPQPKDLEASRFAGPQSRPPRLHFPTDKRWFPGYLPQMAAAAPDGFLTRIPRGRRLSPARHE

SEQ ID NO: 51298 - protein, 1048 aa, Homo sapiens
  DOMAIN (158)..(202): Synapsins proteins domain identified by eMATRIX, accession number BL00415N, p-value=4.153e-09, raw score of 4.29
  DOMAIN (854)..(1004): Ras family domain identified by PFam, accession name ras, E- value=0.0017, PFam score of -97.1
MAKISASRAEKVLEHPGEREKGREMASPWNHSILALAAVVVIISMVLLGRSIQASRKEKMQPPEKETPEVLHLDEAKDHNSLNNLRETLLSEKPNLAQVELELKERDVLSVFLPDVPETESYISVVNMALPPFFGQGRPGPPPPQPPPLALFGCPPPPLPSPAFPPPLPQRPGPFPGASAPFLQPPLALQPRASAQASRGGGGAGAFYPVPPPPLPPPPPQCRPFPGTDAGERPRPPPPGPGPPWSPRWPEAPPPPADVLGDAALQRLRDRQWLEAVFGTPRRAGCPVPQRTHAGPSLGEVRARLLRALRLVRRLRGLSQALREAEADGAAWVLLYSQTAPLRAELAERLQPLTQAAYVGEARRRLERVRRRRLRLRERAREREAEREAEAARAVEREQEIDRWRVKCVQEVEEKKRFFCEILTDELVLWEPSGRPQPQQLQILTAMSTSTFYDKELKTARENKEEELIDKLEVVTMPSPSPKGLPVKQYAVQSQLPVYEWPDVGSGEYDVGVVASFGRLLNEALILKFPYSALGGSGSPAPLTRLASPAAPQDGQVDLEGRALRPAARAGFSKHRGHGDALDGHAGLRPELHAPLTVVADGLFSKFRKSLVSNKVSVSSHFVGFLMKHDFSLERTALFWVEAAGQGPSPYQCGDPGTASAPPAWLLLVSPEHGLAPAPTTIRDPEAGHQERPEEEGEDEAEASSGSEEEPAPSSLQPGSPASPGPGRRLCSLDVLRGVRLELAGARRRLSEGKLVSRPRALLHGLRGHRALSLCPSPAQSPRSASPPGPAPQHPAAPASPPRPSTAGAIPPLRSHKPTVAIYITTKRLPYFPIVNFLFLIAQLPKLQYNKNVALTVKFLTKRFISEYDPNLGMVCRKPTDPVDWPPLVLGLLTLMKQFHSRYTEQFLALIGQFICSTVEQCTRQVTKAEGVALAGRFGCLFFEVSACLDFEHVQHVFHEAVREARRELEKSPLTPPLFISEERALPHQAPLTARHGLASCTFNTLSTINLKEMPTVAQAKLVTVKSSRAQSKRKAPTLTLLKGFKIF

SEQ ID NO: 51299 - protein, 861 aa, Homo sapiens
  DOMAIN (107)..(150): 1 kw MIND INHIBITOR DIVISION CONTROL domain identified by eMATRIX, accession number DM01756B, p-value=9.349e-12, raw score of 22.91
  DOMAIN (69)..(188): ParA family ATPase domain identified by PFam, accession name ParA, E-value=1.7e-10, PFam score of 48.3
MPEKAGRLPHPDMEIPGRVEQRVGCTIEQINHMRDVFGTRLLRAEDVFPPVIGVAAHKGGVYKTSISVHLAHDLALNGLRVLLVEGKLTTDPHLMLRLDIETVAHDYDVIVVDSAPNLCIGTINVACAADVLIVPTPADLFDYTCALHLFDMLRDLLKNGIAKKSFYWARKTSHSFVVNILAQALYELFSATDAEGASPHGHQCSRPAVSTAWLLLVFTQGSRALQSAGGECCQTWVSPFSTMGSPLTQDGSKNAVQVAKLTHAISIFTEGILMMKTTLVGIIKVDPKQLLEDGIRKELVKRVAFALHRGLIFNPRAKPSELMPKLKELGATMDGFHRSFEYIQDYVNIYGLKIWQEEVSRIINYNVEQECNNFLRTKIQDWQSMYQSTHIPIPKFTPVDESVTFIGRLCREILRITDPNPYSSHGGPALVNSYSDPLGQGSLTPALQTDTGLSLVRNLTAQQEELHAPLTVVADGLFSKFRKSLVSNKVSVSSHFVGFLMKNAPQFKANHAELILANPSPVLIYQISSSETRVLVDIRGEMPRNLREYMVEKIYPQIPATYAFRVEFSPSTLNVIIAEGASPHGHQCSRPAVSTAWLLLVFTQGSRALQSAGGECCQTWVSPFSTMGSPLTQDGSKNAVQGCSKIKSSLPLFIGVLLLGDAYNMRHPLTGGGMTVAFKDIKLWRKLLKGIPDLYDDAAIFEAKKSFYWARKTSHSFVVNILAQALYELFSATDEHIRPSKEPCSSPAKYRHLASTVTVTSEGHSAILLSQLLQDDGKQAATLTGRPPYFGSPGINVSSEPVVSSSLKVLIISLSPMRSYPSKRPEFLKQLLKMSLEIMSRAAKGKVKVILKMIQPKVNLS

SEQ ID NO: 51300 - protein, 215 aa, Homo sapiens
MIFKNWSDRTSRPGTLFTGVWPGSPCSVLVPHFGENLKPTRADNLRRWTGATKEALEPCGTFLGIATFHPIFIRSSGDFITLGQQGGPGWCVLGVPLAGAGGFSYRCRHQKRGSPRAPAERLPVQPSSRIFSQACLSLASSGPNPPLESENKEQLRGQEAQKRNQYFRNKLNRNSCLVHQHLLRMTQKLSSWELACLALLWAAVLFQRWKKGDSH

SEQ ID NO: 51301 - protein, 52 aa, Homo sapiens
LCSQQDLAMLPWVREFNKFDLYTKCPDLPDVDKLRPYYQGLIDKYCPGILSW

SEQ ID NO: 51302 - protein, 127 aa, Homo sapiens
MEAVDLLDGLVDESDPDVDFPNSFHAFQTAEGIRKAHPDKDWFHLVGLLHDLGKVLALFGEPQWAVVGDTFPVGCRPQASVVFCDSTFQDNPDLQDPRYSTELGMYQPHCGLDRVLMSWGHDEYMYQ

SEQ ID NO: 51303 - protein, 311 aa, Homo sapiens
  misc_feature (1)...(311): Xaa = X or * as defined in Table 2
XGQEPAAADFHAPCGLSLLPKPLPPLKGGHGCRSGVVSPVPRKQTSADFRFADEDLGGPDPSLVYRPDVDPEVAKDKASFRNYTSGPLLDRVFTTYKLMHTHQTVDFVRSKHAQFGGFSYKKMTVMEAVDLLDGLVDESDPDVNFPNSLHALQTAEGIRKAHPDKDWVHLVRLLHELGEGPGPVRGAPASVVFCDSTFQDNPDLQDPRYSTELGMYQPHCGLDRVLMSWGHDEYMYQAFYMNRGPLLSTPGTRAATTKQLCSQQDLAMLPWVREFNKFDLYTKCPDLPDVDKLRPYYQGLIDKYCPGILSW

SEQ ID NO: 51304 - protein, 877 aa, Homo sapiens
MELKTKARELREECRSLRSRCNQLEERLSVTEDEMNEIKQEGKFREKRIKRNEQSLQEIWDYVKRPNPHDTDNLCLGPSTFLEGSVSEFTWSTRWLAGAKKDDTQNLLKNLESNAQTPSETGSPSRRRKREVQMSKDKEAVDVPSSYPASKKNEARRQVEALAELGACMGFRGEEVYASWSMDGHEWPGKGTTSSHSGPWDRQLGPQPTDPPSLKEGLKSGILWHGYSTVSSIVHWFRDTSVVSRACTARLVPNGLTECEEEEKELRLASYLARMAMVPGATLRRLLSVVLPTASQPQLLALLDSATERHVDHAAESDGGAEQADVGRRRKGKKKTLSATVWGLTRGITFGAISNPPSLELQSALTAAQECEPPSNSNITAFALKAKVIYPINQKFRPLADGSSNPSLHENLKQAVLPHQPVEASPSSSLGSLSQGEKDDCSSSSSVHSATSDDRFLSRTFLRVNAFPEVLACESVDVDLCIYSLHLKDLLHLDTALRQEKHMVGGDVRIPSFSWGQELGDKDSVCTPPEVISVQQGPRHPSQLIGISYLVSGSSEAQTARIWLLVNNTKTTSSANLSELLLLDSIAGLTIWDSVGNRTSEGFQAFSKKFLQGYLDEDQMEMLLERAQTEVFSIKQKLDNDLKQEKKKLHQKLITKRRRELLQKHREQRREQASVGEAFRTVEDAGQYLHQKRSLMEEHGATLEELQERLDQAALDDLRTLTLSLFEKATDELRRLQNSAMTQELLKRGVPWLFLQQILEEHGKEMAARAEQLEGEERDRDQEGVQSVRQRLKDDAPEAVTEEQAELRRWEHLIFMKLCSSVFSLSEEELLRMRQEVHGCFAQMDRSLALPKIRARVLLQQFQTAWREAEFVKLDQA

SEQ ID NO: 51305 - protein, 1024 aa, Homo sapiens
MPWVLPGPAPLVWPARAPRPLADGSSNPSLHENLKQAVLPHQPVEASPSSSLGSLSQGEKDDCSSSSSVHSATSDDRFLSRTFLRVNAFPEVLACESEIIPVLRECRKDKRDVYDTPSNVIVGCEYVMAAVILIITTTTKIIIIFIITTSFILYHHHHHYYYHSSLLHHVIVVITINTIIFAIVTTDIIILCLYHHHHHPHDRCHHQHHHHPHVLITIIMSIIFIIVVIIGILITTITAIIIFITTIIIITILIAITTTNVAGQASSRIGFSLGGSHFDQQGCDQKTSPASLLPHLILTIIVIIILVTTITSLLFIIPCHHFHYHHHCYCHHFHYCHRHRIIVVIVFISTTIITIFISTTITTFIIFPATSTFTFIRVLIVIVIVLVPTTDLEELEKGLQVKLSNTEMSGAGDSEYITLADVEKKEREYSEQLIDNMEAFWKQMANIQHFLVDQFKCSSSKARQLMMTLTERMIAAEGLLCDSQELQALDALERTMGRAHMAKVIEFLKLQVQEETRCRLAAISHGLELLAGEGKLSGRQKEELLTQQHKAFWQEAERFSREFVQRGKDLVTASLAHQVEGTAKLTLAQEEEQRSFLAEAQPTADPEKFLEAFHEVLERQRLMQCDLEEEENVRATEAVVALCQEQAKILHCRLESWLRPPGWASLGQSLDCSELWFPSLCNGDWEPIYFKGWVCRGEQVQGPDLAHGNTAPKVKYGVPWGKKPPLIIRGQLKIVRVNYYRTLMEAAVESVYVTSAGVSRLVQAYYQQIGRIMEDHEERKLQHLKTLQGERMENYKLRKKQELSNPSSGSRTAGGAHETSQAVHQRMLSQQKRFLAQFPVHQQMRLHAQQQQAGVMDLLEAQLETQLQDPEPLEGKCGLCGSLQQLQHAKQGQALSSWSGLIYGADRELSIPLCAHGHQEASGVMEAEQNFISELAALARVPLAESKLLPAKRGLLEKPLRTKRKKPLPQERGDLGVPNNEDLASGDQTSGSLRYDWAPDLLPVAGFVLRGSEDGEDSGISRLF

SEQ ID NO: 51306 - protein, 73 aa, Homo sapiens
MEDSMDMDMSPLRPQNYLFGCELKADKDYHFKVDNDENEHQLSLRTVSLGAGAKDELHIVEAEAMNYEGSPIK

SEQ ID NO: 51307 - protein, 563 aa, Homo sapiens [sequence omitted]

SEQ ID NO: 51308 - protein, 493 aa, Homo sapiens
  DOMAIN (152)..(185): Nuclear hormones receptors DNA-binding region proteins domain identified by eMATRIX, accession number BL00031A, p-value=4.000e- 35, raw score of 19.55
  DOMAIN (150)..(403): Zinc finger, C4 type (two domains) domain identified by PFam, accession name zf-C4, E-value=2.3e-57, PFam score of 195.0
  misc_feature (1)...(493): Xaa = X or * as defined in Table 2
XACRHPMEDSMDMDMSPLRPQNYLFGCELKADKDYHFKVDNDENEHQLSLRTVSLGAGAKDELHIVEAEAMNYEGSPIKVTLATLKMSVQPTVSLGGFEITPPVVLRLKCGSGPVHISGQHLVAIETQSSSSEEIVPSPPSPPPLPRIYKPCFVCQDKSSGYHYGVSACEGCKGFFRRSIQKNMVYTCHRDKNCIINKVTRNRCQYCRLQKCFEVGMSKESVRNDRNKKKKEVPKPECSESYTLTPEVGELIEKVRKAHQETFPALCQLGKYTTNNSSEQRVSLDIDLWDKFSELSTKCIIKTVEFAKQLPGFTTLTIADQITLLKAACLDILILRICTRYTPEQDTMTFSDGLTLNRTQMHNAGFGPLTDLVFAFANQLLPLEMDDAETGLLSAICLICGDRQDLEQPDRVDMLQEPLLEALKVYVRKRRPSRPHMFPKMLMKITDLRSISAKGAERVITLKMEIPGSMPPLIQEMLENSEGLDTLSGQPGX

SEQ ID NO: 51309 - protein, 675 aa, Homo sapiens
  DOMAIN (336)..(386): Receptor tyrosine kinase class II proteins domain identified by eMATRIX, accession number BL00239E, p-value=1.000e-40, raw score of 17.14
  DOMAIN (171)..(438): Eukaryotic protein kinase domain identified by PFam, accession name pkinase, E-value=3.8e-66, PFam score of 233.2
  misc_feature (1)...(675): Xaa = X or * as defined in Table 2
XACRHPMEDSMDMDMSPLRPQNYLFGCELKADKDYHFKVDNDENEHQLSLRTVSLGAGAKDELHIVEAEAMNYEGSPIKPTVSLGGFEITPPVVLRLKCGSGPVHISGQHLVVYRRKHQELQAMQMELQSPEYKLSKLRTSTIMTDYNPNYCFAGKTSSISDLKEVPRKNITLIRGLGHGAFGEVYEGQVSGMPNDPSPLQVAVKTLPEVCSEQDELDFLMEALIISKFNHQNIVRCIGVSLQSLPRFILLELMAGGDLKSFLRETRPRPSQPSSLAMLDLLHVARDIACGCQYLEENHFIHRDIAARNCLLTCPGPGRVAKIGDFGMARDIYRASYYRKGGCAMLPVKWMPPEAFMEGIFTSKTDTWSFGVLLWEIFSLGYMPYPSKSNQEVLEFVTSGGRMDPPKNCPGPVYRIMTQCWQHQPEDRPNFAIILERIEYCTQDPDVINTALPIEYGPLVEEEEKVPVRPKDPEGVPPLLVSQQAKREEERSPAAPPPLPTTSSGKAAKKPTAAEVSVRVPRGPAVEGGHVNMAFSQSNPPSELHRVHGSRNKPTSLWNPTYGSWFTEKPTKKNNPIAKKEPHERGNLGLEGSCTVPPNVATGRLPGASLLLEPSSLTANMKEVPLFRLRHFPCGNVNYGYQQQGLPLEAATAPGAGHYEDTILKSKNSMNQPGP

SEQ ID NO: 51310 - protein, 97 aa, Homo sapiens
MMVFGVFSHSDFDFRCIFGLEYSRKKFLTGGFSFQLPSSPKIIIIIINHLHHHHYHHHPLHHSVIIFPSSKQSFYFFFWGNLATNLPRGRPAFQDIL

SEQ ID NO: 51311 - protein, 204 aa, Homo sapiens
MWATLPLLCAGAWLLGVPVCGAAELSVNSLEKLHFKSWMSKHRKTYSTEEYHHRLQTFASNWRKINAHNHGNHTFKMALNQFSDMSFGDIKHKYLWAEPSELLSPQKATTFERGKEQCVALAACALPNPHPLWCETVASRKRKTGRERRGTGQPWALGGNPCPGGSCWEDPLGPPNILPVTVCAQPWKPTDKEEFHHGASPVSY

SEQ ID NO: 51312 - protein, 110 aa, Homo sapiens
  misc_feature (1)...(110): Xaa = X or * as defined in Table 2
XTFSRAQGDLKKLSQDPPEKAVGRSAIRRMAALGPVGPGDAALWLEGQETALGRMVLGQPILFSAMLGNTALGVQKSAAHPGMPSVPSPPHLPAPRTAHGPGAVLQHSLK

SEQ ID NO: 51313 - protein, 90 aa, Homo sapiens
  DOMAIN (1)..(90): PLAT/LH2 domain identified by PFam, accession name PLAT, E- value=0.0054, PFam score of 7.9
VVTGNVPKAGTDANVYLTIYGEEYGDTGERPLKKSDKSNKFEQGQTDTFTIYAIDLGALTKIRIRHDNTGNRAGWFLDRIDITDMNNEIT

SEQ ID NO: 51314 - protein, 663 aa, Homo sapiens
  DOMAIN (563)..(601): Chloramphenicol acetyltransferase proteins domain identified by eMATRIX, accession number BL00100D, p-value=9.100e-31, raw score of 17.22
  DOMAIN (501)..(615): Chloramphenicol acetyltransferase domain identified by PFam, accession name CAT, E-value=9.9e-46, PFam score of 165.4
MDDIPQEARQYRHNQAYAYSIQGDGAEDDDERIVRFHTRDSESSTFYSAHPSPTPQTSPSVARRMVWGAETLTFPCDRWLATSEDDKKTIRELVPYDIFTEKYMKDGSLRQVYKEVEEPLDSKCGVATLITMGRLQDPGPPEHMPCARLSLFTQETPQLEAADVGEVYKLRLGHTGEGFGPSWFVDTVWLRHLVVREVDLTPEEEARKKKEKDKLRQLLKKERLKAKLQRKKKKRKGSDEEDEGEEEESSSSEESSSEEEEMEEEEEEEEFGPGMQEVIEQHKFEAHRWLARGKEDNELVVELVPAGKPGPEQSIRHHTLVNCQNWLEAQVPAPFSESMRTSFQMTLMNTLNKDKYNFNCNRWLDANEDDNEIVREMTAEGPTVRRIMGKLRPACSLLSTLKIPCKFWEKCFRAERKAPRAAPYMGHCFKCLLETQPWQNSRRGSKLYCYQRLGPTLSASNALITPWTKVRRAVNNYDIIVMSNSFNGQSEHQVWIEDPQKNKHKFYPAFIHILARLMNAHPEFRMAMKDVNTTTISGSFYTYIRKMWRVTEKTWPIIPKGFIENMCFVSSNPWVSVTSFDLNVANMDNFFAPVFTMGKYYTQGDKVLMPLAIQLEAADVGEVYKLRLGHTGDGFGPSWFVDTDMPYYRSQFKKCAVVGNGAS

SEQ ID NO: 51315 - protein, 1395 aa, Homo sapiens
  DOMAIN (659)..(674): HMG-I and HMG-Y DNA-binding domain proteins (A+T-hook) domain identified by eMATRIX, accession number BL00354C, p-value=8.412e- 10, raw score of 6.61
  DOMAIN (536)..(1170): PLAT/LH2 domain identified by PFam, accession name PLAT, E- value=6.6e-12, PFam score of 53.0
MAVRLLHHLERWGDLDSDGKEEQDILGLVSKPMPSPKPLLHVLRNLNLPSEKKSQRSIAPQIPIEGSLVQCQPRVLPAPLIMAKRKSHLPNFTGLWWTSEEMDNRQRMVGKMGNLSHARLTEPAEIHGAETLSKFLWASFSLLDVPCAHSPSRQRKRPTAPVGTIFQDALPGPSPGSAPAVPDAIGEETGTAKRQQRDHPVFHFIAEETKAETRRWRRRQRSYLTLGKSLDPEVLCLLIYKMEITEALTSGPHTSRVLDTSLPVLSSDPSDAKASVPSSPHTAVRSNRFDVRTAKWRSLKQSREKKVSWPHCPCIKATCKWNQRESEFDHVKAPRQGDVNPVQGETVSMCPDWFISSWSQMQAGIVQLIPQRNERDREDFLEGSAAHSGTPRHVSRKGQQEEAAASGGMSRSVAQQEQQHQTYASLELGVKEPCVCASRFSPCPGAGQQSKGGWEEHENKEGQSREGSHGGRGELHEATKKARKRCGQAGVHPPARSRGPASLALGLAGGWERMVRADVRQLQALAPLAQNPYPDGTHKDRIFTGNIPGAGTDAKVYITIYGDLGDTGERYLGKSENRTNKFERGTTDTFTIYAIDLGALTKIRIRHDNTGNRAGWFLDRIDITDMNNEITACFFWRVEVVCVSWGVKRKGSDEEDEGEEEESSSSEESSSEEEEMEEEEEEEEFGPGMQEVIEQHKFEAHRWLARGKEDNELVVELVPAGKPGPERNTYEVQVVTGNVPKAGTDANVYLTIYGEEYGDTGERPLKKSDKSNKFEQGQSLRALPGFQLGYQGVLIRQIDDCDYVAQVTKTLNLPEMSESPEGSDERMQSPLSGVLLLSYGIWHSWCRTWAGAWKGVLEDGAHGGCWPFPLATWGVCAGDIQQAEGGPEELAPVVPYEITLYTSDVFAAGTDANIFIIIYGCDAVCTQQKYLCTNKREQKQFFERKSACRFIVEVLGLSRLSRDGVAVYEGVWLNEAPSSSDVPDTYDSGPGPSSARTVFPGHRQLVVVYSKELEGNNEFQVAARKQSVHFTQGEPPETRGNHVVLQDMGGNKKVIPYYVSVTTGKHKDAATDSRAFIFLIGEDDERSKRIWLDYPRGKRGFSRGSVEEFYVAGLDVGIIKKIELGHDGASPESCWLVEELCLAVPTQGTKYMLNCNCWLAKDRGDGITSRVFDLLDAMVVNIGVKACTEYFKPHSVLAEILDAARKACNPHQDNDGNMTAVINSSGLEGAETLTFPCDRWLATSEDDKKTIRELVPYDIFTEKYMKDGSLRQVYKEVEEPLDRSLWILQKHTQDHYQDPQSSLNSGVDMKESCGFPACLEESIRANLEVTSPGELVVSGKVSACQAGPGQMHPTPRDCSPPAQNKSWEQSPLFMTLCGINGSTEKMQLDKKKARP

SEQ ID NO: 51316 - protein, 163 aa, Homo sapiens
MDGTPITPLKDGFTEVQLSSVNPPSLSPPGTTGIEQSLTGLSISSTPPAVSSVLSTGVPTVPLLPPQVNQSLTSVPPMNPATTLPGLMPLPAGLPNLPNLNLNLPAPHIMPGVGLPELVNPGLPPLPSMRPRNLPGIAPVPLPSEFLTHCGCDAPHCQGPHHR

SEQ ID NO: 51317 - protein, 291 aa, Homo sapiens
MGSSQSVEIPGGGTEGYHVLRVQENSPGHRAGLEPFFDFIVSINGSRLNKDNDTLKDLLKANVEKPVKMLIYSSKTLELRETSVTPSNLWGGQGLLGVSIRFCSFDGANENVWHVLEVESNSPAALAESSSAASSGELLSSLPPTSNAPSDPATTTAKADAASSLTVDVTPPTAKAPTTVEDRVGDSTPVSEKPVSAAVDANASEEDVAEVAAPSHHPHVTHPWPPCWTLEVNASPALSQEAQYQPVLGVDPFLGPEKPVSVFNSGRFGTRFQKHDVRESFPDSGPLSVAL

SEQ ID NO: 51318 - protein, 468 aa, Homo sapiens
  misc_feature (1)...(468): Xaa = X or * as defined in Table 2
XICGALATSKEKVGDADNQCTLRGQCTSRRSLRGIGPIGHAPSNHHFPPKKGRKPQPVAKRRARPVPPGLPGAPKQAALTPGRRPLTPAAFAPKASRDQQTLPEHCPNALHLETSPVLGPGQLGLFIPESLPLSLLVPSGKRTCMGIIANRKMSPCFVQVSEPAWREHGGSEQFFLGQGWSFSVKIPGPLINRRHQDTEITKFKGFSEATTQGALESQAGIPLLCTPSLGTQYDPAQASACGRLVNDQKQNRKLCKVLSSSVRSEGLSTYYLQAQHRRFTPPSYPMAMPESYRWICFLIRKMGVRTVLSPSEFCEDYRVKMCQDLDPCLAASSSPTSVPLPERRPPCPHPNTSRPPRSDLAGVSLGQEFPTHLRLLHTPTVPVALHTSAHTVPNASNAPATPHCLENLYSSFQSQLRLLSSQSASGLPCLAFHNRGDTSTSQCCGEDEVRKTQTAWEAASVIIAMRML

SEQ ID NO: 51319 - protein, 479 aa, Homo sapiens
  DOMAIN (128)..(167): Natriuretic peptides receptors proteins domain identified by eMATRIX, accession number BL00458A, p-value=1.000e-40, raw score of 18.91
  DOMAIN (48)..(444): Receptor family ligand binding region domain identified by PFam, accession name ANF_receptor, E-value=1.3e-127, PFam score of 437.3
MPSLLVLTFSPCVLLGWALLAGGTGGGGVGGGGGGAGIGGGRQEREALPPQKIEVLVLLPQDDSYLFSLTRVRPAIEYALRSVEGNGTGRRLLPPGTRFQVAYEDSDCGNRALFSLVDRVAAARGAKPDLILGPVCEYAAAPVARLASHWDLPMLSAGALAAGFQHKDSEYSHLTRVAPAYAKMGEMMLALFRHHHWSRAALVYSDDKLERNCYFTLEGVHEVFQEEGLHTSIYSFDETKDLDLEDIVRNIQASERVVIMCASSDTIRSIMLVAHRHGMTSGDYAFFNIELFNSSSYGDGSWKRGDKHDFEAKQAYSSLQTVTLLRTVKPEFEKFSMEVKSSVEKQGLNMEDYVNMFVEGFHDAILLYVLALHEVLRAGYSKKDGGKIIQQTWNRTFEGIAGQVSIDANGDRYGDFSVIAMTDVEAGTQEVIGDYFGKEGRFEMRPNVKYPWGPLKLRIDENPNCRAYKQLSLQIIQVA

SEQ ID NO: 51320 - protein, 41 aa, Homo sapiens
  DOMAIN (9)..(23): TYROSINE KINASE CATALYTIC DOMAIN SIGNATURE domain identified by eMATRIX, accession number PR00109A, p-value=8.962e-11, raw score of 15.00
  misc_feature (1)...(41): Xaa = X or * as defined in Table 2
XEKSLQLVMEYVPLGSLRDYLPRHKHRLGPAAALRPADLRX

SEQ ID NO: 51321 - protein, 341 aa, Homo sapiens
  DOMAIN (204)..(235): Protein kinases ATP-binding region proteins domain identified by eMATRIX, accession number BL00107A, p-value=4.600e-22, raw score of 18.39
  DOMAIN (88)..(320): Eukaryotic protein kinase domain identified by PFam, accession name pkinase, E-value=1.8e-71, PFam score of 250.8
MLSRLVLNSRAQVIFPPRPPKQEKVFLPLESDPGVAVAGFVTPKCGPAGERIGVRPLPTATLPDLADVLTVNPDSPASDPTVFHKRYLKKIRDLGEGHFGKVSLYCYDPTNDGTGEMVAVKALKADCGPQHRSGWKQEIDILRTLYHEHIIKYKGCCEDQGEKSLQLVMEYVPLGSLRDYLPRHSIGLAQLLLFAQQICEGMAYLHAQHYIHRDLAARNVLLDNDRLVKIGDFGLAKAVPEGHEYYRVREDGDSPVFWYAPECLKEYKFYYASDVWSFGVTLYELLTHCDSSQSPPTVYHLMKNCWETEASFRPTFENLIPILKTVHEKYQGQAPSVFSVC

SEQ ID NO: 51322 - protein, 942 aa, Homo sapiens
  DOMAIN (871)..(894): Receptor tyrosine kinase class II proteins domain identified by eMATRIX, accession number BL00239C, p-value=8.765e-15, raw score of 18.75
  DOMAIN (464)..(925): Eukaryotic protein kinase domain identified by PFam, accession name pkinase, E-value=1.2e-52, PFam score of 188.3
MPLRHWGMARGSKPVGDGAQPMAAMGGPEGFIPGNWHGMNPREPAVYRCGPPGTEASSDQTAQGMQLLDPASFEYLFEQGKHEFVNDVASLWELSTEEEIHHFKNESLGMAFLHLCHLALRHGIPLEEVAKKTSFKDCIPRSFRRHIRQHSALTRLRLRNVFRRFLRDFQPGRLSQQMVMVKYLATLERLAPRFGTERVPVCHLRLLAQAEGEPCYIRDSGVAPTDPGPESAAGPPTHEVLVTGTGGIQWWPVEEEVNKEEGSSGSSGRNPQASLFGKKAKAHKAVGQPADRPREPLWAYFCDFRDITHVVLKEHCVSIHRQDNKCLELSLPSRAAALSFVSLVDGYFRLTADSSHYLCHEVAPPRLVMSIRDGIHGPLLEPFVQAKLRPEDGLYLIHWSTSHPYRLILTVAQRSQAPDGMQSLRLRKFPIEQQDGAFVLEGWGRPRTLNLSQLSFHRVDQKEITQLSHLGQGTRTNVYEGRLRVEGSGDPEEGKMDDEDPLVPGRDRGQELRVVLIVLHPSHHDIALAFYETASLMSQVSHTHLAFVHGVCVRGPENIMGTEYVEHGPLDVWLRRERGHVPMAWKMVVAQQLASALSYLENKNLVHGNVCGRNILLARLGLAEGTSPFIKLSDPGVEPVRPLQGGAGGEDPLAGPRMPTSLSSAMDKWGFGPSLLEICFDGEASVKSRSPSEKEHFYQRQHRLPEPSCPQLATLTSQCLTYEPTQRPSFRTILRDLTRLQPHNLADVLTVNPDSPASDPTVFHKRYLKKIRDLGEGHFGKVSLYCYDPTNDGTGEMVAVKALKADCGPQHRSGWKQEIDILRTLYHEHIIKYKGCCEDQGEKSLQLGMEYVPLGSLRDYLPRHSIGLAQLLLFAQQICEGMAYLHAQHYIHRDLAARQRWLKIGDFGLAKAVPEGHEYYRVGRGMGTAPCSGYAPECLKEY

SEQ ID NO: 51323 - protein, 272 aa, Homo sapiens
MPSLQALLPGSPAPTLVGSRQHVLLPQAALSGLLGFQLQSPLAPPGPWPLQPIAGWEAKQEAGVTDQGWFTAGPCGLVLMLCQCRCRKPKVFPKSCYLARVSVLLAVCCVYVELCPVVSHSARVSVLLAVCCVYVELCPVVSHSARVSVLAVCCGCSKQTFASTQQTPKTSESPALYRPAPALASFPDTWNCAPGTKRKINSKQPVAPMMSKECQFLAGPRILRYLRDLKKRGIPLNLYLLQAKSDGKSLRWLPSLKRLLKAQSQIPYKKFQ

SEQ ID NO: 51324 - protein, 83 aa, Homo sapiens; identical to SEQ ID NO: 44409
  misc_feature (1)...(83): Xaa = X or * as defined in Table 2

SEQ ID NO: 51325 - protein, 411 aa, Homo sapiens
MDGSGGYRKEKRPTVFCLHSSPPEASSQKRSEGRGARAPGKEGAAEGPLDPSGTILPRTTIIPWKMPAGTGPEGSYLAVARTFEKIEEVSAAPDGGDAEQLAALRGGLSPPDLLPVLYLSLNHLGHPSRAWSLAWVMVSFQGSGPGHSSSPRRPWDPALDMTLSRLCFKSHPRPDDTGPDVSPSVVMLVHPPLSWLHVHFADFLQPAWLGARSPSLSTKWSTAKKIDIIKGLFVPAATQKPGSSLGQLRWEVLVHLLVPLPVYASGQDHYCLAQFPHRHMGLCDIWGPFQALKIFWFLRRGSTYIKVEEIEKGGGKIGEVPERTAAPWAGEQSVLAALSQAVSLTPRAKGSPETNVGPSHPGHQRGPKRFEEAAFTCEYKYDGRGHRYGEWDMSLPQTGNVKEQGCGVTEA

SEQ ID NO: 51326 - protein, 273 aa, Homo sapiens
  DOMAIN (1)..(197): DNA ligase domain identified by PFam, accession name DNA_ligase, E-value=5.1e-05, PFam score of -56.8
MQQDPRPGRREVKIFSRNQEDNTGKYRTSSAASPRLNSHRSILHPGHRSRGLGPGKEEIQPFQVLTTRKRKEVDASEIQVQLLRENFVETEASLSSPPPWTPRTSSRSRVPGAVSERLLRGAMVKTLDVDATYEIAKRRTTGSSVVYALSNMATGPECPHKSFQLGTGFSDEELEEHTRASRRWCCPAHALTADRWRCDSRPLAGPQRVWEVDSDKASPFASLGLFESVKTSAGAGHHQCSGGLFVPEAKSDQNQQGEDSGSDPEDTYKPSPS

SEQ ID NO: 51327 - protein, 51 aa, Homo sapiens
ALKIFWFLRRGSTYIKVEEIEKGGGKIGEVPERTAAPWAGEQSVLAALSQA

SEQ ID NO: 51328 - protein, 24 aa, Homo sapiens
EVDASEIQVQVCLYAFDLIYLNGE

SEQ ID NO: 51329 - protein, 419 aa, Homo sapiens
  DOMAIN (101)..(128): ATP-dependent DNA ligase AMP-binding site proteins domain identified by eMATRIX, accession number BL00697D, p-value=7.577e- 23, raw score of 18.99
  DOMAIN (1)..(305): DNA ligase domain identified by PFam, accession name DNA_ligase, E-value=8.1e-130, PFam score of 444.7
MKKKMMIHALEGGEVKIFSRNQEDNTGKYPDIISRIPQGGRLPHTCTLPGSVIKLPSVTSFILDTEAVAWDREKKQIQPFQVLTTRKRKEVDASEIQVQVCLYAFDLIYLNGESLVREPLSRRRQLLRENFVETEGEFVFATSLDTKDIEQIAEFLEQSVKDSCEGLMVKTLDVDATYEIAKRSHNWLKLKKDYLDGVGDTLDLVVIGAYLGRGKRAGRYGGFLLASYRPRTVKELQAICKLGTGFSDEELEEHHQSLKALVLPSPRPYVRIDGAVIPDHWLDPSAVWEVKCADLSLSPIYPAARGLKSVMPTTGEYMEHKSDEGNTPQPAHAQMELWARGFYCAGPHTQQRDLDAKALVALSRLGVVAFWLLQQEIQVANGRELSFEEIHRTKSRRERGNLTLFEPLQSAAIKAFDFA

SEQ ID NO: 51330 - protein, 685 aa, Homo sapiens
  DOMAIN (509)..(536): ATP-dependent DNA ligase AMP-binding site proteins domain identified by eMATRIX, accession number BL00697D, p-value=7.577e- 23, raw score of 18.99
  DOMAIN (431)..(669): DNA ligase domain identified by PFam, accession name DNA_ligase, E-value=7.9e-45, PFam score of 162.4
MQRSIMSFFHPKKEGKAKKPEKEASNSSRETEPPPKAALKEWNGVVSESDSPVKRPGRKAARVLCSEGEEEDEALSPAKGQKPALDCSQVSPPRIPKRRTARKQLPKRTIQEVLEEQSEDEDREAKRKKEEEEEETPKESLTEAEVATEKEGEDGDQPTTPPKPLKTSKAETPTESVSEPEVATKQELQEEEEQTKPPRRAPKTLSSFFTPRKPAVKKEVKEEEPGAPGKEGAAEGPLDPSGYNPAKNNYHPVEDACWKPGQKVPYLAVARTFEKIEEVSARLRMVETLSNLLRSVVALSPPDLLPVLYLSLNHLGPPQQGLELGVGDGVLLKAVAQATAAGTQRLMLPPPPLTASGVFSKFRDIARLTGSASTAKKIDIIKGLFVACRHSEARFIARSLSGRLRLGLAEQSVLAALSQAVSLTPPGQEFPPAMVDAGKGKTAEARKTWLEEQGMILKQTFCEVPDLDRIIPVLLEHGLERLPEHCKLSPGDSPETNEVDASEIQVQVCLYAFDLIYLNGESLVREPLSRRRQLLRENFVETEGEFVFATSLDTKDIEQIAEFLEQSVKDSCEGLMVKTLDVDATYEIAKRSHNWLKLKKDYLDGVGDTLDLVVIGAYLGRGKRAGRYGGFLLASYDEDSEELQPHMQAWNWPSVMRSWRSITRALKARGAAPAPAPYVRDRWPL

SEQ ID NO: 51331 - protein, 69 aa, Homo sapiens
GEVEQIAMMKPKGQTEHDEGMLEYLEDIIGCGRLNEPIKVLCRRVEILNEHRGEKLNRVKMVEKEKDAL

SEQ ID NO: 51332 - protein, 126 aa, Homo sapiens
METQKEKIHEDTKEINEKSNILSNEMKAKNKDVKDTEKKLNKITKFIEENKEKFTQLDLEDVQVREKLKHATSKAKKLEKQLQKDKEKVEEFKSIPAKSNNIINETTTRNNALEKEKEKEEKKLKE

SEQ ID NO: 51333 - protein, 1626 aa, Homo sapiens
  DOMAIN (402)..(440): Armadillo/beta-catenin-like repeat proteins domain identified by eMATRIX, accession number PF00514A, p-value=3.298e-14, raw score of 31.30
  DOMAIN (374)..(1110): Armadillo/beta-catenin-like repeats domain identified by PFam, accession name Armadillo_seg, E-value=9.7e-39, PFam score of 142.1
MTVTQSFPATPGAPLPPGRQKMMLHEAHSFKTGKMGSSDGYNFQTLFSPGPEVKGFTSSSRKAVAIALKYLVLLRNQSCLLATRVFRWLPSRSPAASKRSVKRGSRKPVDRDFPGEEGPPPPSPDGASSDAEPEPPSGRTESPATAAGTPVYSVAWGPDSEKVLYTAGKQLIIKPLQPNAKVLQWKAHDGIILKVDWNSVNDLILSAGEDCKYKVWDSYGRPLYNSQPHEHPITSVAWAPDGELFAVGSFHTLRLCDKTGIVKWNLLTSETTQIVKLPDDIYPIDFHWFPKSLGVKKQTQAESFVLTSSDGKFHLISKLGRVEKSVEAHCGAVLAGRWNYEGTALVTAVTILLQENKFRAPTDSMLWKLLSSDRNPPIDDLIKSGILPILVHCLERDDNPSLQFEAAWALTNIASGTSEQTQAVVQSSDGPQCRDYVISLGVVKPLLSFISPSIPITFLRNVTWVMVNLCRHKDPPPPMETIQEMAVWAKKMTEIQTPENTPRLFDLVKVKDEKIRQAFYFALRDTLVADNLDQATRVAYQKDRRWRVVTLQGQIIEQSGTMTGGGSKVMKGRMGSSLVIEISEEEVNKMESQLQNDSKKAMQIQEQKVQLEERVVKLRHSEREMRNTLEKFTASIQRLIEQEEYLNVQVKELEANVLATAPDKKKQKLLEENVSAFKTEYDAVAEKAGKVEAEVKRLHNTIVEINNHKLKAQQDKLDKINKQLDECASAITKAQVAIKTADRNLQKAQDSVLRTEKEIKDTEKEVDDLTAELKSLEDKAAEVVKNTNAAEESLPEIQKEHRNLLQELKVIQENEHALQKDALSIKLKLEQIDGHIAEHNSKIKYWHKEISKISLHPIEDNPIEEISVLSPEDLEAIKNPDSITNQIALLEARCHEMKPNLGAIAEYKKKEELYLQRVAELDKITYERDSFRQAYEDLRKQRLNEFMAGFYIITNKLKENYQMLTLGGDAELELVDSLDPFSEGIMFSVRPPKKSWKKIFNLSGGEKTLSSLALVFALHHYKPTPLYFMDEIDAALDFKNVSIVAFYIYGDFGTQKEAAWAISNLTISGRKDQVAYLIQQNVIPPFCNLLTVKDAQVVQVVLDGLSNILKMAEDEAETIGNLIEECGGLEKIEQLQNHENEDIYKLAYEIIDQFFSSDDVFNNFVVFLILYINIDLDKVIYIGEVEQIAMMKPKGQTEHDEGMLEYLEDIIGCGRLNEPIKVLCRRVEILNEHRGEKLNRVKMVEKEKDALEGEKNIAIEFLTLENEIFRKKNHVCQYYIYELQKRIAEMETQKEKIHEDTKEINEKSNILSNEMKAKNKDVKDTEKKLNKITKFIEENKEKFTQLDLEDVQVREKLKHATSKAKKLEKQLQKDKEKVEEFKSIPAKSNNIINETTTRNNALEKEKEKEEKKLKEVMDSLKQETQGLQKEKESREKELMGFSKSVNEARSKMDVAQSELDIYLSRHNTAVSQLTKAKEALIAASETLKERKAAIRDIEGKLPQTEQELKEKEKELQKLTQEETNFKSLVHDLFQKVEEAKSSLAMNRSRGKVLDAIIQEKKSGRIPGIYGRLGDLGAIDEKYDVAISSCCHALDYIVVDSIDIAQECVNFLKRQNIGVATFIGLDK

SEQ ID NO: 51334 - protein, 64 aa, Homo sapiens
MAVWAKKMTEIQTPENTPRLFDLVKVKDEKIRQAFYFALRDTLVADNLDQATRVAYQKDRRWRV

SEQ ID NO: 51335 - protein, 29 aa, Homo sapiens
MSRGGPEASQIFSLKNPKSLSGKGRLPLP

SEQ ID NO: 51336 - protein, 405 aa, Homo sapiens
  DOMAIN (149)..(171): Armadillo/beta-catenin-like repeat proteins domain identified by eMATRIX, accession number PF00514D, p-value=1.000e-18, raw score of 19.10
  DOMAIN (138)..(353): Armadillo/beta-catenin-like repeats domain identified by PFam, accession name Armadillo_seg, E-value=1.7e-45, PFam score of 164.6
MTVTQSFPATPGAPLPPGRQKMMLHEAHSFKTGKMGSSDGYNFQTLFSPGPEVKGFTSSSRKAVAIALKYLVLLRNQSCLLATRVFRWLPSRSPAASKRSVKRGSRKPVDRDFPGEEGPPPPSPDGASSDAEPEPPSGRTESPATAAALLTHPKEKINKEAVWFLSNITAGNQQQVQAVIDANLVPMIIHLLDKGDFGTQKEAAWAISNLTISGRKDQVAYLIQQNVIPPFCNLLTVKDAQVVQVVLDGLSNILKMAEDEAETIGNLIEECGDSGTSEMVNPQVVNGKEITEKLKEVEEALGGHWKLLSSDRNPPIDDLIKSGILPILVHCLERDDNPSLQFEAAWALTNIASGTSEQTQAVVQSNHTLCTRTPRILAKHPECTSNACIRPLMLASTAGKGMSKR

SEQ ID NO: 51337 - protein, 586 aa, Homo sapiens
  DOMAIN (465)..(499): Armadillo/beta-catenin-like repeat proteins domain identified by eMATRIX, accession number PF00514C, p-value=7.840e-12, raw score of 24.37
  DOMAIN (168)..(217): Zinc finger, C3HC4 type (RING finger) domain identified by PFam, accession name zf-C3HC4, E-value=2e-07, PFam score of 28.3
MTNEAGAPRLMITHIVNQNFKSYAGEKILGPFHKRFSCIIGPNGSGKSNVIDSMLFVFGYRAQKIRSKKLSVLIHNSDEHKDIQSCTVEVHFQKIIDKEGDDYEVIPNSNFYVSRTACRDNTSVYHISGKKKTFKDVGNLLRSHGIDLDHNRFLILQEMHNFEEELTCPICYSIFEDPRVLPCSHTFCRNCLENILQASGNFYIWRPLRIPLKCPNCRSITEIAPTGIESLPVNFALRAIIEKYQQEDHPDIVTCPEHYRQPLNVYCLLDKKLVCGHCLTIGQHHGHPIDDLQSAYLKEKDTPQKLLEQLTDTHWTDLTHLIEKLKEQKSHSEKMIQGDKEAVLQYFKELNDTLEQKKKSFLTALCDVGNLINQEYTPQIERMKEIREQQLELMALTISLQEESPLKFLEKVDDVRQHVQILKQRPLPEVQPVEIYPRVSKILKEEWSRTEIGQIKNVLIPKMKISPKGCHVPGLILVDTVWALSYLTDAGNEQIQMVIDSGIVPHLVPLLSHQEVKVQRPVHQRQQPGGGQLAGRQRQNGPDSEPTGAPRHRGAGEPATLDPLQPYRQARTTRSRQAAPKTMRTG

SEQ ID NO: 51338 - protein, 304 aa, Homo sapiens
  misc_feature (1)...(304): Xaa = X or * as defined in Table 2
XLDLEDVQVREKLKHATSKAKKLEKQLQKDKEKVEEFKSIPAKSNNIINETTTRNNALEKEKEKEEKKLKEVMDSLKQETQGLQKEKESREKELMGFSKSVNEARSKMDVAQSELDIYLSRHNTAVSQLTKAKEALIAASETLKERKAAIRDIEGKLPQTEQELKEKEKELQKLTQEETNFKSLVHDLFQKVEEAKSSLAMNRSRGKVLDAIIQEKKSGRIPGIYGRLGDLGAIDEKYDVAISSCCHALDYIVVDSIDIAQECVNFLKRQNIGVATFIGLDKILVDTVWALSYLTDAGNEQIQM

SEQ ID NO: 51339 - protein, 742 aa, Homo sapiens [sequence omitted]

SEQ ID NO: 51340 - protein, 938 aa, Homo sapiens
MVEKEKDALEGEKNIAIEFLTLENEIFRKKNHVCQYYIYELQKRIAEMETQKEKIHEDTKEINEKSNILSNEMKAKNKDVKDTEKKLNKITKFIEENKEKFTHVDLEDVQVREKLKHATSKAKKLEKQLQKDKEKVEEFKSIPAKSNNIINETTTRNNALEKEKEKEEKKLKEVMDSLKQETQGLQKEKESREKELMGFSKSVNEARSKMDVAQSELDIYLSRHNTAVSQLTKAKEALIAASETLKERKAAIRDIEGKLPQTEQELKEKEKELQKLTQEETNFKSLVHDLFQKVEEAKSSLAMNSSRGKVLDAIIQEKKSGRIPGIYGRLGDLGAIDEKYDVAISSCCHALDYIVVDSIDIAQECVNFLKRQNIGVATFIGLDKMAVWAKKMTEIQTPENTPRLFDLVKVKDEKIRQAFYFALRDTLVADNLDQATRVAYQKDRRWRVVTLQGQIIEQSGTMTGGGSKVMKGRMGSSLVIEISEEEVNKMESQLQNDSKKAMQIQEQKVQLEERVVKLRHSEREMRNTLEKFTASIQRLIEQEEYLNVQVKELEANVLATAPDKKKQKLLEENVSAFKTEYDAVAEKAGKVEAEVKRLHNTIVEINNHKLKAQQDKLDKINKQLDECASAITKAQVAIKTADRNLQKAQDSVLRTEKEIKDTEKEVDDLTAELKSLEDKAAEVVKNTNAAEESLPEIQKEHRNLLQELKVIQENEHALQKDALSIKLKLEQIDGHIAEHNSKIKYWHKEISKISLHPIEDNPIEEISVLSPEDLEAIKNPDFITNPIALLEARCHEMKPNLGAIAEYKNEGRIVFATRSRIGQNYLAPFSSEGPGAETPVGAGRWVLHNRLQPWSEWTVLQRPCPVKAPSPSTARRKEEGPPPPSPDGASSDAEPEPPSGRTESPATAAETASEELDNRSLEEILNSIPPPPAFSNDQ

SEQ ID NO: 51341 - protein, 70 aa, Homo sapiens
MGRFCTLDESVSLATMIDRIKRHLKLSHIRLALGVGRTLESQSQKSWPCVLVLGAAFCRVLRLTFTSQVV

SEQ ID NO: 51342 - protein, 22 aa, Homo sapiens
MPHFSATSGLFQDSEKPRDTAS

SEQ ID NO: 51343 - protein, 74 aa, Homo sapiens
MCVCYVSMRMNLFKKSFLRNFAYNSLLLNLNLSPPKTPIFPQYFLLGACTSRPIHPSKAPNYPTEGNHRVRIQR

SEQ ID NO: 51344 - protein, 110 aa, Homo sapiens
  misc_feature (1)...(110): Xaa = X or * as defined in Table 2
XTGNEEQTRINLNCTQKALMQVVDFLSRNKQLYQKTEILSLEKPLLLHTGMGRLCTLDESVSLATMIDRIKRHLKLSHIRLALGVGRTLESQVKVVALCAGSGEQRSAGC

SEQ ID NO: 51345 - protein, 98 aa, Homo sapiens
MACAAARSPADQDRFICIYPAYLNNKKTIAEGRRIPISKLQRFKMYVQQLDLTYFLRKIKCTLENGIVMSNTEAESGSSSNRKMGASALYSSHHVKNV

SEQ ID NO: 51346 - protein, 69 aa, Homo sapiens
MYVQQMDLTYFLRLRMSEGSGGAGKMAALEKMTFPRKMTFPEKPSHKKYRAALKKEKRKIRRQELARLI

SEQ ID NO: 51347 - protein, 84 aa, Homo sapiens
MSEGSGGAGKMAALEKMTFPKKMTFPEKPSHKKYWAALKKEKRKKRRQELARLRDSRLSQEEEEDTFIVEHHLQEEKLLERERE

SEQ ID NO: 51348 - protein, 143 aa, Homo sapiens
MAALEKMTFPKKMTFPEKPSHKKYRAALKKEKRKKRRQELARLRDSGLSQEEEEDTFIEEQQLEEEKLLERERERLHEEWLLREQKAQEEFRIEKYKGGSISGLRKLARTSRCHRTGGLVPGVRLWSLSPLQPDRIWLPSLHL

SEQ ID NO: 51349 - protein, 120 aa, Homo sapiens
  misc_feature (1)...(120): Xaa = X or * as defined in Table 2
VRLLKILQLQRFKMYVQQLDLTYFLRKIKCTLENGIVMSNTEAESGVQLKPGRWGASALYSSHHIIHXAXLLVPRXVSNVVCSRNDTXTKNKDTKNRRCXPKSSTRRGKXKRERKEKEVT

SEQ ID NO: 51350 - protein, 399 aa, Homo sapiens
  DOMAIN (237)..(248): Zinc finger C-x8-C-x5-C-x3-H type (and similar) domain identified by eMATRIX, accession number PF00642, p-value=7.375e-13, raw score of 11.59
LSQKEEEEDTFIEEQQLEEEKLLERERQRLHEEWLLREQKAQEEFRIKKEKEEAAKKRQEEQERKLKEQWEEQQRKEREEEEQKRQEKKEKEKTFMWKPSVDLFSHLASLRTPIICQDKGNAYQEHFPEKKKKRSSQLAIPEGAFGYPHHLLAILGLRCSRKHNFPTSSPTLLIKSMFTTFGMEQCRRDDYDPDASLEYSEEETYQQFLDFYEDVLPEFKNVGKVIQFKGLFEIQQCPRGKHCNFLHVFRNPNNEFWEANRDIYLSPDRTGSSFGKNSERRERMGHHDDYYSRLRGRRNPSPDHSYKRNGESERKSSRHRGKKSHKRTSKSRERHNSRSRGRNRDRSRDRSRGRGSRSRSRSRSRRSRRSRSQSSSRSRSRGRRRSGNRDRTVQSPKSK

SEQ ID NO: 51351 - protein, 39 aa, Homo sapiens
TLSLVGRGPRGRKPILSQESQQPRSRREKPGRNPGGTRL

SEQ ID NO: 51352 - protein, 527 aa, Homo sapiens
  DOMAIN (364)..(375): Zinc finger C-x8-C-x5-C-x3-H type (and similar) domain identified by eMATRIX, accession number PF00642, p-value=7.375e-13, raw score of 11.59
  DOMAIN (212)..(380): Zinc finger C-x8-C-x5-C-x3-H type domain identified by PFam, accession name zf-CCCH, E-value=0.0002, PFam score of 21.4
  misc_feature (1)...(527): Xaa = X or * as defined in Table 2
CPIQRQSPGPAQTGRWEPLPCTVPITLRMSEGSGGAGKMAALEKMTFPKKMTFPEKPSHKKYRAALKKEKRKIRRQELARLRDSGLSQKEEEEDTFIEEQQLEEEKLLERERERLHEEWLLREQKAQEEFRIKKEKEEAAKKRQEEQERKLKEQWEEQQRKEREEEEQKRQEKKEKEEALQKMLDQAENELENGTTWQNPEPPLDFRVMEKDGVNCPFYSKTGACRFGDRCSRKHYFPTSSPTLLIKSMFTTLGMEQCRRDDYDPDASLEYSEEETYQQFLDFYEDVLPEFKNVGKVIQFKVSCNLEPHLRGNIYVQYQSEEECQAALSLFNGRWYVAGRQLQCEFXTGDRWKMAICGLFEIQQCPRGKHCNFLHVFRNPNNEFWEANRDIYLSPDRTGSSFGKNSERRERMGHHDDYYSRLRGRRNPSPDHSYKRNGESERKSSRHRGKKSHKRTSKSRERHNSRSRGRNRDRSRDRSRGRGSRSRSRSRSRRSRRSRSQSSSRSRSRGRRRSGNRDRTVQSPKSK

SEQ ID NO: 51353 - protein, 26 aa, Homo sapiens
CRILWSPHLHHPLHLVAPFPLALLEW

SEQ ID NO: 51354 - protein, 429 aa, Homo sapiens
  DOMAIN (343)..(398): Histone H2A proteins domain identified by eMATRIX, accession number BL00046, p-value=2.174e-37, raw score of 12.95
  DOMAIN (304)..(426): Core histone H2A/H2B/H3/H4 domain identified by PFam, accession name histone, E-value=1.3e-34, PFam score of 128.4
MDEEIRVHDERLAQKHTNRGIAGLTPEPQSLHFELVALTVTLKTELSLKGLVLFYSLRGSGKRLKKTRKYDIITTPAERVEMAPLNEEDDEDEDSTVFDIKYRARRPAVARSALAQLWRSGPCPQLRFLVFKIFTAPLQFLCPHPSSSTLTFQQDAVEGLMVESDLGFRQLQLNLMEKLDSSALRRNTRAPSARCLPLVLAEMAAAESDLPNPWWHFSATGSPIKTLYTQTMSTLGLDVFCGAGQRGTFCEDRVGITIHGKYFLETFWNRKGRRNRNEVKESGGGGAGRQREGARRGGGGGGVGAENMAGGKAGKDSGKAKAKAVSRSQRAGLQFPVGRIHRHLKTRTTSHGRVGATAAVHRAAIPGYLTAEVLELAGNASKDLKVKRITPRHLQLAIRGDEELDSLIKATIAGGGMYYYLSLDSYWSF

SEQ ID NO: 51355 - protein, 102 aa, Homo sapiens
  misc_feature (1)...(102): Xaa = X or * as defined in Table 2
EELGYAGRGMGARQPPPARKAVSPLQERAEPVGSPGXGWRSRPSTHGIASHGGPACSLCSLHFTFFVDFPSLFSPICLPEGWDWQQEQPCLLYLSSPRCTQA

SEQ ID NO: 51356 - protein, 214 aa, Homo sapiens
  DOMAIN (58)..(113): Histone H2A proteins domain identified by eMATRIX, accession number BL00046, p-value=2.895e-29, raw score of 12.95
  DOMAIN (24)..(151): Core histone H2A/H2B/H3/H4 domain identified by PFam, accession name histone, E-value=2.4e-08, PFam score of 41.1
  misc_feature (1)...(214): Xaa = X or * as defined in Table 2
RRRGSAAGGRAAERKAEVGAMNMAGGKAGKDSGKAKAKAVSRSQRAGLQFPVGRIHRHLKTRTTSHGRVGATAAVYSAAILEYLTAEVLELAGYASKDLQSKSVSLPRHLQLAIPWVIEELDSLIQGLPXAGGGVIPSHPHKSLIGKEGDSKKTALEGMLLTQPLSLPRHLYCNWDKKNNGDMWNFLPPVKWKSIDNYCRHDKRNICMFLDSEV

SEQ ID NO: 51357 - protein, 338 aa, Homo sapiens
  DOMAIN (193)..(218): Hypothetical yabO/yceC/sfhB family proteins domain identified by eMATRIX, accession number BL01129E, p-value=6.651e-20, raw score of 13.25
  misc_feature (1)...(338): Xaa = X or * as defined in Table 2
SVCWAGGAPRAHSTRTHAWLGRPAMEPGSVENLSIVYRSRDFLVVNKHWDVRIDSKAWRETGRPEPQVASVEESGSDSGLCHHSRFCHQLDFSTSGALCVALLVLGGLPGSTGLPRELRAILPLLQLRGHIQESRVSIVRWGGPGPRVSPTNLTPAFCAPGCENPKPSLTGSWSGRXVWIGPAPSLIRHRPHPAGRTHQLRVHCSALGHPVVGDLTYGEVSGREDRPFRMMLHAFYLRIPTDTECVEVCTPDPFLPSLDACWSPHTLLQSLDQLVAGLKGQPPDPXTRGXGGPRPGSPSALLPGHGRPPPPTTKPPETEAQRGPCLQWLSEWTLEPDS

SEQ ID NO: 51358 - protein, 257 aa, Homo sapiens
  misc_feature (1)...(257): Xaa = X or * as defined in Table 2
RWAPRRGLSVDLDGGSSAPLCPPATTARLDAEPHGSLPNSCLWECSCLLQGIWAAGPSGLSLHYPPLSSPLGSSPPSRPQRLVLIRAGRGGWVGSVGETMTSSYGHVLERQPALGGRLDSPGNLDTLQAKKNFSVSHLLDLEEAGDMVAAQADENVGESSRTRGGGAGLGKGLSGVQTQRASAVWESSRLKMLSRVGRASLGQRMTAXGRLQLYPHAPKSVTDRSPCSSQVTKSWNRGALQHSMIFTKRCLFQTLKE

SEQ ID NO: 51359 - protein, 387 aa, Homo sapiens
  DOMAIN (152)..(165): SH3 DOMAIN SIGNATURE domain identified by eMATRIX, accession number PR00452D, p-value=2.688e-12, raw score of 17.02
  DOMAIN (295)..(370): Src homology domain 2 domain identified by PFam, accession name SH2, E-value=2.4e-36, PFam score of 108.4
  misc_feature (1)...(387): Xaa = X or * as defined in Table 2
KMAEEVVVVAKFDYVAQQEQELDIKKNERLWLLDDSKSWWRVRNSMNKTGFVPSTYVGRENSARKASIVKNLKDTLGIGKVKRKPSVPDSASPADDSFVDPGERLYDLNMPAYVKFNYMAEREDELSLIKGTKVIVMEKCSDGWWRGTYNGQVGWFPSNYVTEEGESPLGDHVGSLSEKLAAVVNNLNTGQVLHVVQALYPFSSSNDEELNFEKGDVMDVIEKPENDPEWWKCRKINGMVGLVPQKLWXPLLQSIQLTSGLGTLTFQCGFIRPYIPGKFVGNPWYYGKVTRHQAEMALNERGHEGDFLIRDSESSPNDFSVSLKAQGKNKHFKVQLKETVYCIWQRKSCTMEXLVEHYKKAPNFYNVNKGEKLYLVKHLSMILLTQK

SEQ ID NO: 51360 - protein, 99 aa, Homo sapiens
VNVLNQEIEAFSLSEDTSSGLPEDRVVSVSFRVLYPIVITSLGVFYDANDVGFQRNITVKLYQAEQEEALFIARFSPPSCGVQVNKLWYKPVEQFILPE

SEQ ID NO: 51361 - protein, 111 aa, Homo sapiens
AKLAGAAVPVCARGRAAPLAAAALPAARLPSGAGPAGLVSDVRRRPFAREPEPRVPSQPPALSALGALALKLFSSPPSCWSFSVKTGVLVPWIMCISWPYFLSGNLLTMMW

SEQ ID NO: 51362 - protein, 209 aa, Homo sapiens
  DOMAIN (71)..(86): WILM'S TUMOUR PROTEIN SIGNATURE domain identified by eMATRIX, accession number PR00049D, p-value=4.508e-09, raw score of 0.00
  misc_feature (1)...(209): Xaa = X or * as defined in Table 2
LNQKGKGGRGEALKNDLVVAPPPSPRRGVRXEALHVPDTGPFKKPRKRKXNQRQREAERKXTFPREEEARRETHGPLPAPRPPPPLCPPAASSAPRPGPKGARXLSLSAEGRARRRSAGASGGAGAAATAAAAAAPEHPRGSEPRQPASPAPQRERPRRPAPRLPPQCPRPSKGRAWTLQTTTGQKVCTGAGTRRAWRRAGAVRRAFWA

SEQ ID NO: 51363 - protein, 308 aa, Homo sapiens
  DOMAIN (116)..(151): Crystallins beta and gamma 'Greek key' motif proteins domain identified by eMATRIX, accession number BL00225B, p-value=4.857e- 36, raw score of 18.06
  DOMAIN (84)..(304): Beta/Gamma crystallin domain identified by PFam, accession name crystall, E-value=1.2e-89, PFam score of 311.2
MCGLAGWSRAWKEKDWKIRDKKVWGRGMCREIWDWAQRAKIVVSHVKAQCRASTIEEALNNQVEKMIWSFDSSQRLPSATLLLAITFYEDRAFQGRSYECTTDCPNLQPYFSRCNSIRVESGCWMIYERPNYQGHQYFLRRGEYPDYQQWMGLSDSIRSCCLIPPAHRGTLIMTLPHMSIAKNMKRVILQESKLDCVLHIFNMLHRPSYSVGQWSTQMASSHRLRIYEREDYRGQMVEITEDCSSLHDRFHLSEIHSFNVLEGSWVLYELPNYQGRQYLLRPGDCRWCQDWGATDARVGSLRRAVELY

SEQ ID NO: 51364 - protein, 145 aa, Homo sapiens
  DOMAIN (35)..(70): Crystallins beta and gamma 'Greek key' motif proteins domain identified by eMATRIX, accession number BL00225B, p-value=4.273e- 29, raw score of 18.06
  DOMAIN (3)..(141): Beta/Gamma crystallin domain identified by PFam, accession name crystall, E-value=4.5e-65, PFam score of 229.6
MGKITLYEDRGFQGRHYECSSDHPNLQPYLSRCNSARVDSGCWMLYEQPNYSGLQYFLRRGDYADHQQWMGLSDSVRSCRLIPHDRFRFNEIHSLNVLEGSWVLYELSNYRGRQYLLMPGDYRRYQDWGATNARVGSLRRVIDFS

SEQ ID NO: 51365 - protein, 174 aa, Homo sapiens
  DOMAIN (35)..(70): Crystallins beta and gamma 'Greek key' motif proteins domain identified by eMATRIX, accession number BL00225B, p-value=4.273e- 29, raw score of 18.06
  DOMAIN (3)..(170): Beta/Gamma crystallin domain identified by PFam, accession name crystall, E-value=5.2e-92, PFam score of 319.1
MGKITLYEDRGFQGRHYECSSDHPNLQPYLSRCNSARVDSGCWMLYEQPNYSGLQYFLRRGDYADHQQWMGLSDSVRSCRLIPHSGSHRIRLYEREDYRGQMIEFTEDCSCLQDRFRFNEIHSLNVLEGSWVLYELSNYRGRQYLLMPGDYRRYQDWGATNARVGSLRRVIDFS

SEQ ID NO: 51366 - protein, 199 aa, Homo sapiens
  DOMAIN (147)..(182): Crystallins beta and gamma 'Greek key' motif proteins domain identified by eMATRIX, accession number BL00225B, p-value=9.182e- 22, raw score of 18.06
  DOMAIN (28)..(197): Beta/Gamma crystallin domain identified by PFam, accession name crystall, E-value=1.3e-82, PFam score of 287.9
  misc_feature (1)...(199): Xaa = X or * as defined in Table 2
MGKGSPAHAQGPGSFLHGGAGDQGRGRPITLYEDRGFQGRHYECSSDHPNLQAYLSRCNSVRVDSGCWVLYEQPNYSGLQXFLRRGDYADHQQWMGLSDSVRSCRLIPHASSHRLRIYEREDYRGQMVEITEDCSSLHDRFHLSEIHSFNVLEGSWVLYELPNYQGRQYLLRPGDCRWCQDWGATDARVGSLRRAVELY

SEQ ID NO: 51367 - protein, 413 aa, Homo sapiens
MERAEFVFTGIDAYSRYGFAYPACNASAKTTSVDSWNALSTVMVFHTALPLTKALTLRLKKLVTVSLVDSTVVLWLWQLQTQLKVAKDRAFSPCPSVGEENPPYESLQISPDVPLRRTRSRCQVHNYTKCPAWGQVPAHAEVRGEWADGQLPQPILDQSTPMILTRVLWPYSKGGKKVSLPLSAPGEKGGPCRQGSKSGAAVGGVLQALLWRKSCCPEWRQGWMWVDNQLIGTTQPFMLYVTPLSNENEVIETGPAVQVNAVKFPSKSALTNIYKHLMITAQRFTVQIEEKLLLKLLSFFGYDQAESEVEKYDENLHEKTAEQGGTPIRYYFENLKISIPQIKLSVFTSNKLPLDLKELLSQAARILGSVDFLGNPMGLLNDVSEGVTGLIKYGNVGGLIRNVTHGVSNSAAK

SEQ ID NO: 51368 - protein, 37 aa, Homo sapiens
SILRCSVISYFSFSVSKISPSWCLGFRSFFFLKRTRG

SEQ ID NO: 51369 - protein, 49 aa, Homo sapiens
  misc_feature (1)...(49): Xaa = X or * as defined in Table 2
MRCEIILVLIPYVYFYSNKLLCSRLXXXXXGGAVLKNPWGGQSLPGLAR

SEQ ID NO: 51370 - protein, 52 aa, Homo sapiens
  misc_feature (1)...(52): Xaa = X or * as defined in Table 2
RDDPRVRPPPNSHTXPQQEPGLXLIKCTSPPQAPAPRTVHGPYFYMRLIKMF

SEQ ID NO: 51371 - protein, 427 aa, Homo sapiens
  DOMAIN (370)..(390): BACTERIOFERRITIN SIGNATURE domain identified by eMATRIX, accession number PR00601A, p-value=3.744e-09, raw score of 14.26
CFSFVFVRHSSRHCREYETLITADFPPEASYLMSLCSWSVTTMVAFLAQSRPSGSAGAHRHSRVRSSTALGHSKRLADTDLALMKPAWTPAFQHCMQHPNQPCEEKRYEQMVTQQSDTHTQKATCRGSTCWALGQPQLLVSHVIMKREQILYSGPCCQMTSPSCQLILSCDKTEFYVLFIPALMDETAFLVKFAGTLSDGLGKTMDNRHQSEREYIRYHAATSGEHLVAGIHGLAHGKSWVTSGSAAAGPQRRLCINLIAAIKKERLQQPLSFSLGIIGGLTSVITSTVEGVKTEGGVSGFISGLGKGLVGTVTKPVAGALDFASETAQAVRDTATLSGPRLKYFQVPLLVGVRWHSKRQPPNFPLKFPGNPIVLRKADEALKSQLGALGLRLRGPYCGMIKWGPADSGLLLRGAKLNGDERGDLKL

SEQ ID NO: 51372 - protein, 1154 aa, Homo sapiens
  misc_feature (1)...(1154): Xaa = X or * as defined in Table 2
QPGHTIYLLPTVVICNLLPCELDFYVKGMPINGTLKPGKEAALHTADTSQNIELGVSLENFPLCKELLIPPGTQNYMVRMRLYDVNRRQLNLTIRIVCRAEGSLKIFISAPYWLINKTGLPLIFRQDNAKTDAAGQFEEHELARSLSPLLFCYADKEQPNLCTMRIGRGIHPEGMPGWCQGFSLDGGSGVRALKVIQQGNRPGLIYNIGIDVKKGRGRYIDTCMVIFAPRYLLDNKSSHKLAFAQREFARGQGTANPEGYISTLPGSSVVFHWPRNDYDQLLCVRLMDVPNCIWSGGFEVNKNNSFHINMRDSLGKCFFLRVEITLRGATYRISFSDTDQLPPPFRIDNFSKVPVVFTQHGVAEPRLRTEVKPMTSLDYAWDEPTLPPFITLTVKGAGSSEINCNMNDFQDNRQLYYENFIYIAATYTFSGLQEGTGRPVASNKAITCAELVLDVSPKTQRVILKKKEPGKRSQLWRMTGTGMLAHEGSSVPHNPNKPSAARSTEGSAILDIAGLAAVTDNRYEPLMLRKPDRRRSTTQTWSFREGKLTCGLHGLVVQAKGGLSGLFDGAEVVLGPDTSMELLGPVPPEQQFINQKMRPGSGMLSIRVIPDGPTRALQITDFCHRKSSRSYEVDELPVTEQELQKLKNPDTEQELEVLVRLEGGIGLSLINKVPEELVFASLTGINVHYTQLATSHMLELSIQDVQVDNQLIGTTQPFMLYVTPLSNENEVIETGPAVQVNAVKFPSKSALTNIYKHLMITAQRFTVQIEEKLLLKLLSFFGYDQAESEVEKYDENLHEKTADQGGTPIRYYFENLKISIPQIKLSVFTSNKLPLDLKALKSTLGFPLIRFEDAVINLDPFTRVHPYETKEFIINDILKHFQEELLSQAARILGSVDFLGNPMGLLNDVSEGVTGLIKYGNVGGLIRNVTHGVSNSAAKFAGTLSDGLGKTMDNRHQSEREYIRYHAATSGEHLVAGIHGPGLMGIIGVGLTSVITSTSGRVXKQKGGVSGFISGLGKGLVGTVTKPVAGALDFASETAQAVRDTATLSGPRTQAQRVRKPRCCTGPQGLLPRYSESQAEGQEQLFKLTDNIQDEFFIAVENIDSYCVALISSKAVYFLKSGDYVDREAIFLEVKYDDLYHCLVSKDHGKVMCR

SEQ ID NO: 51373 - protein, 149 aa, Homo sapiens
QSWQPPREAESLQPMTVVGTDYVFHNDTKVVFLSPAVPEEPEAYNLTVLIEMDGHRALLRTEAGAFEYVPDPTFENFTGGVKKQVNKLIHARGTNLNKAMTLQEAEAFVGAERCTMKTLTETDLYCEPPEVQPPPKRQQFQDHPTPFCK

SEQ ID NO: 51374 - protein, 35 aa, Homo sapiens
LEGLEESVRDRCKKEFTDLMIEMDSRLLGPTSKVK

SEQ ID NO: 51375 - protein, 52 aa, Homo sapiens
PGIPVLDYRTYTDGFFSLPSKDGDKDVMITGKLDILKPQNQHRVFTVESRVI

SEQ ID NO: 51376 - protein, 1870 aa, Homo sapiens
  DOMAIN (836)..(1125): IPT/TIG domain identified by PFam, accession name TIG, E- value=7.3e-55, PFam score of 195.7
  misc_feature (1)...(1870): Xaa = X or * as defined in Table 2
FVRRTCRESRCWPGAETELDHWSLGEGVRGAMALQLWALTLLGLLGAGASLRPRKLDFFRSEKELNHLAVDEASGVVYLGAVNALYQLDAKLQLEQQVATGPALDNKKCTPPIEASQCHEAEMTDNVNPLLLVDPPRKRLVECGQLLKGICALRALSNISLRLFYEDGSGEKSFVASNDEGVATVGLVSSTGPGGDRVLFVGKGNGPHDNGIIVSTRLLDRTDSREAFEAYTDHATYKAGYLSTNTQQFVAAFEDGPYVFFVFNQQDKHPARNRTLLARMCREDPNYYSYLEMDLQCRDPDIHAAAFGTCLAASVAAPGSGRVLYAVFSRDSRSSGGPGAGLCLFPLDKVHAKMEANRNACYTGTREARDIFYKPFHGDIQCGGHAPGSSKSFPCGSEHLPYPLGSRDGLRGTAVLQRGGLNLTAVTVAAENNHTVAFLGTSDGRILKVYLTPDGTSSEYDSILVEINKRVKRDLVLSGDLGSLYAMTQDKVFRLPVQECLSYPTCTQCRDSQDPYCGWCVVEGRCTRKAECPRAEEASHWLWSRSKSCVAVTSAQPQNMSRRAQGEVQLTVSPLPALSEEDELLCLFGESPPHPARVEGEAVICNSPSSIPVTPPGQDHVAVTIQLLLRRGNIFLTSYQYPFYDCRQAMSLEENLPCISCVSNRWTCQWDLRYHECREASPNPEDGIVRAHMEDSCPQFLGPSPLVIPMNHETDVNFQGKNLDTVKGSSLHVGSDLLKFMEPVTMQESGTFAFRTPKLSHDANETLPLHLYVKSYGKNIDSKLHVTLYNCSFGRSDCSLCRAANPDYRCAWCGGQSRCVYEALCNTTSECPPPVITRIQPETGPLGGGIRITILGSNLGVQAGDIQRISVAGRNCSFQPERYSVSTRIVCVIEAAETPFTGGVEVDVFGKLGRSPPNVQFTFQQPKPLSVEPQQGPQAGGTTLTIHGTHLDTGSQEDVRVTLNGVPCKVTKFGAQLQCVTGPQATRGQMLLEVSYGGSPVPNPGIFFTYRENPVLRAFEPLRSFASGGRSINVTGQGFSLIQRFAMVVIAEPLQSWQPPREAESLQPMTVVGTDYVFHNDTKVVFLSPAVPEEPEAYNLTVLIEMDGHRALLRTEAGAFEYVPDPTFENFTGGVKKQVNKLIRARGTNLNKAMTLQEAEAFVGAERCTMKTLTENDLYCEPPEVQPPPKRRQKRDTTHNLPEFIVKFGSREWVLGRVEYDTRVSDVPLSLLLPLVIVPMVVVIAVSVYCYWRKSQQAEREYEKIKSQLEGLEESVRDRCKKEFTDLMIEMEDQTNDVHEAGIPVLDYKTYTDRVFFLPSKDGDKDVMITGKLDIPEPRRPVVEQALYQFSNLLNSKSFLINFIHTLENQPEFSARAKVYFASLLTVALHGKLEYYTDIMHTLFLELLEQYVVAKNPKLMLRRSVTVLERMLSNWMSICLYQYLKDSAGEPLYKLFKAIKHQVEKGPVDAVQKKAKYTLNDTGLLGDDVEYAPLTVSVIVQDEGVDAIPVKVLNCDTISQVKEKIIDQVYRGQPCSCWPRPDSVVLEWRPGSTAQILSDLDLTSQREGRWKRVNTLMHYNVRDGATLILSKVGVSQQPEDSQQDLPGERHALLEEENRVWHLVRPTDEVDEGKSKRGSVKEKERTKAITEIYLTRLLSVKGTLQQFVDNFFQSVLAPGHAVPPAVKYFFDFLDEQAEKHNIQDEDTIHIWKTNSLPLRFWVNILKNPHFIFDVHVHEVVDASLSVIAQTFMDACTRTEHKLSRDSPSNKLLYAKEISTYKKMVEDYYKGIRQMVQVSDQGHXTHTLAEISRAHTDSLNTLVALHQLYQYTQKYYDEIINALEEDPAAQKMQLAFRLQQIAAALENKVTDL

SEQ ID NO: 51377 - protein, 1795 aa, Homo sapiens
  DOMAIN (415)..(463): G-protein gamma subunit profile domain identified by eMATRIX, accession number BL50058, p-value=5.557e-09, raw score of 27.23
  misc_feature (1)...(1795): Xaa = X or * as defined in Table 2
AREKCGGAMGAGSSTEQRSPEQPPEGSSTPAEPEPSGGGPSAEAAPDTTADPAIAASDPATKLLQKNGQLSTINGVAEQDELSLQEGDLNGQKGALNGQGALNSQEEEEVIVRQVDHIDSEDVSDRDSDTEMTTKSAVVHDITDDGQEETPDIIEQIPSSESNLEELTQPTESQANDIGFKKVFKFVGFKFTVKKDKTEKPDTVQLLTVKKDEGEGAAGAGDHQDPSLGAGEAASKESEPKQSTEKPEETLKREQSHAEISPPAESGQAVEECKEEGEEKQEKEPSKSAESPTSPVTSETGSTFKKFFTQGWAGWRKKTSFRKPKEDEVEASEKKKEQEPEKVDTEEDGKAEVASEKLTASEQAHPQEPAESAHEPRLSAEYEKVELPSEEQVSGSQGPSEEKPAPLATEVFDEKIEVHQEEVVAEVHVSTVEERTEEQKTEVEETAGSVPAEELVGMDAEPQEAEPAKELVKLKETCVSGEDPTQGADLSPDEKVLSKPPEGVVSEVEMLSSQERMKVQGSPLKKLFTSTGLKKLSGKKQKGKRGGGDEESGEHTQVPADSPDSQEEQKGESSASSPEEPEEITCLEKGLAEVQQDGEAEEGATSDGEKKREGVTPWASFKKMVTPKKRVRRPSESDKEDELDKVKSATLSSTESTASEMQEEMKGSVEEPKPEEPKRKVDTSVSWEALICVGSSKKRARRGSSSDEEGGPKAMGGDHQKADEAGKDKETGTDGILAGSQEHDPGQGSSSPEQAGSPTEGEGVSTWESFKRLVTPGKKSKSKLEEKSEDSLAGSGVEHSTPDTEPGKEESWVSIKKFIPGLRKKRPDGKQEQAPVEDAGPTGANEDDSDVPAVVPLSEYDAVEREKMEAQQAQKSAEQPEQKAATEVSKELSESQVHMMAAAVADGTRAATIIEERSPSWISASVTEPLEQVEAEAALLTEEVLEREVIAEEEPPTVTEPLPENREARGDTVVSEAELTPEAVTAAETAGPLGAEEGTEASAAEETTEMVSAVSQLTDSPDTTEEATPVQEVEGGVPDIEEQERRTQEVLQAVAEKVKEESQLPGTGGPEDVLQPVQRAEAERPEEQAEASGLKKETDVVLKVDAQEAKTEPFTQGKVVGQTTPESFEKAPQVTESIESSELVTTCQAETLAGVKSQEMVMEQAIPPDSVETPTDSETDGSTPVADFDAPGTTQKDEIVEIHEENEVASGTQSGGTEAEAVPAQKERPPAPSSFVFQEETKEQSKMEDTLEHTDKEVSVETVSILSKTEGTQEADQYADEKTKDVPFFEGLEGSIDTGITVSREKVTEVALKGEGTEEAECKKDDALELQSHAKSPPSPVEREMVVQVEREEYQXQSPTHVNEEKLEHETAVTVSEEVSKQLLQTVNVPIIDGAKEVSSLEGSPPPCLGQEEAVCTKIQVQSSEASFTLTAAAEEEKVLGETANILETGETLEPAGAHLVLEEKSSEKNEDFAAHPGEDAVPTGPDCQAKSTPVIVSATTKKGLSSDLEGEKTTSLKWKSDEVDEQVACQEVKVSVAIEEDLEPENGILELETKSSKLVQNIIQTAVDQFVRTEETATEMLTSELQTQAHVIKADSQDAGQETEKEGEDPQASAQDETPITSAKEESESTAVGQAHSDISKDMSEASEKTMTVEVEGSTVNDQQLEEVVLPSEEEGGGAGTKSVPEDDGHALLAERIEKSLVEPKEDEKGDDVDDPENQNFSPGRITDASGRLXPKESPDTNGPKQKEKEDAQGSSNCQEGKVHSESDKAITPQAQEELQKQERESAKSELTES

SEQ ID NO: 51378 - protein, 118 aa, Homo sapiens
  misc_feature (1)...(118): Xaa = X or * as defined in Table 2
ISYHGGRRRRPQPVGPLGSCRSXSSRRWSTTGRTTFRAGWKSCSTPPSTSSLPTSTGTWXGPGTSALLPPTPLPPPRAAATPCACACASESRMPAARALGLRVRRRLLEGRSGKDTQG

SEQ ID NO: 51379 - protein, 483 aa, Homo sapiens
  DOMAIN (34)..(51): Zinc finger C2H2 type, domain proteins. domain identified by eMATRIX, accession number BL00028, p-value=2.174e-12, raw score of 16.07
  DOMAIN (4)..(470): Zinc finger, C2H2 type domain identified by PFam, accession name zf-C2H2, E-value=1e-89, PFam score of 311.5
EKLYNCKECGKSFSRAPCLLKHERLHSGEKPFQCEECGKRFTQNSHLHSHQRVHTGEKPYKCEKCGKGYNSKFNLDMHQKVHTGERPYNHSGEKPFKCEECGKGFYTNSQCYSRQRSHSGEKPYKCVECGKGYKRRLDLDFHQRVHTGEKLYNCKECGKSFSRAPCLLKHERLHSGEKPFQCEECGKRFTQNSHLHSHQRVHTGEKPYKCEKCGKGYNSKFNLDMHQKVHTGERPYNHSGEKPFKCEECGKGFYTNSQCYSRQRSHSGEKPYKCVECGKGYKRRLDLDFHQRVHTGEKLYNCKECGKSFSRAPCLLKHERLHSGEKPFQCEECGKRFTQNSHLHSHQRVHTGEKPYKCEKCGKGYNSKFNLDMHQKVHTGERPYNHSGEKPFKCEECGKGFYTNSQCYSRQRSHSGEKPYKCVECGKGYKRRLDLDFHQRVHTGEKLYNCKECGKSFSRAPCLLKHERLHSGEKPFQCEECGK

SEQ ID NO: 51380 - protein, 178 aa, Homo sapiens
  DOMAIN (50)..(63): PROTEIN ZINC-FINGER METAL-BINDI domain identified by eMATRIX, accession number PD00066, p-value=4.462e-15, raw score of 13.92
  DOMAIN (4)..(147): Zinc finger, C2H2 type domain identified by PFam, accession name zf-C2H2, E-value=3.1e-33, PFam score of 123.9
EKLYNCKECGKSFSRAPCLLKHERLHSGEKPFQCEECGKRFTQNSHLHSHQRVHTGEKPYKCEKCGKGYNSKFNLDMHQKVHTGERPYNCKECGKSFGWASCLLTHQRLHSGEKPFKCEECGKRFTCKECGKSFGWASCLLTHQRLHSGEKPFKCEECGKRFTCKECGKSFGWASCLL

SEQ ID NO: 51381 - protein, 973 aa, Homo sapiens
  DOMAIN (10)..(49): PROTEIN ZINC FINGER ZINC-FINGER METAL-BINDING NU domain identified by eMATRIX, accession number PD01066, p-value=3.600e-30, raw score of 19.43
  DOMAIN (177)..(969): Zinc finger, C2H2 type domain identified by PFam, accession name zf-C2H2, E-value=6.4e-169, PFam score of 574.6
  misc_feature (1)...(973): Xaa = X or * as defined in Table 2
MTTFKEAMTFKDVAVVFTEEELGLLDLAQRKLYRDVMLENFRNLLSVGHQAFHRDTFHFLREEKIWMMKTAIQREGNSGDKIQTEMETVSEAGTHQEWSFQQIWEKIASDLTRSQDLVINSSQFSKEGDFPCQTEARTICNSHKTEIFPRAIGYKPSFSDVSHFDFHQQLHSGEKSHTCDECGKNFCYISALRIHQRVHMGEKCYKCDVCGKEFSQSSHLQTHQRVHTGEKPFKCVECGKGFSRRSALNVHHKLHTGEKPYNCEECGKAFIHDSQLQEHQRIHTGEKPFKCDICGKSFCGRSRLNRHSMVHTAEKPFRCDTCDKSFRQRSALNSHRMIHTGEKPYKCEKCGKGFICRRDLYTHHMVHTGEKPYNCKECGKSFRWASCLLKHQRVHSGEKPFKCEECGKGFYTNSQCYSHQRSHSGEKPYKCVECGKGYKRRLDLDFHQRVHTGEKLYNCKECGKSFSRASCLLKHERLHSGEKPFKCEECGKRFTQNSHLHSHQRVHTGEKPYKCDECGKGFRWSSTRLTHQRRHSRETPLKCEQHGKNIVQNSFSKVQEKVHSVEKPYKCEDCGKGYNRRLNLDMHQRVHMGEKTWKCRECDMCFSQASSLRLHQNVHVGEKPXQEHQRIHTGEKPFKCDICGKSFCGRSRLNRHSMVHTAEKPFRCDTCDKSFRQRSALNSHRMIHTGEKPYKCEECGKGFICRRDLYTHHMVHTGEKPYNCKECGKSFRWASCLLKHQRVHSGEKPFKCEECGKGFYTNSQCYSHQRSHSGEKPYKCVECGKGYKRRLDLDFHQRVHTGEKLYNCKECGKSFSRASCLLKHERLHSGEKPFKCEECGKRFTQNSHLHSHQRVHTGEKPYKCDECGKGFRWSSTRLTHQRRHSRETPLKCEQHGKNIVQNSFSKVQEKVHSVEKPYKCEDCGKGYNRRLNLDMHQRVHMGEKTWKCRECDMCFSQASSLRLHQNVHVGEKP

SEQ ID NO: 51382 - protein, 640 aa, Homo sapiens
  DOMAIN (211)..(246): PROTEIN BOLA TRANSCRIPTION REGULATION AC domain identified by eMATRIX, accession number PD02462A, p-value=3.278e-10, raw score of 22.48
  DOMAIN (104)..(640): Zinc finger, C2H2 type domain identified by PFam, accession name zf-C2H2, E-value=5.3e-84, PFam score of 292.5
  misc_feature (1)...(640): Xaa = X or * as defined in Table 2
FCILIGDKIQTEMETVSEAGTHQEWSFQQIWEKIASDLTRSQDLVINSSQFSKEGDFPCQTEARTICNSHKTEIFPRAIGYKPSFSDVSLFDFHQQLHSGEKSHTCDECGKNFCYISALHIHQRVHMGEKCYKCDVCGKEFSQSSHLQTHQRVHTVEKPFKCVECGKGFSRRSALNVHHKLHTGEKPYNCEECGKAFIHDSQLQEHQRIHTGEKPFKCDICGKSFCGRSRLNRHSMVHTAEKPFRCDTCDKSFRQRSALNSHRMIHTGEKPYKCEECGKGFICRRDLYTHHMVHTGEKPYNCKECGKSFRWASCLLKTSSESHSGEKPFKCEECGKGFYTISQCYSHQRSHSGEKPYKCVECGKGYKRRLDLDFHQRVHTGEKLYNCKECGKSFSRAPCLLKHERLHSGEKPFQCEECGKRFTQNSHLHSHQRVHTGEKPYKCEKCGKGYNSKFILYMHQRVHTGERPYNCKECGKSFGWASCLLKHQRLHSGENPFKCEECGKRFTQNSQLHSHQRVHTGEKPYKCDECGKGFSWSSTRLTHQRRHSRETPLKCEQHGKNIVQNSFSEKLPEKVHQCXKKPYKCEDLCGKGYNRRLXILDMHQRVHMGEKTWKCRECDMCFSQASSLRLHQNVHVGEKP

SEQ ID NO: 51383 - protein, 436 aa, Homo sapiens
  DOMAIN (290)..(305): LIM domain proteins domain identified by eMATRIX, accession number BL00478B, p-value=6.478e-14, raw score of 14.79
  DOMAIN (292)..(377): LIM domain containing proteins domain identified by PFam, accession name LIM, E-value=1.1e-10, PFam score of 42.8
  misc_feature (1)...(436): Xaa = X or * as defined in Table 2
KDGDHMGYTYKVIERILEIGAFRPHMSLGQLQSARGVACLGCKGTCSGFEPHSWRKICKSCNAAKRTTAXHLTXKNDRKLGRWLRDSKYSTLHLLGXKAGTASGFYKRNPMILTNPIATGKDPTFDTITYEWGSPWEFTQETGDCSYMGAHSPREEGSQLTGHQRGAFYRAARPAHAPGLPIYDQDPLALPVDFWRNELKTEWKEFVKKYKSEGPSALGEVALPGQGWLAPRKEGEGSRKKPEGGRRPPAATTNGSLSDPSKEVEYVCELCKGAAPPDSPVVYSDRAGYNKQWHPTCFVCAKCSEPLVDLIYFWKDGAPWCGRHYCESLRPRCAPACDEIIFAEDYQRVEDLAWHRKHFVCEGCEQLLSGLGVHRHPGVQLLVPQLAASPKRSLKGCPTPQPESPGIPTEKDKPGCARDPSLRVPDVTSKPSEINQ

SEQ ID NO: 51384 - protein, 444 aa, Homo sapiens; identical to SEQ ID NO: 42572
  DOMAIN (221)..(267): DEAD-box subfamily ATP-dependent helicases proteins domain identified by eMATRIX, accession number BL00039D, p-value=6.159e- 11, raw score of 21.67
  DOMAIN (1)..(26): Intermediate filament proteins domain identified by PFam, accession name filament, E-value=0.0025, PFam score of 16.3

SEQ ID NO: 51385 - protein, 41 aa, Homo sapiens
MFLIHEAAFRNSFCSLSPLSWPWLTEPGVGPGFKPGPSVFP

SEQ ID NO: 51386 - protein, 71 aa, Homo sapiens
ETPVSSRCEKHVSSPHLCPGIHRAVSLSSHSTCGRSWRSELHGPQSTNLSGNTELPLHFLFGAWQTGVFKM

SEQ ID NO: 51387 - protein, 1453 aa, Homo sapiens
  DOMAIN (164)..(211): Intermediate filaments proteins domain identified by eMATRIX, accession number BL00226D, p-value=4.450e-18, raw score of 19.10
  DOMAIN (131)..(209): Intermediate filament proteins domain identified by PFam, accession name filament, E-value=1.5e-06, PFam score of 28.4
LGAQQRELQEALGARAALEALLGRLQAERRGLDAAHERDVRELRARAASLTMHFRARATGPAAPPPRLREVHDSYALLVAESWRETVQLYEDEVRELEEALRRGQESRLQAEEETRLCAQEAEALRREALGLEQLRARLEDALLRMREEYGIQAEERQRAIDCLEDEKATLTLAMADWLRDYQDLLQVKTGLSLEVATYRALLEGESNPEIVIWAEHVENMPSEFRNKYYHYTDSLLQRENEWNLFSRQKAPLASFNHSSALYSNLSGHRGSQTGTSIGGDARRGFLGSGYSSSATTQQENSYGKAVSSQTNVRTFSPTYGLLRNTEAQVKTFPDRPKAGDTREVPVYISEDSTIARESYRDRRDKVAAGASESTRSNERTVILGKKTEVKATREQERNRPETIRTKPEEKMFDSKEKASEERNLRWEELTKLDKEARQRESQQMKEKAKEKDSPKEKSVREREVPISLEVSQDRRAEVSPKGLQTPVKDAGGGTGREAEARELRFRLGTSDATGSLQGDSMTETVAENIVTSILKQFTQSPETEASADSFPDTKVTYVDRKELPGERKTKTEIVVESKLTEDVDVSDEAGLDYLLSKDIKEVGLKGKSAEQMIGDIINLGLKGREGRAKVVNVEIVEEPVSYVSGEKPEEFSVPFKVEEVEDVSPGPWGLVKEEEGYGESDVTFSVNQHRRTKQPQENTTHVEEVTEAGDSEGEQSYFVSTPDEHPGGHDRDDGSVYGQIHIEEESTIRYSWQDEIVQGTRRRTQKDGAVGEKVVKPLDVPAPSLEGDLGSTHWKEQARSGEFHAEPTVIEKEIKIPHEFHTSMKGISSKEPRQQLVEVIGQLEETLPERMREELSALTREGQGGPGSVSVDVKKVQGAGGSSVTLVAEVNVSQTVDADRLDLEELSKDEASEMEKAVESVVRESLSRQRSPAPGSPDEEGGAEAPAAGIRFRRWATRELYIPSGESEVAGGASHSSGQRTPQGPVSATVEVSSPTGFAQSQVLEDVSQAARHIKLGPSEVWRTERMSYEGPTAEVVEVSAGGDLSQAASPTGASRSVRHVTLGPGQSPLSREVIFLGPAPACPEAWGSPEPGPAESSADMDGSGRHSTFGCRQFHAEKEIIFQGPISAAGKVGDYFATEESVGTQTSVRQLQLGPKEGFSGQIQFTAPLSDKVELGVIGDSVHMEGLPGSSTSIRHISIGPQRHQTTQQIVYHGLVPQLGESGDSESTVHGEGSADVHQATHSHTSGRQTVMTEKSTFQSVVSESPQEDSAGDTSGAEMTSGVSRSFRHIRLGPTETETSEHIAIRGPVSRTFVLAGSADSPELGKLADSSRTLRHIAPGPKETSFTFQMDVSNVEAIRSRTQEAGALGVSDRGSWRDADSRNDQAVGVSFKASAGEGDQAHREQGKEQAMFDKKVQLQRMVDQRSVISDEKKVALLYLDNEEEENDGHWF

SEQ ID NO: 51388 - protein, 1537 aa, Homo sapiens
  DOMAIN (6)..(53): Intermediate filaments proteins domain identified by eMATRIX, accession number BL00226D, p-value=9.171e-12, raw score of 19.10
  DOMAIN (17)..(42): Intermediate filament proteins domain identified by PFam, accession name filament, E-value=0.0025, PFam score of 16.3
  misc_feature (1)...(1537): Xaa = X or * as defined in Table 2
RVIDCLEDEKATLTLAMADWLRDYQDLLQVKTGLSLEVATYRIVEHVAVEGVSKLWKPLWQKSQSLVISSGVSFTGGRLNLERLRRGPTPLASTESVKQVLVNNRMIIDDEMVKTLAMSRTCSAPNPLTADVKTWSRSYRSEDAATGPVLGVASTVALLEGESNPEIVIWAEHVENMPSEFRNKSYHYTDSLLQRENERNLFSRQKAPLASFNHSSALYSNLSGHRGSQTGTSIGGDARRGFLGSGYSSSATTQQENSYGKAVSSQTNVRTFSPTYGLLRNTEAQVKTFPDRPKAGDTREVPVYIGEDSTIARESYRDRRDKVAAGASESTRSNERTVILGKXTEVKATREQERNRPETIRTKPEEKMFDSKEKASEERNLRWEELTKLDKEARQRESQQMKEKAKEKDSPKEKSVREREVPISLEVSQDRRAEVSPKGLQTPVKDAGGGTGREAEARELRFRLGTSDATGSLQGDSMTETVAENIVTSILKQFTQSPETEASADSFPDTKVTYVDRKELPGERKTKTEIVVESKLTEDVDVSDEAGLDYLLSKDIKEVGLKGKSAEQMIGDIINLGLKGREGRAKVVNVEIVEEPVSYVSGEKPEEFSVPFKVEEVEDVSPGPWGLVKEEEGYGESDVTFSVNQHRRTKQPQENTTHVEEVTEAGDSEGEQSYFVSTPDEHPGGHDRDDGSVYGQIHIEEESTIRYSWQDEIVQGTRRRTQKDGAVGEKVVKPLDVPAPSLEGDLGSTHWKEQARSGEFHAEPTVIEKEIKIPHEFHTSMKGISSKEPRQQLVEVIGQLEETLPERMREELSALTREGQGGPGTVSGDVKKVQGAGGSSVTLVAEVNVSQTVDADRLDLEELSKDEASEMEKAVESVVRESLSRQRSPAPGSPDEEGGAEAPAAGIRFRRWATRELYIPSGESEVAGGASHSSGQRTPQGPVSATVEVSSPTGFAQSQVLEDVSQAARHIKLGPSEVWRTERMSYEGPTAEVVEVSAGGDLSQAASPTGASRSVRHVTLGPGQSPLSREVIFLGPAPACPEAWGSPEPGPAESSADMDGSGRHSTFGCRQFHAEKEIIFQGPISAAGKVGDYFATEESVGTQTSVRQLQLGPKEGFSGQIQFTAPLSDKVELGVIGDSVHMEGLPGSSTSIRHISIGPQRHQTTQQIVYHGLVPQLGESGDSESTVHGEGSADVHQATHSHTSGRQTVMTEKSTFQSVVSESPQEDSAEDTSGAEMTSGVSRSFRHIRLGPTETETSEHIAIRGPVSRTFVLAGSADSPELGKLADSSRTLRHIAPGPKETSFTFQMDVSNVEAIRSRTQEAGALGVSDRGSWRDADSRNDQAVGVSFKASAGEGDQAHREQGKEQAMFDKKVQLQRMVDQRRQGECSGQNNGRATSILRESLEAKVEAFGDFSPEVAETYRLLGGADLAQGNHSGARKKLKKLERPQRPQGKTDGPGLNPGPTPGSVSQGQESAFSSVKPAVPRAKHHPATVALVFITAAAASPKFSTQQQEPTEQWLFQMYPPALNGPGMDPQA

SEQ ID NO: 51389 - protein, 144 aa, Homo sapiens
  DOMAIN (9)..(32): ACTIN SIGNATURE domain identified by eMATRIX, accession number PR00190C, p-value=2.742e-26, raw score of 11.49
  DOMAIN (1)..(115): Actin domain identified by PFam, accession name actin, E- value=5.1e-86, PFam score of 283.6
YVGVEAQSKRGILTLNYPIEHGIITNWDDMEKIWHHSFYNELRVAPEEHPTLLTEAPLNPKANREKMTQIMFETFNVPAMYVAIQAVLSLYSSGRTTGIVLDSGDGVTHNVPIYEVLLKSEQVLQGSPRDYSVTSHETLKPTSL

SEQ ID NO: 51390 - protein, 411 aa, Homo sapiens
  DOMAIN (8)..(43): Actins proteins domain identified by eMATRIX, accession number BL00406A, p-value=1.000e-40, raw score of 9.95
  DOMAIN (1)..(411): Actin domain identified by PFam, accession name actin, E- value=4.5e-130, PFam score of 428.1
  misc_feature (1)...(411): Xaa = X or * as defined in Table 2
MCEEETTALVCDNGSGLCKAGFAGDDAPRAVFPSIVGRPRHQGVMVGMGQKDSYVGDEAQSKRGILTLKYPIEHGIITNWDDMEKKKEAEELARNMAIQQELEKEKQRVAQQKQQQLEQEQFHAFEEMIRNQELEKERLKIVQEFGKVDPGLGGPLVPDSGEALLRCVPHLNSLIHTAFRLSHNCKASXATCGGQVLETWSTEQLRKYSHNRWIAPCGGAWAAVPTVSPVSQCQHCPGSGDMWNSLWKTDEEXIYHYPCSHPQAKCWVXLLQHRERRRTFPHTGSAGPHHTGLDSCKQFXAVREHGVRGIHETTYNSIMKCDIDIRKDLYANNVLSGGTTMYPGIADRMQKEITALAPSTMKIKIIAPPERKYSVWIGGSILASLSTFQQMWISKPEYDEAGPSIVHRKCF

SEQ ID NO: 51391 - protein, 421 aa, Homo sapiens
  DOMAIN (42)..(77): Actins proteins domain identified by eMATRIX, accession number BL00406A, p-value=1.000e-40, raw score of 9.95
  DOMAIN (35)..(421): Actin domain identified by PFam, accession name actin, E- value=1.4e-190, PFam score of 626.6
  misc_feature (1)...(421): Xaa = X or * as defined in Table 2
PRVRPRVRPRVRSLGEEPLIPSVLRSPAHSATHTMCEEETTALVCDNGSGLCKAGFAGDDAPRAVFPSIVGRPRHQGVMVGMGQKDSYVGDEAQSKRGILTLKYPIEHGIITNWDDMEKIWAPLLLTMELRVSTWKRHPTLLTEAPLNPKANREKMTQIMFETFNVPAMYVAIQAVLSLYASGRTTGIVLDSGDGVTHNVPIYEGYALPHAIMRLDLAGRDLTDYLMKILAKRGGYSFVTTAEREIVRDIKEKLCYVALDFEKXMATAASSSSLEKSYELPDGAGLSPIGKWTLPCPETLFQPYFISNGVPLEFNDDNLTIPSMKCDIDIPXGLICPTMFLSGGTTHVPWALLDRIQKENPSPGPPGTMKIKIIAPPEREVTSVWDLGGSILASLSTFQAMWISKPEYDDAGPSIVHRKCF

SEQ ID NO: 51392 - protein, 193 aa, Homo sapiens
  DOMAIN (123)..(189): SAM domain (Sterile alpha motif) domain identified by PFam, accession name SAM, E-value=0.027, PFam score of 12.0
KTDTSAVKTVTTEEYLVNPVGMNRYSVDTSASTFNHRGSLHPSSSLYCKRQNSGDSHLGGGPACTAGGPRTSPMSSGGPSAPGLRPPASSPKRNTTSLEGNRCASSPSQDAQDARRPRSRNPSAWTVEDVVWFVKDADPQALGPHVELFRKHEIDGNALLLLKSDMVMKYLGLKLGPALKLCYHIDKLKQAKF

SEQ ID NO: 51393 - protein, 621 aa, Homo sapiens
  misc_feature (1)...(621): Xaa = X or * as defined in Table 2
MGGGEQGTLRTAENQGLQVCPGEAGSSLGFSGNTPTNGLPARGDQTSYRDFWSGPQFPDTSLRTAAPGAREQCGTHGGEGSTLEGSRPDVPQDLFSPTLGFYGSTYPELEQGMLGGHXGPAENQGLQVCPGEAGSSLGFSGNTPTNGLPARGDQTSYRDFWSGPQFPDTSLRTAAPGAREQCGTHGGEGSTLEGSRPDVPQDLFSPTLGFYGSTYPELEQGMLGGHVEASREYQMLSHVGNPDYPHALATEQATSPSTESGSAGFKGVALAMLSKITMCVRIGILVFQQDQGSMCKAFSTTGMGLVTYLLTCRAWSRLQCGASYRAHDVNVLPGCSGPAALLLGDWFSLHSSDAVLPAQGQGMLSQGEADACITLPHLFPSREVVFLLGLEAGGLIPGAEGPPEDMGLVRGPPAVAAGPPPRWLSPEFCLLQYSEEEGCKEPLWLKVEAEVSTLYRFMPTGFTRGPFNIEHREWGNTTATWTRMISNHNKHSQRGRKMTARLPCGGAPHFSDRTDDKWRRSSLLTRSGCQTERLLTSQTEPLPAGGSPHFSNGETGQRRSSPPQRGCDRPQALLTSKTEQQRKSASHISYDERPGKDAPHFLDGMVAGKRRSSLSRLGSQA

SEQ ID NO: 51394 - protein, 486 aa, Homo sapiens
  DOMAIN (400)..(447): Intermediate filaments proteins domain identified by eMATRIX, accession number BL00226D, p-value=7.750e-38, raw score of 19.10
  DOMAIN (156)..(470): Intermediate filament proteins domain identified by PFam, accession name filament, E-value=2e-47, PFam score of 171.0
  misc_feature (1)...(486): Xaa = X or * as defined in Table 2
PATSPTSRAMAQPSAPAASMLLPCPECPSGPRFMTCCLSVSTFCSPSLRRPPGSIKGSSGLGGGSSRTSCRLSGALGAGSCRLGSAGGLGSTLGGNSYSSCYSFGSGGGYGSSFGGVDGLLAGGEKATMHNLIDFLASYLDKVPCPWKEANTELEVKIRDWYQRQAPGPARDYSQYYRTIEELQNKILTATVDNANILLQIDNARLACADDFRTKFETEQALRLSVEADINGLRRVLDELTLARADLEMQIENLKEEAWPTLKERTTEGRRLNALRGQVGWXRSMLEMDAAPGVDLSRILNEMPSCVDHRVTRCINRPGAELKLGSGGWTEELKREVATNSELVQSGKSKISELRRTMQALEIELQSQLSMKASLEGNLGGDRATAYCVQLSQIQGLIGSGEDQLAQLRCEMEQQNQDYKILLDVKTRLEQEIATYRRLLEGEDAHLTQCKKEPVTTRQVRTIVGKRSRDGKVILLPRSRFHQTTR

SEQ ID NO: 51395 - protein, 65 aa, Homo sapiens
  DOMAIN (38)..(59): Carboxylesterases type-B serine proteins domain identified by eMATRIX, accession number BL00122A, p-value=4.044e-10, raw score of 12.04
  misc_feature (1)...(65): Xaa = X or * as defined in Table 2
MQSRKTTQSGQMXGEGKAGPPLAGPPNRGDRPPPPVLFPGQPFGQPPLGPLPPGPPPXVPGYXPP

SEQ ID NO: 51396 - protein, 62 aa, Homo sapiens
  DOMAIN (2)..(29): Protamine P1 proteins domain identified by eMATRIX, accession number BL00048, p-value=5.725e-09, raw score of 6.39
RRERSRERDHSRSREKSRRHKSRSRDRHDDYYRERSRERERHRDRDRDRDRERDREREYRHR

SEQ ID NO: 51397 - protein, 142 aa, Homo sapiens
  DOMAIN (56)..(80): kw ANNEXIN ANTIGEN PROLINE TUMOR domain identified by eMATRIX, accession number DM00250B, p-value=1.851e-09, raw score of 13.84
KMADGVDHIDIYADVGEEFNQEAEYGGHDQIDLYDDVISPSANNGDAPEDRDYMDTPPPVPGYGPPPGPPPPQQGPPPPPGPFPPRPPGPLGPPLDTLAPPPHLPGPPPGAPPPAPHVEPSFLFLPPINSGHGLHSDRPRFH

SEQ ID NO: 51398 - protein, 356 aa, Homo sapiens
  DOMAIN (116)..(136): RIBOKINASE SIGNATURE domain identified by eMATRIX, accession number PR00990B, p-value=8.425e-10, raw score of 12.32
  misc_feature (1)...(356): Xaa = X or * as defined in Table 2
MGGIGARAAAAGKGRRRRARAPPGLPPPTSDGGGGAAAASSLRRLHAAPPPGPSAAGSASRVPPTIGSEAAPAREDRRQLHSGRVRASGSPRLTRPRPVKRRGRTRGGGAPRQGSAARPRGGKGAHSAVASARAAAGPGSASRPHGAASAAGTWALTYLVELFADIRVNVYVVHAVRHLPSACAAAAAAASCRFALVGVGSEASSKKLMDLLPKRELHGQNPVVTPCNKQFLSQFEMQSRKTTQSGQMSGEGKAGPPGGSSRAAFPQGGRGRGRFPGAVPGGDRFPGPAGPGGPPPPFQDPSVNSDPVCGTFGEHXPPGYQTPSNLSVRPMAKPKPEGTDLSRSREGFFKSRFAPN

SEQ ID NO: 51399 - protein, 560 aa, Homo sapiens
  DOMAIN (281)..(302): Carboxylesterases type-B serine proteins domain identified by eMATRIX, accession number BL00122A, p-value=9.690e-12, raw score of 12.04
  DOMAIN (86)..(160): RNA recognition motif. domain identified by PFam, accession name rrm, E-value=9.9e-05, PFam score of 29.2
  misc_feature (1)...(560): Xaa = X or * as defined in Table 2
MKMAGGVNHIDIYADVGEXFNQEAEYGGHDQIDVHDDAISPSANNGDAPEDRDYMDTLPPTVGDDVGKGAAPNVVYTYTGKRIALYIGNLTWWTTDEDLTEAVHSLGVNDILEIKFFENRANGQSKGFALVGVGSEASSKKLMDLLPKRELHGQNPVVTPCNKQFLSQFEMQSRKTTQSGQMSGEGKAGPPGGSSRAAFPQGGRGRGRFPGAVPGGDRFPGPAGPGGPPPPFPAGQTPPRPPLGSFQGPPGPPGPPPPGQVLPPPLAGPPNRGDRPPPPVLFPGQPFGQPPLGPLPPGPPPPVPGYGPPPGPPPPQQGPPPPPGPFPPRPTGSNLGHPLTLAPPSASFPGPPPGAPPPSPHVNPAFFPPPTNSGMPTSDSRGPPPTDPYGRPPPYDRGDYGPPGREMDTARTPLSEAEFEEIMNRNRAISSSAISRAVSDASAGVDYGSAIETLVTAISLIKTIPKYPADDRCTKFLISSLQDCLHGIESKSYGSGSRRRERSRERDHSRSREKSRRHKSRSRDRHDDYYRERSRERERHRDRDRDRDRERDREREYRHR

SEQ ID NO: 51400 - protein, 32 aa, Homo sapiens
  misc_feature (1)...(32): Xaa = X or * as defined in Table 2
TNFKSGLLGLAAEDXHCPIASEAPXTITDAEL

SEQ ID NO: 51401 - protein, 353 aa, Homo sapiens
  DOMAIN (306)..(317): GUANYLIN PRECURSOR SIGNATURE domain identified by eMATRIX, accession number PR00774C, p-value=5.418e-09, raw score of 11.76
  DOMAIN (289)..(306): Zinc finger, CCHC class domain identified by PFam, accession name zf-CCHC, E-value=0.00037, PFam score of 27.3
  misc_feature (1)...(353): Xaa = X or * as defined in Table 2
MWKGPKGLDMYGKSSVSPKTSDILGRDTLLLALKVQTVVLQTACGEGHVAGNCGRPLETEGSLQLTATKKLRDSVLQPKSPEFCQQFTRAWNRTQVPDETEAPAGTYAAQSGDLPWEINPLSSCSLLHEKDPPTASGPQTDQPKEHLTNFKSGFRGVRPLQGRLPWSFTLSGKSRFSGEGASTPTPSLCVSTPSPPFWGARNTQPLLLHPEWQCPLFXRSKYPNLVSLCPSPLFPRPDLLSLSAQSLISAPQPLISLCPNPLFPCPDLLSLHPNPLFPRPNPFPAFLEGACYKCQKSGHQAKECLQPGIPPKLRPICAGPHWKSDCPTHLAATPRAPGTLAQGSLTASQIFLA

SEQ ID NO: 51402 - protein, 42 aa, Homo sapiens; identical to SEQ ID NO: 31176

SEQ ID NO: 51403 - protein, 168 aa, Homo sapiens
  misc_feature (1)...(168): Xaa = X or * as defined in Table 2
ILNPVSGLFLFSSPLSLNLSSLSLNLFLLSILAPHFNLSILLISIPFIFPLEIELSNSPGSHSQSPWNSGPRLSDSFPDLLGLAAEEXHCPIASEAFSQTYRAYLSLSLSLSLSPEPPTAGDGVTHSSPVASTTITVLGQTSKPAQCWPLPKVCCHHSLTSDYVHPRP

SEQ ID NO: 51404 - protein, 85 aa, Homo sapiens
  misc_feature (1)...(85): Xaa = X or * as defined in Table 2
LANFCEESGAGEPGSHSQSPWNSGPRLSDSFPDLLGLAAEDRHCPIASEAPLLQRKSLYKSPCTSSTISXCCIPRSGISESLSVN

SEQ ID NO: 51405 - protein, 82 aa, Homo sapiens
FLTVLEAGKSKIKVPADSESGEGPFFGSIDDVFLLHPGSHSQSPWNSGPRLSDSFPDVLGLAAEDRCCPIALEAPSMRSPNA

SEQ ID NO: 51406 - protein, 129 aa, Homo sapiens
  misc_feature (1)...(129): Xaa = X or * as defined in Table 2
SSSGIWPSHSQSPLRSSPAKLLSRFRCSLSSLLLCLATLLLVWQPLPEPLELWPKAHLTDSFPDLLGLAAEDWHCPIPSEAPXTLTDAELRVTLTVEGKSIPFGAGKEVTLESYWVSLTLSFLICYMII

SEQ ID NO: 51407 - protein, 30 aa, Homo sapiens
  misc_feature (1)...(30): Xaa = X or * as defined in Table 2
CDLFLPHPNXSMYFVISPTPKKVLCNSPHT

SEQ ID NO: 51408 - protein, 87 aa, Homo sapiens
  misc_feature (1)...(87): Xaa = X or * as defined in Table 2
LRSGDLPWEINPLSSCSLFREEDPPTTSGPQTNQPKEHLTNFKSAAEDXRCQFASEAPXTITDAKLRVSLTAEGLLATLFLNPKPEY

SEQ ID NO: 51409 - protein, 76 aa, Homo sapiens
  misc_feature (1)...(76): Xaa = X or * as defined in Table 2
AFGCFTTGVGRVTDSDGPLYTGPWAPGSHSQSPWNSGPRLSDSFPDLLGLAAEDXHCPIASEAPFLTLIFLLCVIQ

SEQ ID NO: 51410 - protein, 45 aa, Homo sapiens
  misc_feature (1)...(45): Xaa = X or * as defined in Table 2
TFTPLKSYIKAPSSAGPVAEQEMTPEGKVGAGPEXLTWKNQFLFY

SEQ ID NO: 51411 - protein, 241 aa, Homo sapiens
  DOMAIN (140)..(170): Flocculin repeat proteins domain identified by eMATRIX, accession number PF00624I, p-value=7.568e-12, raw score of 9.10
  misc_feature (1)...(241): Xaa = X or * as defined in Table 2
FLVSLMLPPAVVMLNHCYSLIFTNALVKRLFAWNMLSELATCAGNLATGPRNARSPGFLLSCVPSVRDPTGNQTVQLTWQPLPEPLELWPKAHLTDSFPDLLGLATEDXHSPIASEAPWAIMDAELRVTLTVEDRDSSSSSSSSSSSSSSSSSSSSSSSSSSSSSSSSSQSSSSSSSPCDLFLPHPNXSMYFVISPTLKKVLYNVTHPXEVSLXFSPPLRMYFVRSIPCPQNIALNSTAYP

SEQ ID NO: 51412 - protein, 20 aa, Homo sapiens
QMFLLTSPQYHPLPQDLPSA

SEQ ID NO: 51413 - protein, 244 aa, Homo sapiens
  DOMAIN (43)..(58): RIBOSOMAL PROTEIN P2 SIGNATURE domain identified by eMATRIX, accession number PR00456E, p-value=1.570e-09, raw score of 3.06
  DOMAIN (107)..(210): Retroviral aspartyl protease domain identified by PFam, accession name rvp, E-value=7.7e-09, PFam score of 36.5
  misc_feature (1)...(244): Xaa = X or * as defined in Table 2
SCMCLALDPCNHGEGHQPDFSGVKFRRHGADNHEASAATATTAAATTVAAAAAAAAAAAAARVTLTGSHFQSPWNSGPRLSDSFPDLLSLATEDXRCPIASEVPWTITEAELRVTLTVEGKSIPCLIDTGATHSTLPSFQGPVSLAPITVVGIDGQASKPLKTPPLWCQLGQHSFMHSFLVIPHLCPIFLIRGRNILTKLSASLTIPGSTANISLVAFFPNPKPPLCPLTSPQYHPLPQDLPSA

SEQ ID NO: 51414 - protein, 80 aa, Homo sapiens
LTALLRKSLDPRLISTGENTQTAETMGPLSAPPCTQHITWKGLLLTAETPKPSISSSNLNPRGGHGRLCALILLILEDSG

SEQ ID NO: 51415 - protein, 107 aa, Homo sapiens
  DOMAIN (33)..(90): Immunoglobulin domain identified by PFam, accession name ig, E-value=0.00093, PFam score of 17.2
HSLHSALSLEVTGSTKLPKPYITINNLNPRENKDVLNFTCEPKSENYTYIWWLNGQSLPVSPRVKRPIENRILILPSVTRNETGPYQCEIRDRYGGIRSDPVTLNVL

SEQ ID NO: 51416 - protein, 183 aa, Homo sapiens
  DOMAIN (60)..(105): CARCINOEMBRYONIC ANTIGEN PRECURSOR AMINO-TERMINAL DOMAIN domain identified by eMATRIX, accession number DM00372B, p-value= 5.737e-35, raw score of 20.31
SLLNFWNLPITAQVTIEALPPKVSEGKDVLLLVHNLPQNLAGYIWYKGQLMDLYHYITSYVVDGQINIYGPAYTGRETVYSNASLLIQNVTREDAGSYTLHIIKRGDRTRGVTGYFTFNLYHTSYLWWMNGQSLPMTHRLQLSKTNRTLFIFGVTKYIAGPYECEIRNPVSASHSDPVTLNLL

SEQ ID NO: 51417 - protein, 144 aa, Homo sapiens; identical to SEQ ID NO: 48875

SEQ ID NO: 51418 - protein, 484 aa, Homo sapiens
  DOMAIN (77)..(122): CARCINOEMBRYONIC ANTIGEN PRECURSOR AMINO-TERMINAL DOMAIN domain identified by eMATRIX, accession number DM00372B, p-value= 8.750e-37, raw score of 20.31
  DOMAIN (100)..(456): Immunoglobulin domain identified by PFam, accession name ig, E-value=6.3e-06, PFam score of 24.2
  misc_feature (1)...(484): Xaa = X or * as defined in Table 2
GAVRTWGRGFQTEKCQASLLNFWNPPTTAQVTIEAEPTKVSKGKDVLLLVHNLPQNLAGYIWYKGQMKDLYHYITSYVVDGQIIIYGPAYSGRETVYSNASLLIQNVTREDAGSYTLHIVKRGDGTRGETGHFTFTLYLIPWTLLYLXRSLAQVSHYETPGKTAPPCGSTAXXLNXPPDLTLFSPVLFLLKYPVPGQAFQYPKGLKTIGSSITHLXDVLGKGSCRENIPRAAKXDXNXEDSSTACSKXGPQVETPKPSISSSNLYPREDMEAVSLTCDPETPDASYLWWMNGQSLPMTHSLQLSKNKRTLFLFGVTKYTAGPYECEIRNPVSASRSDPVTLNLLPKLPKPYITINNLNPRENKDVLAFTCEPKSENYTYIWWLNGQSLPVSPRVKRPIENRILILTQCSREMKQGPYQCEIQDRYGGIRSYPVTLECPHITTKHSGLYACSVRNSATGMESSKSMTVKVSAPSGTGHLPGLNPL

SEQ ID NO: 51419 - protein, 479 aa, Homo sapiens
  DOMAIN (72)..(117): CARCINOEMBRYONIC ANTIGEN PRECURSOR AMINO-TERMINAL DOMAIN domain identified by eMATRIX, accession number DM00372A, p-value= 1.000e-40, raw score of 19.18
  DOMAIN (158)..(419): Immunoglobulin domain identified by PFam, accession name ig, E-value=2.9e-09, PFam score of 34.9
IRADPAHELENCSCPGKRLSTERGRTAQLTAVLREFLDPRLISTEENTQAAETMGTLSAPPCTQRIKWKGLLLTASLLNFWNLPTTAQVTIEAQPPKVSEGKDVLLLVHNLPQNLTGYIWYKGQMRDLYHYITSYVVDGEIIIYGPAYSGRETAYSNASLLIQNVTREDAGSYTLHIIKGDDGTRGVTGRFTFTLHLETPKPSISSSNLNPRETMEAVSLTCDPETPDASYLWWMNGQSLPMTHSLKLSETNRTLFLLGVTKYTAGPYECEIRNPVSASRSDPVTLNLLPKLPKPYITINNLNPRENKDVLNFTCEPKSENYTYIWWLNGQSLPVSPRVKRPIENRILILPSVTRNETGPYQCEIRDRYGGVRSDPVTLNVLYGPDLPRIYPSFTYYRSGEVLYLSCSADSNPPAQYSWTINEKFQLQGQKLFIPHITTKHSGLYVCSVRNSATGKESSKSMTVEVSGKWIPASLAIGF

SEQ ID NO: 51420 - protein, 457 aa, Homo sapiens
  DOMAIN (47)..(92): CARCINOEMBRYONIC ANTIGEN PRECURSOR AMINO-TERMINAL DOMAIN domain identified by eMATRIX, accession number DM00372A, p-value= 4.000e-39, raw score of 19.18
  DOMAIN (133)..(428): Immunoglobulin domain identified by PFam, accession name ig, E-value=2.4e-09, PFam score of 35.2
TAQLTAVLREFLDPRLISTEENTQAAETMGTLSAPPCTQRIKWKGLLLTASLLNFWNLPTTAQVTIEAEPTKVSEGKDVLLLVHNLPQNLTGYIWYKGQMRDLYHYITSYVVDGEIIIYGPAYSGRETAYSNASLLIQNVTREDAGSYTLHIIKGDDGTRGVTGRFTFTLHLETPKPSISSSNLNPRETMEAVSLTCDPETPDASYLWWMNGQSLPMTHSLKLSETNRTLFLLGVTKYTAGPYECEIRNPVSASRSDPVTLNLLPKLPKPYITINNLNPRENKDVLNFTCEPKSENYTYIWWLNGQSLPVSPRVKRPIENRILILPSVTRNETGPYQCEIRDRYGGIRSDPVTLNVLYGPDLPRIYPSFTYYRSGEVLLLVLFCGTLNPPAQYSWTINEKFQLPGQKLFIRHITTKHSGLYVCSVRNSATGKESSKSMTVEVSAYSSSINYTSGNRN

SEQ ID NO: 51421 - protein, 445 aa, Homo sapiens
  DOMAIN (52)..(97): CARCINOEMBRYONIC ANTIGEN PRECURSOR AMINO-TERMINAL DOMAIN domain identified by eMATRIX, accession number DM00372A, p-value= 1.000e-40, raw score of 19.18
  DOMAIN (291)..(434): Immunoglobulin domain identified by PFam, accession name ig, E-value=1.6e-06, PFam score of 26.1
  misc_feature (1)...(445): Xaa = X or * as defined in Table 2
TEGGRTAQLTAMLRQLLDPRLISTEENTQAAETMGPLPAPSCTQRITWKGLLLTASLLNFWNPPTTAEVTIEAQPPKVSEGKDVLLLVHNLPQNLPGYFWYKGEMTDLYHYIISYIVDGKIIIYGPAYSGRETVYSNASLLIQNVTRKDAGTYTLHIIKRGDETREEIRHFTFTLYLETPKPYISSSNLNPREAMEAVRLICDPETLDASYLWWMNGQSLPVTHRLQLSKTNRTLYLFGVTKYIAGPYECEIRNPVSASRSDPVTLNLLPKLPIPYITINNLNPRENKDVLAFTCEPKSENYTYIWWLNGQSLPVSPGVKRPIENRILILPSVTRNETGPYQCEIRDRYGGIRSYPVTLNVLYGPDLPRIYPSFTYYRSGENLDLSCFTESNPPAEYFWPIXGKFQQSGQKLFIPQITRNHSGLYACSVHNSAAGKEISVSLFRH

SEQ ID NO: 51422 - protein, 507 aa, Homo sapiens
  DOMAIN (100)..(145): CARCINOEMBRYONIC ANTIGEN PRECURSOR AMINO-TERMINAL DOMAIN domain identified by eMATRIX, accession number DM00372A, p-value= 4.000e-39, raw score of 19.18
  DOMAIN (248)..(495): Immunoglobulin domain identified by PFam, accession name ig, E-value=3.3e-05, PFam score of 21.8
  misc_feature (1)...(507): Xaa = X or * as defined in Table 2
MTQFPMDKRQGRSRSVAITNTAVTSLEWVPFHAFAIPRSTLVSQQRLSTERGRTAQLTAVLREFLDPRLISTEENTQAAETMGTLSAPPCTQRIKWKGLLLTASLLNFWNLPTTAQVTIEAEPTKVSEGKDVLLLVHNLPQNLTGYIWYKGAMRDLYHYVTSYVVDGQIIKYGPAYSGRETAYSNASLLIQNVTREDAGSYTLHIIKGDDGTRGVTGRFTFTLHLETPKPSISSSNLNPRETMEAVSLTCDPETPDASYLWWMNGQSLPMTHSLKLSETNRTLFLLGVTKYTAGPYECEIRNPVSASRSDPVTLNLLPKLPKPYITINNLNPRENKDVLNFTCEPKSENYTYIWWLNGQKPPVSSPRVKRPHXKTGSLIPTPVFTRNETGPYQCEIRARYGGIRSDPVTLNVLYGPDLPRIYPSFTYYRSGGKSSYLSCFCGTSNPPAQYSWTINXKVFSLPGTKALYSRHITTKHSGLYVCSVRNSATGKESSKSMTVEVSDWTVP

SEQ ID NO: 51423 - protein, 9222 aa, Homo sapiens
  DOMAIN (744)..(797): ANTIGEN MELANOMA-ASSOCIATED MULTIGENE FAMILY TUM domain identified by eMATRIX, accession number PD01876C, p-value=6.339e- 30, raw score of 21.73
  DOMAIN (1395)..(7691): Thrombospondin type 1 domain identified by PFam, accession name tsp_1, E-value=3.6e-144, PFam score of 492.4
MGKDFMSKTPKAMATKAKIDKWDLIKLKSFCTAKETTIRVNRQPTKWEKIFTTYSSDKGLISRIYNELKQIYKKKTNNPIKKLISTEENTQTAETMGLLSAPPCTQRITWKGLLLTASLLNFWNLPTTAQVTIEAQPPKVSEGKDVLLLVHNLPQNLTGYIWYKGQMRDLYHYITSYVVDGEIIIYGPAYSGRETAYSNASLLIQNVTREDAGSYTLHIIKGDDGTRGVTGRFTFTLHLETPKPSISSSNLNPRETMEAVSLTCDPETPDASYLWWMNGQSLPMTHSLKLSETNRTLFLLGVTKYTAGPYECEIRNPVSASRSDPVTLNLLPKLPKPYITINNLNPRENKDVLNFTCEPKSENYTYIWWLNGQSLPVSPRVKRPIENRILILPSVTRNETGPYQCEIRDRYGGVRSDPVTLNVLYGPDLPRIYPSFTYYRSGEVLYLSCSADSNPPAQYSWTINEKFQLPGQKLFIRHITTKHSGLYVCSVRNSATGKESSKSMTVEVSEALMSLRSAPSTGKSLSAEGGRTAQLTAVLWKLLDPRLISTEENMHAAEIMGPLSAPPCTEHIKWKGLLLTALLLNFWNLPTTAQVMIEAQPPKVSEGKDVLLLVHNLPQNLTGYIWYKGQIRDLYHYITSYVVDGQIIIYGPAYSGRETVYSNASLLIQNVTREDAGSYTLHIIKASLSKSSPESPLQSPVISFSSSTSLSPFSEESSSPVDEYTSSSDTLLESDSLTDSESLIESEPLFTYTLDEKVDELARFLLLKYQVKQPITKAEMLTNVISRYTGYFPVIFRKAREFIEILFGISLREVDPDDSYVFVNTLDLTSEGCLSDEQGMSQNRLLILILSIIFIKGTYASEEVIWDVLSGIGVRAGREHFAFGEPRELLTKVWVQEHYLEYREVPNSSPPRYEFLWGPRAHSEVIKRKVVEFLAMLKNTVPITFPSSYKDALKDVEERAQAIIDTTDDSWACSSQSLVALCVPVWSCIYHLRPNTLELSKWGCHTPGGYAHQAKELGQADPFATYKKSVSDQEEQMCYEDDCGDGTDEPSYPCPQGLLACADGRCLPPALLCDGHPDCLDAADEESCLGQVTCVPGEVSCVDGTCLGAIQLCDGVWDCPDGADEGPGHCPLPSLPTPPASTLPGPSPGSLDTASSPLASASPAPPCGPFEFRCGSGECTPRGWRCDQEEDCADGSDERGCGGPCAPHHAPCARGPHCVSPEQLCDGVRQCPDGSDEGPDACVEAPAPPAMRGPPGQAGGPTSSRAPSPPSPPEAQGEGRKGQERSRTHLTVPAGSTQLPLCPGLFPCGVAPGLCLTPEQLCDGIPDCPQGEDELDCGGLPALGGPNRTGLPCPEYTCPNGTCIGFQLVCDGQPDCGRPGQVGPSPEEQGCGAWGPWSPWGPCSRTCGPWGQGRSRRCSPLGLLVLQNCPGPEHQSQACFTAACPVDGEWSTWSPWSVCSEPCRGTMTRQRQCHSPQNGGRTCAALPGGLHSTRQTKPCPQDGCPNATCSGELMFQPCAPCPLTCDDISGQVTCPPDWPCGSPGCWCPEGQVLGSEGWCVWPRQCPCLVDGARYWPGQRIKADCQLCICQDGRPRRCRLNPDCAVDCGWSSWSPWAKCLGPCGSQSIQWSFRSSNNPRPSGRGRQCRGIHRKARRCQTEPCEGCEHQGQVHRVGERWHGGPCRVCQCLHNLTAHCSPYCPLGSCPQGWVLVEGTGESCCHCALPGENQTVQPMATPAAAPAPSPQIRFPLATYILPPSGDPCYSPLGLAGLAEGSLHASSQQLEHPTQAALLGAPTQGPSPQGWHAGGDAYAKWHTRPHYLQLDLLQPRNLTGILVPETGSSNAYASSFSLQFSSNGLHWHDYRDLLPGILPLPKVSPAQGRWGQQPTMPFCGFHSLCPQGPSSVPEGHGLHSMLVEYLLFPRNWDDLDPAVWTFGRMVQARFVRVWPHDVHHSDVPLQVELLGCEPGVGLRCASGECVLRGGPCDGVLDCEDGSDEEGCVLLPEGTGRFHSTAKTLALSSAQPGQLLHWPREGLAETEHWPPGQESPTSPTETRPVSPGPASGVPHHGESVQMVTTTPIPQMEARTLPPGMAAVTVVPPHPVTPATPAGQSVAPGPFPPVQCGPGQTPCEVLGCVEQAQVCDGREDCLDGSDERHCASRALCSPSQLSCGSGECLSAERRCDLRPDCQDGSDEDGCVDCVLAPWSVWSSCSRSCGLGLTFQRQELLRPPLPGGSCPRDRFRSQSCFVQACPDCELGRVYVSADLCQKGLVPPCPPSCLDPKANRSCSGHCVEGCRCPPGLLLHDTRCLPLSECPCLVGEELKWPGVSFLLGNCSQCVCEKGELLCQPGGCPLPCGWSAWSSWAPCDRSCGSGRCSAGRPGLPGPPAPKAALPREGALAGAVVPDSAPALGIHPAQEMPPRRSPAAPLYAQIECTGFCAPGCTCPPGLFLHNASCLPRSQCPCQLHGQLYASGAMARLDSCNNCCNVGIRRRFRAGTAPPAAFGGAECQGPTMEAEFCSLRPCPASWGCCHRVPCTGELEQRPLMVSQILEAQDQGVAPVSPGSSPTAAPGLVRRVSPRGHPGPLGASVQPPVALPGAIGTGSVPGAGGWGPWGPWSHCSRSCGGGLRSRTRACDQPPPQGLGDYCEGPRAQGEVCQALPCPVTNCTAIEGAEYSPCGPPCPRSCDDLVHCVWRCQPGCYCPPGQVLSSNGAICVQPGHCSCLDLLTGQRHHPGARLARPDGCNHCTCLEGRLNCTDLPCPDCGGGQSLHPCGQPCPRSCQDLSPGSVCQPGSVGCQPTCGCPLGQLSQDGLCVPPAHCRCQYQPGAMGIPENQSRSAGSRFSSWESLEPGEVVTGPCDNCTCVAGILQCQEVPDCPDPGVWSSWGPWEDCSVSCGGGEQLRSRRCARPPCPGPARQSRTCSTQVCREAGCPAGRLYRECQPGEGCPFSCAHVTQQVGCFSEGCEEGCHCPEGTFQHRLACVQECPCVLTAWLLQELGATIGDPGQPLGPGDELDSGQTLRTSCGNCSCAHGKLSCSLDDCFEADGGFGPWSPWGPCSRSCGGLGTRTRSRQCVLTMPTLSELPVCPGPGCGAGNCSWTSWAPWEPCSRSCGVGQQRRLRAYRPPGPGGHWCPNILTAYQERRFCNLRACPEAGCPAGMEVVTCANRCPRRCSDLQEGIVCQDDQVCQKGCRCPKGSLEQDGGCVPIGHCDCTDAQGHSWAPGSQHQDACNNCSCQAGQLSCTAQPCPPPTHCAWSHWSAWSPCSHSCGPRGQQSRFRSSTSGSWAPECREEQSQSQPCPQPSCPPLCLQGTRSRTLGDSWLQGECQRCCGPGLASRSGSCPCLMAKADPTCNSTFLHLDTQGCYSGPCPEECVWSSWSSWTRCSCRVLVQQRYRHQGPASRGARAGAPCTRLDGHFRPCLISNCSEDSCTPPFEFHACGSPCAGLCATHLSHQLCQDLPPCQPGCYCPKGLLEQAGGCIPPEECNCWHTSAAGAGMTLAPGDRLQLGCKECECRRGELHCTSQGCQGSLGPGVVTGKGTHTLSFQSSTATGSVWILRQGGPGLEPLTSAPHPSASSASALTLEPALTHASGVCGGHGAPARCPAVGGSGYAGERQRPSVEEAAGSHGLKTESCNGGPCPGCRCPPGQLVQDGRCVPISSCRCGLPSANASWELAPAQAVQLDCQNCTCVNESLVCPHQECPVLGPWSAWSSCSAPCGGGTMERHRTCEGGPGVAPCQAQDTEQRQECNLQPCPECPPGQVLSACATSCPCLCWHLQPGAICVQEPCQPGCGCPGGQHSLPWGLTLTLEEQAQELPPGTVLTRNCTRCVCHGGAFSCSLVDCQVPPGETWQQVAPGELGLCEQTCLEMNATKTQSNCSSARASGCVCQPGHFRSQAGPCVPEDHCECWHLGRPHLGEEMVLEPGSCCPSCRREAPEEQSPSCQLLTELRNFTKGTCYLDQVEVSYCSGYCPSSTHVMPEEPYLQSQCDCCSYRLDPESPVRILNLRCLGGHTEPVVLPVIHSCQCSSCQGPAFREPIAASRAAHLERTTLPVTPRRLGLGSDRKAVRSVRRKSQLSALILGPPALPPPDVRERSSWAALPPYLGALPLREPGSPGRSRRLHPQARPRGEGAARASESGAMEPRESGKAPVTFDDITVYLLQEEWVLLSQQQKELCGSNKLVAPLGPTVANPELFRKFGRGPEPWLGSVQGQRSLLEHHPGKKQMGYMGEMEVQGPTRESGQSLPPQKKAYLSHLSTGSGHIEGDWAGRNRKLLKPRSIQKSWFVQFPWLIMNEEQTALFCSACREYPSIRDKRSRLIEGYTGPFKVETLKYHAKSKAHMFCVNALAARDPIWAARFRSIRDPPGDVLASPEPLFTADCPIFYPPGPLGGFDSMAELLPSSRAELEDPGGDGAIPAMYLDCISDLRQKEITDGIHSSSDINILYNDAVESCIQDPSAEGLSEEVPVVFEELPVVFEDVAVYFTREEWGMLDKRQKELYRDVMRMNYELLASLGPAAAKPDLISKLERRAAPWIKDPNGPKWGKGRPPGSPVEARASCCSSSICEEGDGPRRIKRTYRPRSIQRSWFGQFPWLVIDPKETKLFCSACIERPNLHDKSSRLVRGYTGPFKVETLKYHEVSKAHRLCVNTVEIKEDTPHTALVPEISSDLMANMEHFFNAAYSIAYHSRPLNDFEKILQLLQSTGTVILGKYRNRTACTQFIKYISETLKREILEDVRNSPCVSVLLDSSTDASEQACVGIYIRYFKQMEVKESYITLAPLYSETADGYFETIVSALDELDIPFRKPGWVVGLGTDGSAMLSCRGGLVEKFQEVIPQLLPVHCVAHRLHLAVVDACGSIDLVKKCDRHIRTVFKFYQSSNKRLNELQEGAAPLEQEIIRLKDLNAVRWVASRRRTLHALLVSWPALARHLQRVAEAGGQIGHRAKGMLKLMRGFHFVKFCHFLLDFLSIYRPLSEVCQKEIVLITEVNATLGRAYVALESLRHQAGPKEEEFNASFKDGRLHGICLDKLEVAEQRFQADRERTVLTGIEYLQQRFDADRPPQLKNMEVFDTMAWPSGIELASFGNDDILNLARYFECSLPTGYSEEALLEEWLGLKTIAQHLPFSMLCKNALAQHCRFPLLSKLMAVVVCVPISTSCCERGFKAMNRIRTDERTKLSNEVLNMLMMTAVNGVAVTEYDPQPAIQHWYLTSSGRRFSHVYTCAQVPARSPASARLRKEEMGALYVEEPRTQKPPILPSREAAELCDGIPDCPQGEDELDCGGLPALGGPNRTGLPCPEYTCPNGTCIGFQLVCDGQPDCGRPGQVGPSPEEQGCGAWGPWSPWGPCSRTCGPWGQGRSRRCSPLGLLVLQNCPGPEHQSQACFTAACPVDGEWSTWSPWSVCSEPCRGTMTRQRQCHSPQNGGRTCAALPGGLHSTRQTKPCPQDGCPNATCSGELMFQPCAPCPLTCDDISGQVTCPPDWPCGSPGCWCPEGQVLGSEGWCVWPRQCPCLVDGARYWPGQRIKADCQLCICQDGRPRRCRLNPDCAVDCGWSSWSPWAKCLGPCGSQSIQWSFRSSNNPRPSGRGRQCRGIHRKARRCQTEPCEGCEHQGQVHRVGERWHGGPCRVCQCLHNLTAHCSPYCPLGSCPQGWVLVEGTGESCCHCALPGENQTVQPMATPAAAPAPSPQIRFPLATYILPPSGDPCYSPLGLAGLAEGSLHASSQQLEHPTQAALLGAPTQGPSPQGWHAGGDAYAKWHTRPHYLQLDLLQPRNLTGILVPETGSSNAYASSFSLQFSSNGLHWHDYRDLLPGILPLPKVSPAQGRWGQQPTMPFCGFHSLCPQGPSSVPEGHGLHSMLVEYLLFPRNWDDLDPAVWTFGRMVQARFVRVWPHDVHHSDVPLQVELLGCEPGVGLRCASGECVLRGGPCDGVLDCEDGSDEEGCVLLPEGTGRFHSTAKTLALSSAQPGQLLHWPREGLAETEHWPPGQESPTSPTETRPVSPGPASGVPHHGESVQMVTTTPIPQMEARTLPPGMAAVTVVPPHPVTPATPAGQSVAPGPFPPVQCGPGQTPCEVLGCVEQAQVCDGREDCLDGSDERHCASRALCSPSQLSCGSGECLSAERRCDLRPDCQDGSDEDGCVDCVLAPWSVWSSCSRSCGLGLTFQRQELLRPPLPGGSCPRDRFRSQSCFVQACPDCELGRVYVSADLCQKGLVPPCPPSCLDPKANRSCSGHCVEGCRCPPGLLLHDTRCLPLSECPCLVGEELKWPGVSFLLGNCSQCVCEKGELLCQPGGCPLPCGWSAWSSWAPCDRSCGSGRCSAGRPGLPGPPAPKAALPREGALAGAVVPDSAPALGIHPAQEMPPRRSPAAPLYAQIECTGFCAPGCTCPPGLFLHNASCLPRSQCPCQLHGQLYASGAMARLDSCNNCCNVGIRRRFRAGTAPPAAFGGAECQGPTMEAEFCSLRPCPASWGCCHRVPCTGELEQRPLMVSQILEAQDQGVAPVSPGSSPTAAPGLVRRVSPRGHPGPLGASVQPPVALPGAIGTGSVPGAGGWGPWGPWSHCSRSCGGGLRSRTRACDQPPPQGLGDYCEGPRAQGEVCQALPCPVTNCTAIEGAEYSPCGPPCPRSCDDLVHCVWRCQPGCYCPPGQVLSSNGAICVQPGHCSCLDLLTGQRHHPGARLARPDGCNHCTCLEGRLNCTDLPCPDCGGGQSLHPCGQPCPRSCQDLSPGSVCQPGSVGCQPTCGCPLGQLSQDGLCVPPAHCRCQYQPGAMGIPENQSRSAGSRFSSWESLEPGEVVTGPCDNCTCVAGILQCQEVPDCPDPGVWSSWGPWEDCSVSCGGGEQLRSRRCARPPCPGPARQSRTCSTQVCREAGCPAGRLYRECQPGEGCPFSCAHVTQQVGCFSEGCEEGCHCPEGTFQHRLACVQECPCVLTAWLLQELGATIGDPGQPLGPGDELDSGQTLRTSCGNCSCAHGKLSCSLDDCFEADGGFGPWSPWGPCSRSCGGLGTRTRSRQCVLTMPTLSELPVCPGPGCGAGNCSWTSWAPWEPCSRSCGVGQQRRLRAYRPPGPGGHWCPNILTAYQERRFCNLRACPEAGCPAGMEVVTCANRCPRRCSDLQEGIVCQDDQVCQKGCRCPKGSLEQDGGCVPIGHCDCTDAQGHSWAPGSQHQDACNNCSCQAGQLSCTAQPCPPPTHCAWSHWSAWSPCSHSCGPRGQQSRFRSSTSGSWAPECREEQSQSQPCPQPSCPPLCLQGTRSRTLGDSWLQGECQRCCGPGLASRSGSCPCLMAKADPTCNSTFLHLDTQGCYSGPCPEECVWSSWSSWTRCSCRVLVQQRYRHQGPASRGARAGAPCTRLDGHFRPCLISNCSEDSCTPPFEFHACGSPCAGLCATHLSHQLCQDLPPCQPGCYCPKGLLEQAGGCIPPEECNCWHTSAAGAGMTLAPGDRLQLGCKECECRRGELHCTSQGCQGSLGPGVVTGKGTHTLSFQSSTATGSVWILRQGGPGLEPLTSAPHPSASSASALTLEPALTHASGVCGGHGAPARCPAVGGSGYAGERQRPSVEEAAGSHGLKTESCNGGPCPGCRCPPGQLVQDGRCVPISSCRCGLPSANASWELAPAQAVQLDCQNCTCVNESLVCPHQECPVLGPWSAWSSCSAPCGGGTMERHRTCEGGPGVAPCQAQDTEQRQECNLQPCPECPPGQVLSACATSCPCLCWHLQPGAICVQEPCQPGCGCPGGQHSLPWGLTLTLEEQAQELPPGTVLTRNCTRCVCHGGAFSCSLVDCQVPPGETWQQVAPGELGLCEQTCLEMNATKTQSNCSSARASGCVCQPGHFRSQAGPCVPEDHCECWHLGRPHLGEEMVLEPGSCCPSCRREAPEEQSPSCQLLTELRNFTKGTCYLDQVEVSYCSGYCPSSTHVMPEEPYLQSQCDCCSYRLDPESPVRILNLRCLGGHTEPVVLPVIHSCQCSSCQGPAFREPIAASRAAHLERTTLPVTPRRLGLGSDRKAVRSVRRKSQLSALILGPPALPPPDVRERSSWAALPPYLGALPLREPGSPGRSRRLHPQARPRGEGAARASESGAMEPRESGKAPVTFDDITVYLLQEEWVLLSQQQKELCGSNKLVAPLGPTVANPELFRKFGRGPEPWLGSVQGQRSLLEHHPGKKQMGYMGEMEVQGPTRESGQSLPPQKKAYLSHLSTGSGHIEGDWAGRNRKLLKPRSIQKSWFVQFPWLIMNEEQTALFCSACREYPSIRDKRSRLIEGYTGPFKVETLKYHAKSKAHMFCVNALAARDPIWAARFRSIRDPPGDVLASPEPLFTADCPIFYPPGPLGGFDSMAELLPSSRAELEDPGGDGAIPAMYLDCISDLRQKEITDGIHSSSDINILYNDAVESCIQDPSAEGLSEEVPVVFEELPVVFEDVAVYFTREEWGMLDKRQKELYRDVMRMNYELLASLGPAAAKPDLISKLERRAAPWIKDPNGPKWGKGRPPGSPVEARASCCSSSICEEGDGPRRIKRTYRPRSIQRSWFGQFPWLVIDPKETKLFCSACIERPNLHDKSSRLVRGYTGPFKVETLKYHEVSKAHRLCVNTVEIKEDTPHTALVPEISSDLMANMEHFFNAAYSIAYHSRPLNDFEKILQLLQSTGTVILGKYRNRTACTQFIKYISETLKREILEDVRNSPCVSVLLDSSTDASEQACVGIYIRYFKQMEVKESYITLAPLYSETADGYFETIVSALDELDIPFRKPGWVVGLGTDGSAMLSCRGGLVEKFQEVIPQLLPVHCVAHRLHLAVVDACGSIDLVKKCDRHIRTVFKFYQSSNKRLNELQEGAAPLEQEIIRLKDLNAVRWVASRRRTLHALLVSWPALARHLQRVAEAGGQIGHRAKGMLKLMRGFHFVKFCHFLLDFLSIYRPLSEVCQKEIVLITEVNATLGRAYVALESLRHQAGPKEEEFNASFKDGRLHGICLDKLEVAEQRFQADRERTVLTGIEYLQQRFDADRPPQLKNMEVFDTMAWPSGIELASFGNDDILNLARYFECSLPTGYSEEALLEEWLGLKTIAQHLPFSMLCKNALAQHCRFPLLSKLMAVVVCVPISTSCCERGFKAMNRIRTDERTKLSNEVLNMLMMTAVNGVAVTEYDPQPAIQHWYLTSSGRRFSHVYTCAQVPARSPASARLRKEEMGALYVEEPRTQKPPILPSREAAEVLKDCIMEPPERLLYPHTSQEAPGMS

SEQ ID NO: 51424 - protein, 497 aa, Homo sapiens
  DOMAIN (70)..(115): CARCINOEMBRYONIC ANTIGEN PRECURSOR AMINO-TERMINAL DOMAIN domain identified by eMATRIX, accession number DM00372A, p-value= 5.378e-38, raw score of 19.18
  misc_feature (1)...(497): Xaa = X or * as defined in Table 2
EASLLEDDDGMVYLRPLTSHQYRTAQLRAMLRKFLDPRLSSTEENTQAAETMGPLSAPPCTQRITWKGLLLTASLLNFWNPPTTAQVTIEAEPTKVSKGKDVLLLVHNLPQNLAGYIWYKGQMKDLYHYITSYVVDGQIIIYGPAYSGRETVYSNASLLIQNVTREDAGSYTLHIVKRGDGTRGETGHFTFTLYLETPKPSISSSNLYPREDMEAVSLTCDPETPDASYLWWMNGQSLPMTHSLQLSKNKRTLFLFGVHKVHCRDPMECEIREPSXVASRSXPSSPWNLLPKLPKPYITINNLNPREKKDVLAFTCDPKSRNYTYIWWLNGQSLPVSPRVKRPIENRDPSFLPSVTRNETGPYQCEIRDRYGGIRSYPVTLNVLYGPDLPRIYPFISPIYHFREENLRTLSCFCGTFNPPGRVFLGTINGGSFQVIQGQKALYSPRITTKHSGALYAWLCSVTSRPLAWESSQIPWTVKVSGSFQGTGTSSWGLNPL

SEQ ID NO: 51425 - protein, 150 aa, Homo sapiens
  misc_feature (1)...(150): Xaa = X or * as defined in Table 2
QPPTLRSWDCWFAWGKRQLMSSPSTEPQVCFTIEGHEIDFLLGTGMAFSVLISCPGXLSSRSVTIRGILGXPVTRYFSHLLSCNWETLLFSHNAKTQGGGTLTLPKPSKSHRPWAVRGLAPGPAAAVLNFSPGLSCLPTGQGLGPAAHHA

SEQ ID NO: 51426 - protein, 73 aa, Homo sapiens
ILLAQLESQDGDILRQRDEFDLLVAGEICRFSALIEELEEKNERPARELLTVRPEPEPCPTCAVLRLLHLCLA

SEQ ID NO: 51427 - protein, 538 aa, Homo sapiens
  DOMAIN (131)..(172): B-box zinc finger domain identified by PFam, accession name zf-B_box, E-value=1.2e-10, PFam score of 48.8
  misc_feature (1)...(538): Xaa = X or * as defined in Table 2
VCDPALPPWAKQREWALEGSHSSRTSMGLLVASVTSLGRWKFNCPICVQGTLKEAGSLSNCGHKNFCRACLTRYCEIPGPDLEESPTCPLCKEPFRPGSFRPNWQLANVVENIERLQLVSTLGLGEEDVCQEHGEKIYFFCEDDEMQLCVVCREAGEHATHTMRFLEDAAAPYREQIHKCLKCLRKEREEIQEIQSRENKRMQVLLTQVSTKRQQVISEFAHLRKFLEEQQSILLAQLESQDGDILRQRDEFDLLVAGEICRFSALIEELEEKNERPARELLTDIRSTLIRCETRKCRKPVAVSPELGQRIRDFPQQALPLQREMKMFLEKLCFELDYEPAHISLDPQTSHPKLPLVPRTIQRAQFSXQMGRTSPDNPQRFDRATCVSRPTLGITGGRHTWVVSIDLAHGGSCTVGVVSEDVQRKGELRLRPEEGVWAVRLAWGFVSALGSFPTRLTLKEQPRQVRVSLDYEVGWVTFTNAVTREPIYTFTASFTRKVIPFFGLWGRGSSFSLSSLRRSSYLLSSKYRTHINPSTMWT

SEQ ID NO: 51428 - protein, 60 aa, Homo sapiens
FLMNSCITNTASPDHGRAISRVTQPSLLTLLFSFQLATVQPGQNFHMFTKEELEEVIKDI

SEQ ID NO: 51429 - protein, 331 aa, Homo sapiens
  DOMAIN (44)..(90): Proteasome A-type subunits proteins domain identified by eMATRIX, accession number BL00388A, p-value=5.745e-22, raw score of 23.14
  misc_feature (1)...(331): Xaa = X or * as defined in Table 2
YCGRVGELAAGELVFLWSRVGPQNPRSSRLPPPTLAMFLTRSEYDRGVNTFSPEGRLFQVEYDIEAIKLGSHSQLAPRHREGVALAVEKRIYLPHLMGAQAGIXGKLLGDLMLHIGLLPIEWGLICLMLKTFNSIKSRVGRHRYPWGSPYNGGHXQWESFEPKLCPNLGFSSFGEEDAESRVPMSRPLGSSHLFIWEELYEKGTPSLFPXGTPFWGPFVPVWMARSQFGSGFQRGAPRAPLPRKFPPTSPMTFERSPSSPSPHPSLKQVMGGRKLNANQTIEPRPTVPALAENFPHCSQRKKLEEVIQGHFKESWILRTSLGTISVLNNVP

SEQ ID NO: 51430 - protein, 57 aa, Homo sapiens
  misc_feature (1)...(57): Xaa = X or * as defined in Table 2
TSVSPSVPPLPCXRHPGEPQTGNNASNGTSSSRDESRPPVRVVPPPQTAVAITLSTA

SEQ ID NO: 51431 - protein, 30 aa, Homo sapiens
  misc_feature (1)...(30): Xaa = X or * as defined in Table 2
FFFPPQKYDXDRXEHPRFHKTLRNWRVGAQ

SEQ ID NO: 51432 - protein, 440 aa, Homo sapiens
  DOMAIN (186)..(211): RHODOPSIN-LIKE GPCR SUPERFAMILY SIGNATURE domain identified by eMATRIX, accession number PR00237A, p-value=8.667e-10, raw score of 11.48
  DOMAIN (201)..(233): 7 transmembrane receptor (rhodopsin family) domain identified by PFam, accession name 7tm_1, E-value=1.4e-06, PFam score of 23.1
MVVRVLPDVKSSSLRYGGGTAQRRTAVSTTGPESGPCSKPPLWAYSTNTSSSSAGLGYSILQKSPDEKQAPECSHMSKSTRPAPQESLNGSLSDGPSPINVENVALLLAKAMGHDRAWSLLQECGLALELSEKFTRTCDILRIAEKRQRVIRLGFLSMDSTIPVLGTELTPINGREETPCYKQTLSFTGLTCIVSLVALTGNAVVLWLLGCRMRRNAVSIYILNLVAADFLFLSGHIILSSSKEGSAPPPSARSCRASTWAWNWAAAPSFTHHLPTMDPCKVNELRAFVKMCKQDPSVLHTEEMRFLREWVESMGGLTQTSHSGCGHRGACVTPPPTLGGLEQGDRLNLFGRSKRREQESLLGNPENYPEYCPKPSRQYLYKSARTTALLVLGCLLKHIQFRSKYSNLSRYLERLPKKVEYKKSQTEHYNKYFSSSVPRH

SEQ ID NO: 51433 - protein, 113 aa, Homo sapiens
MASSNPVYMEMEKGDLPTRLKLLDDEVPFDSPLLVVYATRCFAQTALDIMAVENQKFLEEKEVTSPPPEEDRFQELKVATAEAIGSEQTCNEGEQLFSERPTAEDTLLSGRFL

SEQ ID NO: 51434 - protein, 1133 aa, Homo sapiens
  misc_feature (1)...(1133): Xaa = X or * as defined in Table 2
MAFVPVIPESYSHVLAEFESLDPLLSALRLDSSRLKCTSIAVSRKWLALGSSGGGLHLIQKEGWKHRLFLSHREGAISQVACCLHDDDYVAVATSQGLVVVWELNQERRGKPEQMYVSSEHKGRRVTALCWDTAILRVFVGDHAGKVSAIKLNTSKQAKAAAAFVMFPVQTITTVDSCVVQLDYLDGRLLISSLTRSFLCDTEREKFWKIGNKERDGEYGACFFPGRCSGGQQPLIYCARPGSRMWEVNFDGEVISTHQFKKLLSLPPLPVITLRSEPQYDHTAGSSQSLSFPKLLHLSEHCVLTWTERGIYIFIPQIVSALVLSEVKDIQDVAVCRNELFCLHLNGKVSHLSLISGERCVERLLRRGLWNLAARTCCLFQNSVIASRARKTLTADKLEHLKSXLDHGTYNDLISQMEELILKFEPLDSACSSRRSSISSHEKSFSILDSGIYRIISSRRGSQSDEDSCSLHSQTLSEDERFKEFTSQQEEDLPDQCCGSHGNEDNVSHAPVMFETDKNETFLPFGIPLPFRSPSPLVSLQAVKESVSSFVPXKPTEKIGHPLHTKPLILKVRPELRGDEQSCEEDVSSDTCPKEEDTEEEKEVTSPPPEEDRFQELKVATAEAMTKLQDPLVLFESESLRMVLQEGLSHLEETFAMKDFSGVSDTDNSSMKLNQDVLLVNESKKGILDEDNEKEKRDSLGNEESVDKTACECVRSPRESLDDLFQICSPCAIASGLRNDLAELTTLCLELNVLNSKIKSTSGHVDHTLQQYSPEILACQFLKKYFFLLNLKRAKESIKLSYSNSPSVWDTFIEGLKEMASSNPVYMEMEKGDLPTRLKLLDDEVPFDSPLLVVYATRLYEKFGESALRSLIKFFPSILPSDIIQLCHHHPAEFLAYLDSLVKSRPEDQRSSFLESLLQPESLRLDWLLLAVSLDAPPSTSTMDDEGYPRPHSHLLSWGYSQLILHLIKLPADFITKEKMTDICRSCGFWPGYLILCLELERRREAFTNIVYLNDMSLMEGDNGWIPETVEEWKLLLHLIQSKSTRPAPQESLNGSLSDGPSPINVENVALLLAKAMGPDRAWSLLQECGLALELSEKFTRTCDILRIAEKRQRALIQSMLEKCDRFLWSQQA

SEQ ID NO: 51435 - protein, 42 aa, Homo sapiens
CGPCRLHNSLRAPRGPTSRLPSPPGCAEPYNTPSGRRLPHEV

SEQ ID NO: 51436 - protein, 397 aa, Homo sapiens
  DOMAIN (173)..(186): PROTEIN ZINC-FINGER METAL-BINDI domain identified by eMATRIX, accession number PD00066, p-value=5.200e-14, raw score of 13.92
  DOMAIN (127)..(393): Zinc finger, C2H2 type domain identified by PFam, accession name zf-C2H2, E-value=1.3e-38, PFam score of 141.7
  misc_feature (1)...(397): Xaa = X or * as defined in Table 2
LLHPAQRSLSKDGTKESLEDAALMGEEGKPEINQQLSLESMELDELALEKYPIAAPLVPYPEKSSEDGVGNPEAKILSGTPTYKRRVISLLVTIENHTPLVELSEYLGTNTLSEILDSPWEGAKNVYKCPECDQNFSDHSYLVLHQKIHSGEKKHKCGDCGKIFNHRANLRTHRRIHTGEKPYKCAKCSASFRQHSHLSRHMNSHVKEKPYTCSICGRGFMWLPGLAQHQKSHSAENTYESTNCDKHFNEKPNLALPEETFVSGPQYQHTKCMKSFRQSLYPALSEKSHDEDSERCSGCGDNFFSFSKFKPLQCPDCDMTFPCFSELISHQNIHTEERPHXCKTCEESFALDSELACHQKSHMLAEPFKCTVCGKTFKSNLHLITHKRTHIKKHHVK

SEQ ID NO: 51437 - protein, 77 aa, Homo sapiens
MFRARLSLLQSHKHVEDAQLGHESSHLQGLGCWHLHQATQYMLEKQAHVTQKCSCLTQKVSLIVLKTLLIALLMMYF

SEQ ID NO: 51438 - protein, 821 aa, Homo sapiens
  DOMAIN (485)..(538): Hydroxymethylglutaryl-coenzyme A reductases proteins domain identified by eMATRIX, accession number BL00066B, p-value=1.000e- 40, raw score of 19.46
  DOMAIN (421)..(807): Hydroxymethylglutaryl-coenzyme A reductas domain identified by PFam, accession name HMG-CoA_red, E-value=3.3e-257, PFam score of 846.0
  misc_feature (1)...(821): Xaa = X or * as defined in Table 2
MLSRLFRMHGLFVASHPWEVIVGTVTLTICMMSMNMFTGIAGLFTIFSSFVFSTVVIHFLDKELTGLNEALPFFLLLIDLSRASTLAKFALSSNSQDEVRENIARGMAILGPTFTLDALVECLVIGVGTMSGVRQLEIMCCFGCMSVLANYFVFMTFFPACVSLVLELSRESREGRPIWQLSHFARVLEEEENKPNPVTQRVKMIMSLGLVLVHAHSRWIADPSPQNSTADTSKVSLGLDENVSKRIEPSVSLWQFYLSKMISMDIEQVITLSLALLLAVKYIFFEQTETESTLSLKNPITSPVVTQKKVPDNCCRREPMLVRNNQKCDSVEEETGINRERKVEVIKPLVAETDTPNRATFVVGNSSLLDTSSVLVTQEPEIELPREPRPNEECLQILGNAEKGAKFLSDAEIIQLVNAKHIPAYKLETLMETHERGVSIRRQLLSKKLSEPSSLQYLPYRGYNYSLWXWGACCENVIGYMPIPVGVAGPLCLDEKEFQVPMATTEGCLVASTNRGCRAIGLGGGASSRVLADGMTRGPVVRLPRACDSAEVKAWLETSEGFAVIKEAFDSTSRFARLQKLHTSIAGRNLYIRFQSRSGDAMGMNMISKGTEKALSKLHEYFPXNCRFXAVSGNYCTDKKPAAINWIEGRGKSVVCETVIPAKVVREVLKTTTEAMIEVNINKNLVGSAMAGSIGGYNAHAANIVTAIYIACGQDAAQNVGSSNCITLMEASGPTNEDLYISCTMPSIEIGTMLGVQGACKDNPGENARQLARIVCGTVMAGELSLMAALAAGHLVKSHMIHNRSKINLQDLQGACTKKTA

SEQ ID NO: 51439 - protein, 926 aa, Homo sapiens
  DOMAIN (577)..(630): Hydroxymethylglutaryl-coenzyme A reductases proteins domain identified by eMATRIX, accession number BL00066B, p-value=1.000e- 40, raw score of 19.46
  DOMAIN (516)..(916): Hydroxymethylglutaryl-coenzyme A reductas domain identified by PFam, accession name HMG-CoA_red, E-value=1.3e-276, PFam score of 909.8
  misc_feature (1)...(926): Xaa = X or * as defined in Table 2
GEGSFRSATALTGARLSVGAGVRWPLVRSGGSKDSVATMLSRLFRMHGLFVASHPWEVILGTVTLTICMMSMNMFTGNNKICGWNYECPKFEEDVLSSDIIILTITRCIAILYIYFQFQNLRQLGSKYILGIAGLFTIFSSFVFSTVVIHFLDKELTGLNEALPFFLLLIDLSRASTLAKFALSSNSQDEVRENIARGMAILGPTFTLDALVECLVIGVGTMSGVRQLEIMCCFGCMSVLANYFVFMTFFPACVSLVLELSRESREGRPIWQLNHFARVLEEEENKPNPVTQRVKMIMSLGLVLVHAHSRWIADPSPQNSTADTSKVSLGLDENVSKRIEPSVSLWQFYLSKMISMDIEQVITLSLALLLAVKYIFFEQTETESTLSLKNPITSPVVTQKKVPDNCCRREPMLVRNNQKCDSVEEETGINRERKVEVIKPLVAETDTPNRATFVVGNSSLLDTSSVLVTQEPEIELPREPRPNEECLQILGNAEKGAKFLSDAEIIQLVNAKHIPAYKLETLMETHERGVSIRRQLLSKKLSEPSSLQYLPYRDYNYSLVMGACCENVIGYMPIPVGVAGPLCLDEKEFQVPMATTEGCLVASTNRGCRAIGLGGGASSRVLADGMTRGPVVRLPRACDSAEVKAWLETSEGFAVIKEAFDSTSRFARLQKLHTSIAGRNLYIRFQSRSGDAMGMNMISKGTEKALSKLHEYFPEMQILAVSGNYCTDKKPAAINWIEGRGKSVVCEAVIPAKVVREVLKTTTEAMIEVNINKNLVGSAMAGSIGGYNAHAANIVTAIYIACGQDAAQNVGSSNCITLMEASGPTNEDLYISCTMPSIXIGTGGGGTNLLPQXAVLQMLGAQGSCKDNPGENARQLARIVCGTALAGELSLMAALAAGHLVKSHMIHNRSKINLQDLQGACTKKTA

SEQ ID NO: 51440 - protein, 149 aa, Homo sapiens
  DOMAIN (71)..(116): Ribosomal protein L22 proteins domain identified by eMATRIX, accession number BL00464B, p-value=8.636e-29, raw score of 28.48
  DOMAIN (3)..(118): Ribosomal protein L22p/L17e domain identified by PFam, accession name Ribosomal_L22, E-value=1.6e-50, PFam score of 181.3
CKSRGSNLRVHFKNTRETAQAIKGMHIRTATKYLKDVTLQKQCVPFRRYNGGVGRCAQAKQWGWTQGRWPKKSAEFLVIEHIQVNKAPKMRRRTYRAHGRINPYMSSPCHIEMILTEKEQIVPKPEEEVAQKKKISQKKLKKQKLMARE

SEQ ID NO: 51441 - protein, 292 aa, Homo sapiens
  DOMAIN (214)..(259): Ribosomal protein L22 proteins domain identified by eMATRIX, accession number BL00464B, p-value=8.759e-32, raw score of 28.48
  DOMAIN (206)..(260): Ribosomal protein L22p/L17e domain identified by PFam, accession name Ribosomal_L22, E-value=6.2e-25, PFam score of 92.7
MAASSLAVRTFSTVRVWALCPWVTCPGALAFLLLPAHSGPPSAIRALVLAVPSAWNALPPLSHQGFDSDVIFMKSYLTILIKLNIGNVAINKQMDEQTGVHPSVGILLSQEREHLHQWLHEQGSELALSCFGAALTGEESGNRHTVSGFGGIVCVQQQSRSAWRECKFKDSVKGEPIAANCKSCEIVFGFRPERPVRERALCKSLAESNAELKGLDVDSLVTEHIQVNKAPKMRRRTYRARGRINPYMSSPCHIEMILTEKEQIVPKPEEEVAQKKKISQKKLKKQKLMAQE

SEQ ID NO: 51442 - protein, 575 aa, Homo sapiens; identical to SEQ ID NO: 37579
  DOMAIN (497)..(542): Ribosomal protein L22 proteins domain identified by eMATRIX, accession number BL00464B, p-value=5.345e-31, raw score of 28.48
  DOMAIN (422)..(543): Ribosomal protein L22p/L17e domain identified by PFam, accession name Ribosomal_L22, E-value=1.4e-51, PFam score of 184.8

SEQ ID NO: 51443 - protein, 201 aa, Homo sapiens
  DOMAIN (120)..(165): Ribosomal protein L22 proteins domain identified by eMATRIX, accession number BL00464B, p-value=4.960e-35, raw score of 28.48
  DOMAIN (119)..(177): Ribosomal protein L22p/L17e domain identified by PFam, accession name Ribosomal_L22, E-value=3e-14, PFam score of 54.9
  misc_feature (1)...(201): Xaa = X or * as defined in Table 2
SVKMVRYSLDPGGTPRKSCKSQRGSNLRVPFKDHSXKLPQAHQRVCHIRKSPTKYLKDVHLTRNQCVPIPDRYNGXQLGQVCRRHKQMGPGTTKGRWPQKGVLKFLPAHALKTAESNAELKGLDVDSLVIEHIQVNKAPKMRRRTYRAHGRINPYMSSPCHIEMILTEKEQIVPKPEEEVAQKKKISPEETERNKNLLARE

SEQ ID NO: 51444 - protein, 641 aa, Homo sapiens
  DOMAIN (92)..(133): Cation-independent mannose-6-phosphate receptor repeat proteins domain identified by eMATRIX, accession number PF00878W, p -value=1.000e-40, raw score of 15.34
  DOMAIN (14)..(136): Cation-independent mannose-6-phosphate re domain identified by PFam, accession name CIMR_repeat, E-value=1.3e-39, PFam score of 145.1
MSTTPCSTEPSPIDHPRAEECGRMATPPAAPVWDPLGEASWAPESDLAGNEYDLTGLSTVRKPWTAVDTSVDGRKRTFYLSVCNPLPYIPGCQGSAVGSCLVSEGNSWNLGVVQMSPQAAANGSLSIMYVNGDKCGNQRFSTRITFECAQISTECSVRNGSSIVDLSPLIHRTGGYEAYDESEDDASDTNPDFYINICQPLNPMHGVPCPAGAAVCKVPIDGPPITECSVRNGSSIVDLSPLIHRTGGYEAYDESEDDASDTNPDFYINICQPLNPMHGVPCPAGAAVCKVPIDGPPIRVSHDPSYGCYHTVSYLRHRSERLLLYTFKMTCRDRPSPTFHSDNGTGFHSSPDKHVLTTILKLKCWPYMSAERHDNNVKLPCKLNMVSQKSWKTKGPRTFWNYPVSQWQQETREGGGSPQAGNAQMCPKTDQQAELGNLGISPWNTKPGSFLRLREEVGGPSSVPFFSGEKEGPPCVGRMGITIAIQMICLVNAELNPTFVRACSAFWVAAPLSPLLAAAEHFQRRKPPRSGNYGAAAPKSMGTCLMPGQTAEATHDFECGSRAQRSRERRESILAALIAAAVWSFQRIPGNNVVITSYMTNRGFFEDKKATFAPSFLMNIKGNKTSVVKNSILEQGQLTVN

SEQ ID NO: 51445 - protein, 93 aa, Homo sapiens
  DOMAIN (61)..(92): Cation-independent mannose-6-phosphate receptor repeat proteins domain identified by eMATRIX, accession number PF00878V, p -value=8.650e-39, raw score of 11.26
  DOMAIN (14)..(93): Cation-independent mannose-6-phosphate re domain identified by PFam, accession name CIMR_repeat, E-value=0.0012, PFam score of -21.4
MSTTPCSTEPSPIDHPRAEECGRMATPPAAPVWDPLGEASWAPESDLAGNEYDLTGLSTVRKPWTAVDTSVDGRKRTFYLSVCNPLPYIPGCQ

SEQ ID NO: 51446 - protein, 36 aa, Homo sapiens
FTAAYSEKGLVYMSICGENENCPPGVCECCGLSCVV

SEQ ID NO: 51447 - protein, 212 aa, Homo sapiens
  DOMAIN (24)..(55): Cation-independent mannose-6-phosphate receptor repeat proteins domain identified by eMATRIX, accession number PF00878P, p -value=7.946e-10, raw score of 14.95
  DOMAIN (36)..(157): Cation-independent mannose-6-phosphate re domain identified by PFam, accession name CIMR_repeat, E-value=0.042, PFam score of - 39.3
TECSVRNGSSIVDLSPLIHRTGGYEAYDESEDDASDTNPDFYINICQPLNPMHGVPCPAGAAVCKVPIDGPPITECSVRNGSSIVDLSPLIHRTGGYEAYDESEDDASDTNPDFYINICQPLNPMHGVPCPAGAAVCKVPIDGPPIRVSHDPSYGCYHTVSYLRHRSERLLLYTFKMTCRDRPSPTFHSDNGTGFHSSPDKHVLTTILKLKC

SEQ ID NO: 51448 - protein, 132 aa, Homo sapiens
  DOMAIN (28)..(83): Cation-independent mannose-6-phosphate receptor repeat proteins domain identified by eMATRIX, accession number PF00878Y, p -value=7.600e-32, raw score of 11.35
MLPEGHRLWPREVLDTLLPSAMTVSFLRLLQMQMLPFFLYNLRNCLLTQKLTYENGLLKMNFTGGDTCHKVYQRSTAIFFYCDRGTQRVQLLACSLSREEEKTAYTRLGLNACFVALEDPRSSGARANKFCD

SEQ ID NO: 51449 - protein, 315 aa, Homo sapiens
  DOMAIN (120)..(158): Cation-independent mannose-6-phosphate receptor repeat proteins domain identified by eMATRIX, accession number PF00878G, p -value=1.000e-40, raw score of 10.76
  misc_feature (1)...(315): Xaa = X or * as defined in Table 2
HGVGCRDGLPMECRFLCQIFMAFMQMNSYCARHKKATRRTVXCRNQDMTESSQKWTGKGSAVEHLVESGEWTMHPARPVSACRCPSDCHVPLSPGACWPKLECLSEGSSYISDGKEYLFYLNVCGETEIQFCNKKQAAVCQVKKSDTSQVKAAGRYHNQTLRPSESSWSLLFVVLVFFPGVHSPFSLDEALTLCPQNCLPPGTVSAPLNCVYPLALSAAVALAAGSELMECHRLVNSLEVSTAAQGQSSKTQFYACLCRLSTHLWKYSEESGRRLVCSFYQPSELNPALNLSFLVGTRLQEGAALLFIQSGFTIV

SEQ ID NO: 51450 - protein, 155 aa, Homo sapiens
MAGSANNQQLLSSIKWLGKHEKVGWARVTGSAATSQPHNLVNYSGFREKRLFRASGDMRTNGDNYLYEIQLSSITSSRNPACSGANICQVPSIQHNAWHTVAQQVLSNKLFDHGDLSRVHTQGFNPNGSQCPCQGVSGLVGLGLTTSRMKPRHLA

SEQ ID NO: 51451 - protein, 79 aa, Homo sapiens
VEVFIVFSDGSFYFLVMAKTGPVVEYSGSLLLEYVNGSACTTSDVRQTTYTTRIHLVCSRGSLVRHCCWLVTFTAAFFD

SEQ ID NO: 51452 - protein, 280 aa, Homo sapiens
  DOMAIN (128)..(171): 1 kw MIND INHIBITOR DIVISION CONTROL domain identified by eMATRIX, accession number DM01756B, p-value=4.822e-15, raw score of 22.91
  DOMAIN (93)..(207): ParA family ATPase domain identified by PFam, accession name ParA, E-value=2.7e-28, PFam score of 107.5
MENLKCDEDEDIGRPQVFSEVRGCDVTFEWKTKVVCPPKKLECKFVQKHKTYDLRLLSSLTGSWSLVHNGVSRPMHKATCWPGLDIIPSCLALHRIETELMGKFDEGKLPTDPHLMLRLAIETVAHDYDVIVIDSAPNLGIGTINVVCAADVLIVPTPAELFDYTSALQFFDMLRDLLKNVDLKGFEPDVRILLTKYSNSNGSQSPWMEEQIRDAWGSMVLKNVVRETDEVGKGQIRMRTVFEQAIDQRSSTGAWRNALSIWEPVCNEIFDRLIKPRLGD

SEQ ID NO: 51453 - protein, 221 aa, Homo sapiens
  DOMAIN (34)..(173): Cation-independent mannose-6-phosphate re domain identified by PFam, accession name CIMR_repeat, E-value=0.0022, PFam score of -24.3
MDIGRVAGPPILNPIANEIYLNFESSTPCLADKHFNYTSLIAFHCKRGVSMGTPKLLRTSECDFVFEWETPVVCPDEVRMDGCTLTDEQLLYSFNLSSLSTSTFKGRGSSFRHDYKATYCFITRTTQGPGGTTDSLCILPQWVPNRNPGDPEDQPSLRNTNVTTSVSLGVRPLSNDQQSWMVEDSWPGVGAVAETKTDRGDPFVGRVKSQENAHIPPEWTS

SEQ ID NO: 51454 - protein, 260 aa, Homo sapiens
DEPIGVPLLSAPPAGTTKIKADQLHLQGAAPKICPCLQDGSLGQHYCPFVSFSRYYINLCQKIYKGPLGCSERASICRRTTTGDVQVLGLVHTQKLGVIGPRVVVTTSKRYPCGGNKTASSVIELTCTKPVGRPAFKRFEIDSCTYYFSWDSGAACAVKPQEVQMVNGTITNPINGKSFSLGDIYFKLFRASGDMRTNGDNYLYEIQLSSITSSRNPACSGANICQVKPNDQHFSRKVGTSDKTKYYLQGNPWLPTKFHI

SEQ ID NO: 51455 - protein, 2530 aa, Homo sapiens
  DOMAIN (1947)..(1984): Type II fibronectin collagen-binding domain proteins domain identified by eMATRIX, accession number BL00023, p-value=8.225e-11, raw score of 24.31
  DOMAIN (172)..(2152): Cation-independent mannose-6-phosphate re domain identified by PFam, accession name CIMR_repeat, E-value=0, PFam score of 1448.7
  misc_feature (1)...(2530): Xaa = X or * as defined in Table 2
SPVEPRSPRAPAPSPPPPLPWRRDPVPGAAPSSRAPLASRPPRSSGPGAMGAAAGRSPHLGPAPARRPQRSLLLLQLLLLVAAPGSTQAQAAPFPELCSYTWEAVDTKNNVLYKINICGSVDIVQCGPSSAVCMHDLKTRTYHSVGDSVLRSATRSLLEFNTTVSCDQQGTNHRVQSSIAFLCGKTLGTPEFVTATECVHYFEWRTTAACKKDIFKANKEVPCYVFDEELRKHDLNPLIKLSGAYLVDDSDPDTSLFINVCRDIDTLRDPGSQLRACPPGTAACLVRGHQAFDVGQPRDGLKVVRKDRLVLSYVREEAGKLDFCDGHSPAVTITFVCPSERREGTIPKLTAKSNCRYEIEWITEYACHRDYLESKTCSLSGEQQDVSIDLTPLAQSGGSSYISDGKEYLFYLNVCGETEIQFCNKKQAAVCQVKKSDTSQVKAAGRYHNQTLRYSDGDLTLIYFGGDECSSGFQRMSVINFECNKTAGNDGKGTPVFTGEVDCTYFFTWDTEYACVKEKEDLLCGATDGKKRYDLSALVRHAEPEQNWEAVDGSQTETKKKHFFINICHRVLQEGKARGCPEDAAVCAVDKNGSKNLGKFISSPMKEKGNIQLSYSDGDDCGHGKKIKTNITLVCKPGDLESAPVLRTSGEGGCFYEFEWHTAAACVLSKTEGENCTVFDSQAGFSFDLSPLTKKNGAYKVETKKYDFYINVCGPVSVSPCQPDSGACQVAKSDEKTWNLGLSNAKLSYYDGMIQLNYRGGTPYNNERHTPRATLITFLCDRDAGVGFPEYQEEDNSTYNFRWYTSYACPEEPLECVVTDPSTLEQYDLSSLAKSEGGLGGNWYAMDNSGEHVTWRKYYINVCRPLNPVPGCNRYASACQMKYEKDQGSFTEVVFQSSKLGKWQKTGPVVEDSGSFLLEYVNGSACTTSDGRQTTYTTRIHLVCSRGRLNSHPIFSLNWECVVSFLWNTEAACPIQTTTDTDQACSIRDPNSGFVFNLNPLNSSQGYNVSGIGKIFMFNVCGTMPVCGTILGKPASGCEAETQTEELKNWKPARPVGIEKSLQLSTEGFITLTYKGPLSAKGTADAFIVRFVCNDDVYSGPLKFLHQDIDSGQGIRNTYFEFETALACVPSPVDCQVTDLAGNEYDLTGLSTVRKPWTAVDTSVDGRKRTFYLSVCNPLPYIPGCQGSAVGSCLVSEGNSWNLGVVQMSPQAAANGSLSIMYVNGDKCGNQRFSTRITFECAQISGSPAFQLQDGCEYVFIWRTVEACPVVRVEGDNCEVKDPRHGNLYDLKPLGLNDTIVSAGEYTYYFRVCGKLSSDVCPTSDKSKVVSSCQEKREPQGFHKVAGLLTQKLTYENGLLKMNFTGGDTCHKVYQRSTAIFFYCDRGTQRPVFLKETSDCSYLFEWRTQYACPPFDLTECSFKDGAGNSFDLSSLSRYSDNWEAITGTGDPEHYLINVCKSLAPQAGTEPCPPEAAACLLGGSKPVNLGRVRDGPQWRDGIIVLKYVDGDLCPDGIRKKSTTIRFTCSESQVNSRPMFISAVEDCEYTFAWPTATACPMKSNEHDDCQVTNPSTGHLFDLSSLSGRAGFTAAYSEKGLVYMSICGENENCPPGVGACFGQTRISVGKANKRLRYVDQVLQLVYKDGSPCPSKSGLSYKSVISFVCRPEAGPTNRPMLISLDKQTCTLFFSWHTPLACEQATECSVRNGSSIVDLSPLIHRTGGYEAYDESEDDASDTNPDFYINICQPLNPMHAVPCPAGAAVCKVPIDGPPIDIGRVAGPPILNPIANEIYLNFESSTPCLADKHFNYTSLIAFHCKRGVSMGTPKLLRTSECDFVFEWETPVVCPDEVRMDGCTLTDEQLLYSFNLSSLSTSTFKVTRDSRTYSVGVCTFAVGPEQGGCKDGGVCLLSGTKGASFGRLQSMKLDYRHQGEAVVLSYVNGDVCPPETDDGVPCVFPFIFQWGRSYEECIIESRAKLWCSTTADYDRDHEWGFCRHSNSYRTSSIIFKCDEDEDIGRPQVFSEARGCDVTFERKTKVVCPPQKLECKFVQKHKTYDLRLLSSLTGSWSPWVHNGASYYINLCQKIYKGPLGCFXKGQLCRKGSTTGDVQVLGLVHTQKLGVIGDKVVVTYSKGYPCGGNKTASSVIELTCTKTVGRPAFKRFDIDSCTYYFSWDSRAACAVKPQGGANWXMGTITNPINGXKFSFGDIYFKLFPTFGDMRTRGDNYLYEIQLSSITSSRNPACSGANICQVKPNDQHFSRKVGTSDKTKYYLQDGDLDVVFASSSKCGKDKTKSVSSTIFFHCDPLGEDGIPEFQSETAGCQYLFFWNHSTLCPSGGGAFDSENPGGRRGQMHKGLSERSQAVGAVLSLLLVALTCCLLALVLYKKGERETVISXLTTCCRRSSNVSYKYSKVNKEEETDENETEWLMEEIQLPPPRQGKEGQENGHITTKSAKALSSLHGDDQDSEDEVLTIPEVKVHSGRGAGAESSHPVRNAQSNALQEREDDRVGLVRGXESEEKGKSSSAQPKDK

SEQ ID NO: 51456 - protein, 60 aa, Homo sapiens
VNCQPLGMISLMKRPPGFSPFRSSRIGEIKEETTSHLRSCEYKGRPPKAGAEPASEREVS

SEQ ID NO: 51457 - protein, 67 aa, Homo sapiens
  DOMAIN (1)..(21): Cystatin domain identified by PFam, accession name cystatin, E-value=0.083, PFam score of 10.6
ECTATVGKRSSTKFSVATQTCQITPAEGPVVTAQYDCLGCVHPISTQSPGFSPFRSSRIGEIKGEKT

SEQ ID NO: 51458 - protein, 369 aa, Homo sapiens
  DOMAIN (14)..(351): Cystatin domain identified by PFam, accession name cystatin, E-value=2.5e-62, PFam score of 217.9
MEGLLLSLTQESQSEEIDCNDKDLFKAVDAALKKYNSQNQSNNQFVLYRITEATKTVGSDTFYSFKYEIKEGDCPVQSGKTWQDCEYKDAAKAATGECTATVGKRSSTKFSVATQTCQITPGGWFILWHCPGGKLTISDYPNSSRVLHCTQCVQGLNRRTRRHKTCPPLQAASQIEERIGFEGRPGLESFRAPCLLASPFPCLEKGAEGPVVTAQYDCLGCVHPISTQSPDLEPILRHGIQYFNNNTQHSSLFTLNEVKRAQRQDTGECTDNAYIDIQLRIASFSQNCDIYPGKDFVQPPTKICVGCPRDIPTNSPELEETLTHTITKLNAENNATFYFKIDNVKKARVQVCKLYYKSSNTIVYVQIAD

SEQ ID NO: 51459 - protein, 305 aa, Homo sapiens
  DOMAIN (155)..(178): HMW KININOGEN SIGNATURE domain identified by eMATRIX, accession number PR00334C, p-value=6.114e-29, raw score of 2.87
  DOMAIN (1)..(34): Cystatin domain identified by PFam, accession name cystatin, E-value=1.1e-07, PFam score of 30.8
VVAGKKYFIDFVARETTCSKESNEELTESCETKKLGISLMKRPPGFSPFRSSRIGEIKEETTVSPPHTSMAPAQDEERDSGKEQGHTRRHDWGHEKQRKHNLGHGHKHERDQGHGHQRGHGLGHGHEQQHGLGHGHKFKLDDDLEHQGGHVLDHGHKHKHGHGHGKHKNKGKKNGKHNGWKTEHLASSSEDSTTPSAQTQEKTEGPTPIPSLAKPGVTVTFSDFQDSDLIATMMPPISPAPTQSDDDWIPDIQIDPNGLSFNPISDFPDTTSPKCPGRPWKSVSEINPTTQMKESYYFDLTDGLS

SEQ ID NO: 51460 - protein, 644 aa, Homo sapiens
  DOMAIN (181)..(205): Cysteine proteases inhibitors proteins domain identified by eMATRIX, accession number BL00287, p-value=7.231e-17, raw score of 17.35
  DOMAIN (23)..(370): Cystatin domain identified by PFam, accession name cystatin, E-value=1.7e-107, PFam score of 370.5
MKLITILFLCSRLLLSLTQESQSEEIDCNDKDLFKAVDAALKKYNSQNQSNNQFVLYRITEATKTVGSDTFYSFKYEIKEGDCPVQSGKTWQDCEYKDAAKAATGECTATVGKRSSTKFSVATQTCQITPAEGPVVTAQYDCLGCVHPISTQSPDLEPILRHGIQYFNNNTQHSSLFMLNEVKRAQRQVVAGLNFRITYSIVQTNCSKENFLFLTPDCKSLWNGDTGECTDNAYIDIQLRIASFSQNCDIYPGKDFVQPPTKICVGCPRDIPTNSPELEETLTHTITKLNAENNATFYFKIDNVKKARVQVVAGKKYFIDFVARETTCSKESNEELTESCETKKLGQSLDCNAEVYVVPWEKKIYPTVNCQPLGMISLMKRPPGFSPFRSSRIGEIKEETTVSPPHTSMAPAQDEERDSGKEQGHTRRHDWGHEKQRKHNLGHGHKHERDQGHGHQRGHGLGHGHEQQHGLGHGHKFKLDDDLEHQGGHVLDHGHKHKHGHGHGKHKNKGKKNGKHNGWKTEHLASSSEDSTTPSAQTQEKTEGPTPIPSLAKPGVTVTFSDFQDSDLIATMMPPISPAPIQSDDDWIPDIQIDPNGLSFNPISDFPDTTSPKCPGRPWKSVSEINPTTQMKESYYFDLTDGLS

SEQ ID NO: 51461 - protein, 248 aa, Homo sapiens
  DOMAIN (22)..(107): Cystatin domain identified by PFam, accession name cystatin, E-value=1.5e-14, PFam score of 54.3
KGVPIQTPREDSWISHKKDFRDTGECTDNAYIDIQLRIASFSQNCDIYPGKDFVQPPTKICVGCPRDIPTNSPELEETLTHTITKLNAENNATFYFKIDNVKKARVQGLSKAEVFLCARRSHSCQLGWRRVPPALVGGGQSWPGGRVPWGVAQTVCPERPRRERRLRGEREEEAADKVMARRWRKSRRRKRKEMEERMSPEETEGTNFDFAGEAVGQAERKGPAFSAAEESFHEEEKRRRKEQSDLTF

SEQ ID NO: 51462 - protein, 720 aa, Homo sapiens
  DOMAIN (566)..(589): HMW KININOGEN SIGNATURE domain identified by eMATRIX, accession number PR00334C, p-value=6.114e-29, raw score of 2.87
  DOMAIN (36)..(290): Cystatin domain identified by PFam, accession name cystatin, E-value=5.7e-47, PFam score of 165.3
  misc_feature (1)...(720): Xaa = X or * as defined in Table 2
MGFPLRPSPAHLSSGRQQFPAKEERLLLSLTQESQSEEIDCNDKDLFKAVDAALKKYNSQNQSNNQFVLYRITEATKTVGSDTFYSFKYEIKEGDCPVQSGKTWQDCEYKDAAKAATGECTATVGKRSSTKFSVATQTCQITPGGWFILWHCPGGKLTISDYPNSSRVLHCTQCVQGLNRRTRRHKTCPPLQAASQIEERIGFEGRPGLESFRAPCLLASPFPCLEKGAEGPVVTAQYDCLGCVHPISTQSPDLEPILRHGIQYFNNNTQHSSLFMLNEVKRAQRQAAPGREFSSMDTFEGYEGAEDMEKLAGPFPVGXQSRNLFLQIRFPGEERKHPGRKRRTRXGSNGDRQHQEGACWGVHAGXLLRGRRLVSRRGRGARGPPPRRAALPAVAPAPRLQSARIPERGDGDDGVRRWGHREAIGSXGQSLSCNGIIILIKEERLPCPFHCISLMKRPPGFSPFRSSRIGEIKEETTVSPPHTSMAPAQDEERDSGKEQGHTRRHDWGHEKQRKHNLGHGHKHERDQGHGHQRGHGLGHGHEQQHGLGHGHKFKLDDDLEHQGGHVLDHGHKHKHGHGHGKHKNKGKKNGKHNGWKTEHLASSSEDSTTPSAQTQEKTEGPTPIPSLAKPGVTVTFSDFQDSDLIATMMPPISPAPIQSDDDWIPDIQIDPNGLSFNPISDFPDTTSPKCPGRPWKSVSEINPTTQMKESYYFDLTDGLS

SEQ ID NO: 51463 - protein, 71 aa, Homo sapiens
HHINCVLLYLQSHLRSCEYQGRPPKAGAEPASEREVSLTNWAESSTPRHIAPTTSASNLEMEGQEERWDRI

SEQ ID NO: 51464 - protein, 435 aa, Homo sapiens
  DOMAIN (185)..(209): Cysteine proteases inhibitors proteins domain identified by eMATRIX, accession number BL00287, p-value=7.231e-17, raw score of 17.35
  DOMAIN (24)..(384): Cystatin domain identified by PFam, accession name cystatin, E-value=4.9e-84, PFam score of 292.3
  misc_feature (1)...(435): Xaa = X or * as defined in Table 2
IMKLITILFLCSRLLLSLTQESQSEEIDCNDKDLFKAVDAALKKYNSQNQSNNQFVLYRITEATKTVGSDTFYSFKYEIKEGDCPVQSGKTWQDCEYKDAAKAATGECTATVGKRSSTKFSVATQTCQITPAEGPVVTAQLRTCLGCVWHPIIQRQSPDLEPILRHGIQYFNNNTQHSSLFTLNEVKRAQRQVVAGLNFRITYSIVQTNCSKENFLFLTPDCKSLWNGDTGECTDNAYIDIQLRIASFSQNWDIYPGKDVVQPPTKICVGCPRDIPTNSPELEETLTHTITKLNAENNAISYFKIDNVKKARVRVVAGKKYFIDFVARETTCSKESNEELTESCETKKLGQRLGCNAEVYVVPWEKKIYPTVFNCSTTGEWIFTXWKRPPRVFSPFRSSRIGEIKEETTSHLRSCEYKGRPPKAGAEPASEREVS

SEQ ID NO: 51465 - protein, 86 aa, Homo sapiens
  misc_feature (1)...(86): Xaa = X or * as defined in Table 2
MSRGKVIRLHRRKQDNISGGDSSXTESWDEELSPSTVLYTATQHTPTSITLTXRRXKPKKRKKSPEKGRAAPKTXKIKNSPSEAQI

SEQ ID NO: 51466 - protein, 79 aa, Homo sapiens
  misc_feature (1)...(79): Xaa = X or * as defined in Table 2
QISQVLIICNQKXVILTGNFLDTYFXTTFINKKIDELRLCACAVAHSYNTTLCKKPRWKDCLRPAVQDQPVQHSETLSL

SEQ ID NO: 51467 - protein, 90 aa, Homo sapiens
  misc_feature (1)...(90): Xaa = X or * as defined in Table 2
SSDRITKPPSAEFLPLQRTFLHSLQDTVIELLHXDLETPPLTVLQNHPSLPRPIPAPPTLCPQTRWPHLRGHQGILAASHILETALAAIF

SEQ ID NO: 51468 - protein, 806 aa, Homo sapiens
  DOMAIN (380)..(402): SET domain proteins domain identified by eMATRIX, accession number PF00856B, p-value=4.558e-17, raw score of 16.42
  DOMAIN (311)..(440): SET domain identified by PFam, accession name SET, E-value= 1.5e-28, PFam score of 108.3
  misc_feature (1)...(806): Xaa = X or * as defined in Table 2
GFMEVLRDPIKKNSSESKPAQSGFSRGNSPLSCPESVEASPAVNEKSVYSTHNYGTTQRHGCRGLPYADHNYGAPPPPTPPASPPVQTIIPRSDLNGLPSPVEERCGDSPNSEGETVPTWCPCGLSQDGFLLNCDKCRGMSRGKVIRLHRRKQDNISGGDSSATESWDEELSPSTVLYTATQHTPTSITLTVRRTKPKKRKKSPEKGRAAPKTKKIKAFREGSRKSLRMKNSPSEAQNLDENTTEGWENRIRLWTDQYEEAFTNQYSADVQNALEQHLHSSKEFVGKPTILDTINKTELACNNTVIGSQMQLQLGRVTRVQKHRKILRAARDLALDTLIIEYRGKVMLRQQFEVNGHFFKKPYPFVLFLLQNLNGVEMCVDARTFGNDARFIRRSCTPNAEVRHMIADGMIHLCIYAVSAITKDAEVTIAFDYEYSNCNYKVDCACHKGNRNCPIQKRNSXCYRTATPTTSSKPTHHWSRDXTXKSRRKELEMEQQNEASEENNDQQSQEVPEKVTVSSDHEEVDNPEEKPEEEKEEVIDDQENLAHSRRTREDRKVEAIMHAFENLEKRKKRRDQPLEQSNSDVEITTTTSETPVGEETKTEAPESEVSNSVSNVTIPSTPQSVGVNTRRSSQAGDIAAEKLVPKPPPAKPSRPRPKSRISRYRTSSAQRLKRQKQANAQQAELSQAALEEGGSNSLVTPTEAGSLDSSGENRPLTGSDPTVVSITGSHVNRAASKYPKTKKYLVTEWLNDKAEKQECPVECPLRITTDPTVLATTLNMLPGLIHSPVNLHHPQTLHSLWLTLYP

SEQ ID NO: 51469 - protein, 65 aa, Homo sapiens
  misc_feature (1)...(65): Xaa = X or * as defined in Table 2
CRPPSPRPVRAARPARPQASFSREPPPRRMAPXSKRRRQSARGPVRPSRVWARIKAKPYSCCCQL

SEQ ID NO: 51470 - protein, 162 aa, Homo sapiens
  misc_feature (1)...(162): Xaa = X or * as defined in Table 2
GSYDINRQDTFQKDRQRVGPSGASQKTEGFLLRLLYSGLIIAHCSLEILGRNDPPASASKVAETTDSGSLSLANTXPPTPRVTSQTANATSQAAPALPLGSVPGRRAADPRPLLAWAPAPPGPGTSRNTHPAPDGLDMLVPIGDGVLGGNCFRNQCKSVSTS

SEQ ID NO: 51471 - protein, 56 aa, Homo sapiens
CFVIISNNRELYSPPNFETGSGSVMQEAVCSAAAQSQLTATSASWAQVILPPQPPE

SEQ ID NO: 51472 - protein, 386 aa, Homo sapiens
  DOMAIN (316)..(349): PROLINE-RICH PROTEIN 3 domain identified by eMATRIX, accession number DM00215, p-value=2.525e-09, raw score of 19.43
  misc_feature (1)...(386): Xaa = X or * as defined in Table 2
IYPQISFQKKFVMFFFSEALCTARAEECDPIGLLNNPRTSRYSRLKPNSSLGGSESRKTQMGPLPPPPKSPDGARPVPGCIKEAGPARGRSRLAPNPGALRRGVGLGRXSARIXGLVSKAAAGQGEARRGEATXARGALGRTTAGSFNAGWLTLDGARQQPGRQTPTRIPSCVADNAAGPSRTTTPDEALRPLRGGPACTAPASFDSRAPYSASSAPSEGRWPSRGFPPISPLYSQLPETRSHEWQAASKIQPRKASTSQXSARMEATXQQWAGPPAEPXSLWFPRLARRSVVHWRTPYISSSITSLPPVAAGIPEDSGPGSTQSSSRPGNTSSSSRPPPPPPPPPPQPLPPPPAGLASPRPVRARRPARPQASFSREPPPRRMAP

SEQ ID NO: 51473 - protein, 42 aa, Homo sapiens
HTYLSSRYSSMPYLDPSRPRPDCFTPPKGHSTEEINPSLTPT

SEQ ID NO: 51474 - protein, 35 aa, Homo sapiens
  misc_feature (1)...(35): Xaa = X or * as defined in Table 2
LPQPGPGRRRACLRQASPRQYSRLPGRPPPSGXSW

SEQ ID NO: 51475 - protein, 180 aa, Homo sapiens
  DOMAIN (112)..(134): PHOSPHOLIPASE D SIGNATURE domain identified by eMATRIX, accession number PR00718B, p-value=1.138e-30, raw score of 17.58
QRSWAGPGAGPEAGTRPPARGRRRQPGNVDPRRRAPQLRSQMQVAMARATTATGNRLWPGLLIMLGSVCHRGSPCGLSTHVEILLLEHQDAYQAGIVFPDCFYPSICKGGKFHDVSESTHWTPFLNASVHYIRENYPLPWEKDTEKLVAFLFGITSHMAADVSWHSLGLEQGFLRTMGAI

SEQ ID NO: 51476 - protein, 46 aa, Homo sapiens
HTYLSSRYSSMPYLDPSRPRPDCFTPPKGHSTEEINPSLTPTINLA

SEQ ID NO: 51477 - protein, 163 aa, Homo sapiens
  misc_feature (1)...(163): Xaa = X or * as defined in Table 2
STKCQYFSHLLLLFSASESKQLLLYSAFFRYVPVKDLLGIYEKLYICFISLLQTGLXRYQEXYHIHFIFSFSLPXLYPTYSTKSPFLVEQFQEYFLGGLDDRXNSCLXRSRXMANSFDCFLSDSVLQGVVFSVVTSLFLFLFNSSKMQKNDFHRNLTTSLTES

SEQ ID NO: 51478 - protein, 43 aa, Homo sapiens
  misc_feature (1)...(43): Xaa = X or * as defined in Table 2
QCQRGPGCSRGHGIXIXEHWTAFGLLDLRQWFARGSWASGHGP

SEQ ID NO: 51479 - protein, 900 aa, Homo sapiens
  DOMAIN (793)..(819): PHOSPHOLIPASE D SIGNATURE domain identified by eMATRIX, accession number PR00718G, p-value=2.800e-32, raw score of 8.98
  DOMAIN (506)..(840): FG-GAP repeat domain identified by PFam, accession name FG- GAP, E-value=1.6e-39, PFam score of 144.7
  misc_feature (1)...(900): Xaa = X or * as defined in Table 2
QRSWAGPGAGPEAGTRPPARGRRRQPGNVDPRRRAPQLRSQMQVAMARATTATGNRLWPGLLMIVMASLCHRGSSCGLSTHIEIGHRALEFLHLHNGHVNYKELLLEHQDAYQAGTVFPDCFYPSLCKGGKFHDVSESTHWTPFLNASVHYIRENYPLPWEKDTEKLVAFLFGITSHMVADVSWHSLGIEQGFLRTMGAIDFHGSYSEAHSAGDFGGDVLSQFEFNFNYLARRWYVPVKDLLGIYEKLYGREVITENVIVDCSHIQFLEMYGEMLAVSKLYPSYSTKSPFLVEQFQEYFLGGLDDMAFWSTNIYHLTSFMLENGTSDCSLPENPLFIACGGQQNHTQGSKMQKNDFHRNLTSSLTENIDRNINYTERGVFFSVNSWTPDSMSFIYKALERNVRTMFIGGSQLSQKHVSMPLRHHYFLSFPYARLGWAMTSADLNQDGHGDLRGWGAPGLTAAPAHIPHSGRVYLIYGNDLGLPPVDLDLDKEAHRILEGFQPSGRFGSALAVLDFNLDGVPDLAVGAPSVGSEQLTYKGAVYVYFGSKQGGMSSSPNITISCQDIYCNLGWTLLAADVNGDSEPDLVIGSPFAPGGGKQKGIVAAFYSGPSLSDKEKLNVEAANWTVRGEEDFSWFGYSLHGVTVDNRTLLLVGSPTWKNASRLGHLLHIRDEKKSLGRVYGYFPPNGQSWFTISGDKAMGKLGTSLSSGHVLMNGTLKQVLLVGAPTYDDVSKVAFLTVTLHQGGATRMYALISDAQPLLLSTFSGDRRFSRFGGVLHLSDLDDDGLDEIIMAAPLRIADVTSGLIGGEDGRVYVYNGKETTLGDMTGRCKSWITPCPEEKAQYVLISPXEASSRFGELPSSPVRSQGQRTQVVHWLLGRSSLGARLSGALHVYSLGSD

SEQ ID NO: 51480 - protein, 133 aa, Homo sapiens
VVAEEDTELRDLLVQTLENSGVLNRIKAELRAGVFLALEEQEKVENKTPLVNESLKKFLNTKDLQGLEGRENLARDLGIIEAEGTVGGPLLLEVIRRCQQKEKGPTTGEGALDLSDVHSPPKSPEGKTSAQTT

SEQ ID NO: 51481 - protein, 565 aa, Homo sapiens
  DOMAIN (2)..(25): THROMBOMODULIN SIGNATURE domain identified by eMATRIX, accession number PR00907E, p-value=5.147e-09, raw score of 11.70
PLLPQCQAFSSSSHGFIPAAGIAPPRGSALPAGMASTVETYVTKARPSQGAPSNDHSASGLSCHTVKKVPCFSFAFCHECKFHEASPAMLNYRNTETHLEASVDILWSARTHVTGASFTVAKSASQLLEPGLGHFSAYAAIQWRTPKPRNRQLGWPCAPTLSKAGLARLRRLSWRSKMAATAAAVVAEEDTELRDLLVQTLENSGVLNRIKNKTPLVNESLKKFLNTKDDAMLHVVVEVVHSKTPDGAIRMKANDEANQSDTSVSLSEPKSKSSLHLLSHETKIGSFLSNRTLDGKDKAGLCPDEDDMEGDSFFDDPIPKPEKTYGLRKEPRKQAGSLASLSDAPPLKSGLSSLAGAPSLKDSESKRGNTVLKDLKLISDKIGSLGLGTGEDDDYVDDFNSTSHRSEKSEISIGEEIEEDLSVEIDDINTSDKVCTHLELTDRNTETHLEASVDILWSVHTHVTVPDDEEEDEAVPENKLTLDNLAEGFHLFNMAFDFSYNMDFSMKQALNLKQMVEEELVLNGNMFREMEKQKSQTNYDVSPSDYTYCASLSCLLFHLFYFCHP

SEQ ID NO: 51482 - protein, 601 aa, Homo sapiens
  misc_feature (1)...(601): Xaa = X or * as defined in Table 2
APRLKMGLHPNKPIVSQSRVVNDGQCKLHAAVDSRDPPDGTKRRVSSGGTGLPGPGRGPGLPAGAWLSAEGRGAGGSGDCGPSSGSAEPTQRPPRPSALPGAIPPLHLGLAPFRLASEAVAEQAPPPAPTLSFGAQWSGAPQGSVSSVNPEGAGPARCASGRGFGCVGRVARARSVPCCGRWPLARLRRLSWRSKMAATAAAVVAQEDTELRDLLVQTLENSGVLNRIKAELRAAVFLALEEQEKVENKTPLVNESLKKFLNTKDGRLVASLVAEFLQFFNLDFTLAVFQPETSTIFXLLFXLQGLEGRENLARDLGIIEAEGTVGGPLLLEVIRRCQQKEKGPTTGEGALDLSDVHSPPKSPEGKTSAQTTPSKIPRYKGQGKKKTSGQKAGDKKANDEANQSDTSVSLSEPKSKSSLHLLSHETKIGSFLSNRTLDGKDKAGLCPDEDDMEGDSFFDDPIPKPEKTYGLRKEPRKQAGSLASLSDAPPLKSGLSSLAGAPSLKDSESKRGNTVLKDLKLISDKIGSLGLGTGEDDDYVDDFNSTSHRSEKSEISIGEEIEEDLSVEIDDINTSDKLDDLTQDLTVSQLSDVADYLEDVA

SEQ ID NO: 51483 - protein, 77 aa, Homo sapiens
  DOMAIN (60)..(76): PROTEASE POLYPROTEIN HYDROLASE ASP domain identified by eMATRIX, accession number PD00302B, p-value=6.019e-09, raw score of 9.52
  DOMAIN (47)..(77): Retroviral aspartyl protease domain identified by PFam, accession name rvp, E-value=0.03, PFam score of 13.0
  misc_feature (1)...(77): Xaa = X or * as defined in Table 2
TNIFSRLNPQTKNVFCARQLSSXSVTIXGVLGQAVTRYFSQALSCDWGTLLFSRAFLIMPESPTPLLGRDILAKAGA

SEQ ID NO: 51484 - protein, 111 aa, Homo sapiens
  misc_feature (1)...(111): Xaa = X or * as defined in Table 2
RTSSRRTPNPCSRIRKNYFKFHMEPKKSPSXPRQCXAKRTKLEASCYLTSNYTTRLQXPKQHGWGTIRSFSSHEAIFQTITWGKTLDNTRLSRTEVPAAFHSALCPWFIET

SEQ ID NO: 51485 - protein, 233 aa, Homo sapiens; identical to SEQ ID NO: 46642
  DOMAIN (73)..(158): Retroviral aspartyl protease domain identified by PFam, accession name rvp, E-value=0.015, PFam score of 14.1

SEQ ID NO: 51486 - protein, 88 aa, Homo sapiens
  misc_feature (1)...(88): Xaa = X or * as defined in Table 2
INVGRHHVILQGLSCPGQLSSRSVTIXGVLGQAVTIYFSQPLSCDWRTLLFSHVFLIMPESPTPLLGRDILLYVCIGRFPIFRADCRT

SEQ ID NO: 51487 - protein, 164 aa, Homo sapiens
  DOMAIN (81)..(97): PROTEASE POLYPROTEIN HYDROLASE ASP domain identified by eMATRIX, accession number PD00302B, p-value=6.019e-09, raw score of 9.52
  DOMAIN (5)..(102): Retroviral aspartyl protease domain identified by PFam, accession name rvp, E-value=3.5e-06, PFam score of 27.0
  misc_feature (1)...(164): Xaa = X or * as defined in Table 2
QLAPCTLTEPRVCLTIEGQEVNCFLDTRAAFVLLSCPRQLSSRSVAIRGVLGQAVTXYFSQPLSCDWGTLRFSHAFLIMPKSPTPLLGRDILAKAGAIIHEKRKAFMRKREIKKQARSSKVHTSAASSCARTAPLGESFAEHLIKIADFTPPSSSSPCTTLFFS

SEQ ID NO: 51488 - protein, 383 aa, Homo sapiens
  DOMAIN (338)..(368): kw TRANSCRIPTASE REVERSE II ORF2 domain identified by eMATRIX, accession number DM01354R, p-value=2.429e-23, raw score of 8.50
  DOMAIN (48)..(83): Gag P30 core shell protein domain identified by PFam, accession name Gag_p30, E-value=0.0041, PFam score of 14.3
MPQVDTRILATEKLVNPKEGVPERGYEAVFPSAGNVMFLDLGSCYTESTPNIPRKLQKLDDGPQTPHGDLLNLAFKVFNNRDEENERQNTGSLKCLPPPARRLQLNREASYNPPPPAPVSSVAMKATGPDNAQTQPCLRNYPVWLYLPLSVTPRLPLAATFSYRPSLGPGPVRRRKATYVSGVRQQYIRSRKRADRKTATLAGRHVTLKIDKEAIQALNHFDLSTHLVEKKFPPNRTSAGKHQKWDFKLNIWEVKNNNEQTLLGSKTMGSQYHSIPKSAKEITTTTTTTKLRVNIPIEAKIINKILANQIQKHMKKLFHHIQDVKIIENKNHMIMSIDVEKAFSKIQYPFMIKTLNKLGIKGTYRKTIRAIYGKLTANIILNE

SEQ ID NO: 51489 - protein, 122 aa, Homo sapiens; identical to SEQ ID NO: 50376
  DOMAIN (17)..(114): Retroviral aspartyl protease domain identified by PFam, accession name rvp, E-value=2.4e-10, PFam score of 41.8
  misc_feature (1)...(122): Xaa = X or * as defined in Table 2

SEQ ID NO: 51490 - protein, 333 aa, Homo sapiens
  DOMAIN (6)..(42): Synapsins proteins domain identified by eMATRIX, accession number BL00415Q, p-value=8.115e-09, raw score of 2.23
  DOMAIN (46)..(304): Spermine/spermidine synthase domain identified by PFam, accession name Spermine_synth, E-value=3.5e-95, PFam score of 329.6
  misc_feature (1)...(333): Xaa = X or * as defined in Table 2
GGAGPVVLRRRAACSPGPAPRAARPPAMEPGPDGPAASGPAAIREGWFRETCSLWPGQALSLQVEQLLHHRRSRYQDILVFRSKTYGNVLVLDGVIQCTERDEFSYQEMIANLPLCSHPNPRKVLIIGGGEGGVLREVVKHPSVESVVQCEIDEDVIQVSKKFLPGMAIGYSSFEADTYMWGDGFXVSWKQKQDAFDVIIIDSSDPMGPAESLFKESYYQLMKTALLREDGVLCCQGECQWLHLDLIKEMRQFCQSLFPVVLAYAYCTIPTYTPSGQIGFMLCSKNPSTNFQEPVQAVDNSSKVAKMQLKYYNSERATAAAFVLPEFARQGLE

SEQ ID NO: 51491 - protein, 138 aa, Homo sapiens
  DOMAIN (8)..(138): 3'-5' exonuclease domain identified by PFam, accession name 3_5_exonuclease, E-value=6.3e-05, PFam score of 5.3
FSYEKLLNWQEFAVDLEHHSYRSFLGLTCLKQISTRTEDFIIDTLELRRDMYILNESLTDPAIVKPLAEEMLSYARDDTHYLLYIYDKMKLQMRERGNRQTVQLHVVWQRSRDICLKKFIKPIFTDESYLELYRKLKK

SEQ ID NO: 51492 - protein, 568 aa, Homo sapiens
  DOMAIN (230)..(275): kw TRANSCRIPTASE REVERSE II ORF2 domain identified by eMATRIX, accession number DM01354N, p-value=1.000e-40, raw score of 13.17
  DOMAIN (314)..(567): Reverse transcriptase domain identified by PFam, accession name rvt, E-value=1.7e-67, PFam score of 237.6
GILLDEASGVNKNQQPVLPAGLQVPKTVVSSWNRKAAEYGKKAKSETFRLLHAKNIIRPQLKFREKIDNSNTPFLPKIFIKPNAQKPLPQALSKERRERPQDRPEDLDVPPALADFIHQQRTQQVEQDMFAHPYQYELNHFTPADAVLQKPQPQHHSYRSFLGLTCLMQISTRTEDFIIDTLELRSDMYILNESLTDPAIVKKNQIDAIKNDKGDITTDPTEIQTTIRDYYKHLYANKLENLEEMDKFLDTYTLPRLNQKEIESLNRPITGAEIVAIINSLPTKKSLGPDGFTAEFYQRYKEELVPFLLKLFQSIEKEGILPNSFYEASIILIPKPGRDTTKKENFRPISLMNIDAKILNKILANRIQQHIKKLIHHDQVGFIPGMQGWFNIRKSINVMQRINRTKDKNHVIISIDAEKAFDKIQQRFMLKTLNKLGIDGTYLKIIRAIYDKPTANIILNGQKLEAFPLKTGTRQGGPLSPLLFNIVLEVLARAIRQEKEIKGIQLGKEEVKLSLFADDMIVYLENPIVSAQNLLKLISNFSKVSGYKINIQKSQAFLYTNNREPNHE

SEQ ID NO: 51493 - protein, 1034 aa, Homo sapiens
  DOMAIN (585)..(621): Phosphatidylinositol 3- and 4-kinases proteins domain identified by eMATRIX, accession number BL00915D, p-value=1.000e- 22, raw score of 27.02
  DOMAIN (748)..(1030): CUB domain identified by PFam, accession name CUB, E-value= 1.4e-54, PFam score of 194.8
  misc_feature (1)...(1034): Xaa = X or * as defined in Table 2
MFDTHQAARLLNLGRHSLDHLLKLYCNVDSNKQYQLADWRIRPLPEEMLSYARDDTHYLLYIYDKMRLEMWERGNGQPVQLQVVWQRSRDICLKKFIKPIFTDESYLELYRKQKKHLNTQQLTAFQLLFAWRDKTARREDESYGYVLPNHMMLKIAEELPKEPQGIIACCNPVPPLVRQQINEMHLLIQQAREMPLLKSEVAAGVKKSGPLPSAERENVKSQPVQVHLXQRPVLTAGRKLLPACTFYMPACWGLLMPILKNALFGPHDWSHAPSDGYPIIPTSGSVPVQKQASLFPDEKEDNLLGTTCLIATAVITLFNEPSAEDSKKGPLTVAQKKAQNIMESFENPFRMAAKFDPSTKIYEISNRWKLAQVQVQKDSKEAVKKKAAEQTAAREQAKEACKAAAEQAISVRQQVVLENAAKKRERATSDPRTTEQKQEKKRLKISKKPKDPEPPEKEFTPYDYSQSDFKAFAGNSKSKVSSQFDPNKQTPSGKKCIAAKKIKQSVGNKSMSFPTGKSDRYVVDGGVAQGAQHPSNLMLDRLSGKILHIDFGDCFEVAMTREKFPEKIPFRLTRMLTNAMEVTGLDGNYRITCHTVMEVLREHKDSVMAVLEAFVYDPLLNWRLMDTNTKGNKRSRTRTDSYSAGQSVEILDGVELGEPAHKKTGTTVPESIHSFIGDGLVKPEALNKKAIQIINRVRDKLTGRDFSHDDTLDVPTQVELLIKQATSHENLCQCYIGWLLTLLGLLCGSVATPLGPKWPEPVFGRLASPGFPGEYANDQERRWTLTAPPGYRLRLYFTHFDLELSHLCEYDFVKLSSGAKVLATLCGQESTDTERAPGKDTFYSLGSSLDITFRSDYSNEKPFTGFEAFYAAEDIDECQVAPGEAPTCDHHCHNHLGGFYCSCRAGYVLHRNKRTCSALCSGQVFTQRSGELSSPEYPRPYPKLSSCTYSISLEEGFSVILDFVESFDVETHPETLCPYDFLKIQTDREEHGPFCGKTLPHRIETKSNTVTITFVTDESGDHTGWKIHYTSTDP

SEQ ID NO: 51494 - protein, 913 aa, Homo sapiens
  DOMAIN (340)..(499): 3'-5' exonuclease domain identified by PFam, accession name 3_5_exonuclease, E-value=5.5e-34, PFam score of 126.3
  misc_feature (1)...(913): Xaa = X or * as defined in Table 2
QALARRAVQAEKMAPPSTREPRVLSATSATKSDGEMVLPGFPDADSFVKFALGSVVAVTKASGGLPQFGDEYDFYRSFPGFQAFCETQGDRLCFQCMSRVMQVPMGCRSNIKDRSKVTELEDKFDLLVDANDVILERVGILLDEASGVNKNQQPVLPAGLQVPKTVVSSWNRKAAEYGKKAKSETFRLLHAKNIIRPQLKFREKIDNSNTPFLPKIFHSNPMVQKPLPQALSKERRERPQDRPEDLDVPPGTGWIFIPSGRGTQAGLRQDMFVHPYQYELKSLLPQADASAFKSHKPQLYRPIEETTCHFHIPPWSELVELNEKLLNCQEFAVDLEHHSYRSFLGLTCLMQISTRTEDFIIDTLELRSDMYILNESLTDPAIFLVFHGADSDIEGLQKDFGLDVVNMFDTHQAARLLNLGRHSLDHLLKLYCNVDSNKQYQLADWRIRPLPEEMLHYAPGXTPHYPAYISYDKMRSLEMWERGNGQPVQLQVVWQRSRDICLKKFIKPIFTDESYLELYRKQKKHLNTQQLTAFQLLFAWRDKTARREDESYGYVLPNHMMLKIAEELALREPSGASXVCCNPVPPLVRQQINEMHLLIQQAPRDCPLLKSEVAAGVKKSGPLPSAERLENVLFGPHDSSHAPTDGYPIIPTSGSVPVQKQASLFPDEKEDNLLGTTCLIATAVITLFNEPSAEDSKKGPLTVAQKKAQNIMESFENPFRMVPALTGDTVLRVSQAAKFDPSTKIYEISNRWKLAQVQVQKDSKEAVKKKAAEQTAAREQAKEACKAAAEQAISVRQQVVLENAAKKRERATSDPRTTEQKQEKKRLKISKKPKDPEPPEKEFTPYDYSQSDFKAFAGNSKSKVSSQFDPNKQTPSGKKCIAAKKIKQSVGNKSMSFPTGKSDRGFRYNWPQR

SEQ ID NO: 51495 - protein, 886 aa, Homo sapiens
  DOMAIN (318)..(469): 3'-5' exonuclease domain identified by PFam, accession name 3_5_exonuclease, E-value=1.4e-68, PFam score of 241.3
  misc_feature (1)...(886): Xaa = X or * as defined in Table 2
QALARRAVQAEKMAPPSTREPRVLSATSATKSDGEMVLPGFPDADSFVKFALGSVVAVTKASGGLPQFGDEYDFYRSFPGFQAFCETQGDRLLQCMSRVMQYHGCRSNIKDRSKVTELEDKFDLLVDANDVILERVGILLDEASGVNKNQQPVLPAGLQVPKTVVSSWNRKAAEYGKKAKSETFRLLHAKNIIRPQLKFREKIDNSNTPFLPKIFIKPNAQKPLPQALSKERRERPQDRPEDLDVPPALADFIHQQRTQQVEQDMFAHPYQYELNHFTPADAVLQKPQPQLYRPIEETPCHFISSLDELVELNEKLLNCQEFAVDLEHHSYRSFLGLTCLMQISTRTEDFIIDTLELRSDMYILNESLTDPAIVKVFHGADSDIEWLQKDFGLYVVNMFDTHQAARLLNLGRHSLDHLLKLYCNVDSNKQYQLADWRIRPLPEEMLSYARDDTHYLLYIYDKMRLEMWERGNGQPVQLQVVWQRSRDICLKKFIKPIFTDESYLELYRKQKKHLNTQQLTAFQLLFAWRDKTARREDESYGYVLPNHMMLKIAEELPKEPQGIIACCNPVPPLVRQQINEMHLLIQQAREMPLLKSEVAAGVKKSGPLPSAERLENVLFGPHDCSHAPPDGYPIIPTSGSVPVQKQASLFPDEKEDNLLGTTCLIATAVITLFNEPSAEDSKKGPLTVAQKKAQNIMESFENPFRMISNRWKLAQVQVQKDSKEAFSRRKALGQTACRGTGQRRPCKAAAEQAISVPTAGSLLENAAKEERARQQADPRTTEQKPRRRNRLKNFPKKPKDPRAPPRKEGLRPYDLQPSQDFKGFCLETANPKVSSQFDPNXTRPPSGKKCIASHKKLXHVGGENNKAMSFPTGKSDRGFRYNWPQR

SEQ ID NO: 51496 - protein, 62 aa, Homo sapiens
  misc_feature (1)...(62): Xaa = X or * as defined in Table 2
HARPRHGPRLRCEVGLRCAPGYAGASARPTCECGDTRYCPQDPNQTXSRPVPIIAHRYCLTG

SEQ ID NO: 51497 - protein, 86 aa, Homo sapiens
QTPRPDHRLFRDQQTVDTHIRQCFAKRSGQDTRHQQHHRHRLSLSAEPELPLVLALCACAFATFIEWANCRSTWRKPSRSCRRPAL

SEQ ID NO: 51498 - protein, 247 aa, Homo sapiens
  DOMAIN (25)..(43): Ubiquitin carboxyl-terminal hydrolases family 2 proteins domain identified by eMATRIX, accession number BL00972A, p-value= 7.500e-20, raw score of 11.93
  DOMAIN (24)..(55): Ubiquitin carboxyl-terminal hydrolases famil domain identified by PFam, accession name UCH-1, E-value=1.6e-14, PFam score of 61.7
MGANASALEKEIGPEQFPVNEHYFGLVNFGNTCYCNSVLQALYFCRPFREKVLAYKSQPRKKESLLTCLADLFHSIATQKKKVGVIPPKKFITRLRKENELFDNYMQQDAHEFLNYLLNTIADILQEERKQEKQNGRLPNGNIDNENNNSTPDPTWVHEIFQGTLTNETRCLTCETISSKDEDFLDLSVDVEQNTSITHCLRGFSNTETLCSEYKYYCEECRSKQEAHKRMKVKKLRHDSSSTPEEI

SEQ ID NO: 51499 - protein, 140 aa, Homo sapiens
PNVRWCPSCYRNQDDHELQITHGNKILCGIVWKKIAQVEQMRKFSRLEKQRTHVLSCSDLQAVRRFRGVVSEGSFEMGEKVYKRKDMFQLSLLTEQHGDSTLGSGSSYTQMPAENGSLVHTLVTAAPPFFAEKPHSITAG

SEQ ID NO: 51500 - protein, 431 aa, Homo sapiens
  misc_feature (1)...(431): Xaa = X or * as defined in Table 2
MGASRSQKPGPSRDYSYTAGCDVDQRRRGAQKLSRSDTKRIVMSYGKKALKNDKFEIRAFSSSLEVRYRNQDDHELQIHTGTRFYVELCGFAVTRLRDPPMLRHAAMALLPWRPPDYSASLLPDWLPVPSSKVVITYPGFTSIWAFSNTETLCSEYKYYCEECRSKQEAHKRRKVXKLPMILAPHLKRFKYKDQLHRFTKLFTRASLRGPRDERLKRVSRQLFSLVVVTSRVFDVLLRILHRLGQYVSSEYYVALMCSEGHGPGAEDVTELLQSHEKTEWMRSCFFWMTKSGVFDGIYLWNAFNQEGEDLYKENCKTLMKEVEDAQINGKTSYAHGSEEYCKMSILPRILLQKISRDDCFKIVLKFCVDHQKTKKCCMITLKSSVVQLAFTIKISVSEMCAREDFVVVISFQHSEVPSRQLARCTFKEGYT

SEQ ID NO: 51501 - protein, 46 aa, Homo sapiens
VEYGPLQAQMHPGIGTLLTGPPGCPGGIALAFMGPDVMLEGGRRHG

SEQ ID NO: 51502 - protein, 456 aa, Homo sapiens
  DOMAIN (327)..(339): GLYCOSYL HYDROLASE FAMILY 8 SIGNATURE domain identified by eMATRIX, accession number PR00735D, p-value=3.093e-09, raw score of 12.75
MDVFTDPDLLLDLVDAATRRWVPVYLLLDRQQLPAFLELAQQLGVNPWNTENVDVRVVRGCSFQSRWRRQVSGTVREKFVLLDGERVISGSYRFEPALGLDLLLNCSLLLCRGGGHPLDLLSVTLASGSRCFSFLSVAWGFVSDVDIQSERFRALGSARFTLGTVLGLATLHTYRGRLSYLPATVEPASPTPAHSLPRAKSELTLTPDPAPPMAHSPLHRSVSDLPLPLPQPALASPGSPEPLPILSLNGGGPELAGDWGGAGDAPLSPDPLLSSPPGSPKAALHSPVSEGAPVIPPSSGLPLPTPDARVGASTCGPPDHLLPPLGTPLPPDWVTLEGDFVLMLAISPSHLGADLVAAPHARFDDGLVHLCWVRSGISRAALLRLFLAMERGSHFSLGCPQLGYAAARAFRLEPLTPRGVLTVDGEQVEYGPLQAQMHPGIGTLLTGPPGCPGREP

SEQ ID NO: 51503 - protein, 806 aa, Homo sapiens
  DOMAIN (421)..(445): Diacylglycerol kinase catalytic domain proteins (presumed) domain identified by eMATRIX, accession number PF00781D, p-value= 6.547e-10, raw score of 11.11
  DOMAIN (334)..(471): Diacylglycerol kinase catalytic domain domain identified by PFam, accession name DAGKc, E-value=1.3e-05, PFam score of 32.1
  misc_feature (1)...(806): Xaa = X or * as defined in Table 2
MEEVAEAPQPIDPKPLATQPQSIIITTITTIITITTTTITITTTTITTTITIITTTITITTTITTTTITIITTTITITTTITITTIITIITTTITITTIITTTITTTVITIITTTITTIITITTITPSSSSSPSSQADECWGEAEPLMSRQAHVWLRYRTGCREERPDQELTGSWGHGPRSTLVRAKAMAPPPPPLAASTPLLHGEFGSYPARGPRFALTLTSQALHIQRLRPKPEARPRGGLVPLAEVSGCCTLRSRSPSDSAAYFCIYTYPRGRRGARRKATRTFRADGAATYEENRAEAQRWATALTCLLRGLPLPGDGEITPDLLPRPPRLLLLVNPFGGRGLAWQWCKNHVLPMISEAGLSFNLIQTERQNHARELVQGLSLSEWDGIVTVSGDGLLHEVLNGLLDRPDWEEAVKMPVGILPCGSGNALAGAVNQHGGFEPALGLDLLLNCSLLLCRGGGHPLDLLSVTLASGSRCFSFLSVAWGFVSDVDIQSERFRALGSARFTLGTVLGLATLHTYRGRLSYLPATVEPASPTPAHSLPRAKSELTLTPDPAPPMAHSPLHRSVSDLPLPLPQPALASPGSPEPLPILSLNGGGPELAGDWGGAGDAPLSPDSTAGFTSWLSQGSSTLTRLRRGPRNSPILWAPTSHPXCPGRGLHRGPPDHLLPPLGTPLPPDWVTLEGDFVLMLAISPSHLSADLVAAPHARFDDGLVHLCCVRSGISRAALLRLFLAMERGSHFSLGCPQLGYAAARAFRLEPLTPRGVLTVDGEQVEYGPLQAQMHTGIGTLLTGPPGCPGREP

SEQ ID NO: 51504 - protein, 151 aa, Homo sapiens
  misc_feature (1)...(151): Xaa = X or * as defined in Table 2
RKQSHEDEWRSTNKTVGHPSARLYEPPWWAHTWTPPGGSKAPSDPPLSHQLSPPAGQPHFASPEPTSKTPDPWPGNVFSSFPLPQSLPELRHTLYLPMGTKKPPGSSMIFYTXAQYPGTNSSATICRLLSYKSGQVYPNTGQAPPQQRRGR

SEQ ID NO: 51505 - protein, 91 aa, Homo sapiens
  DOMAIN (6)..(82): Protein of unknown function DUF122 domain identified by PFam, accession name DUF122, E-value=7.1e-19, PFam score of 76.1
EELEALRRQRLAELQAKHGDPGDAAQQEAKHREAEMRNSILAQVLDQSARARVSEQGLIEILKKVSQQTEKTTTVKFNRRKVMDSDEDDDY

SEQ ID NO: 51506 - protein, 133 aa, Homo sapiens
GKDVFIQGNRIKLGAGFACLLSVPILFEETFYNEKEESFSILCIAHPLEKRERSEEPLAPSDPFSLKTIEDVREFLGRHSERFDRNIASFHRTFRECERKSLRHHIVSSRAVLCLACPVSVQCRVLGALNFLW

SEQ ID NO: 51507 - protein, 39 aa, Homo sapiens
  misc_feature (1)...(39): Xaa = X or * as defined in Table 2
VSEQGLIEILKKXCQLTEKTSTVKFNRRKVMDSDEDDDY

SEQ ID NO: 51508 - protein, 138 aa, Homo sapiens
  DOMAIN (20)..(138): Protein of unknown function DUF122 domain identified by PFam, accession name DUF122, E-value=0.032, PFam score of -20.4
  misc_feature (1)...(138): Xaa = X or * as defined in Table 2
PRLLQRSTPSPWRTEELEALRRQRLADAAGQNTGDPGDAAQQEAKAPGQAEMRNSILAQVPGSSPAPAPRLSNLSHLVKPXKNLKPVENYPYTRLARYWTTXVMTGIRNQGFNXKSLKKVKAQQTEKTTTVKFNQKKK

SEQ ID NO: 51509 - protein, 275 aa, Homo sapiens
  DOMAIN (3)..(91): ParB-like nuclease domain identified by PFam, accession name ParBc, E-value=4.9e-09, PFam score of 43.4
MKGTLPWSLITPGNERGQELLTGDALDGIIPSVLLTGQQTPAFGRRVSGVIEIADGSRRRRAAALTESDYRVLVGELDDEQMAALSRLGNDYRPTSAYERGQRYASRLQNEFAGNISALADAENISRKIITRCINTAKLPKSVVALFSHPGELSARSGDALQKAFTDKEELLKQQASNLHEQKKAGVIFEAEEVITLLTSVLKTAGDPLDPYRRHYFPRPLLPRNRETPVRLKRGKRVNRGDLLEVPEDESPAATHGRYRDRQGNERPTDFRGIL

SEQ ID NO: 51510 - protein, 687 aa, Homo sapiens
  DOMAIN (589)..(605): Myc-type 'helix-loop-helix' dimerization domain proteins. domain identified by eMATRIX, accession number BL00038A, p-value= 1.667e-10, raw score of 13.61
  DOMAIN (594)..(648): Helix-loop-helix DNA-binding domain identified by PFam, accession name HLH, E-value=1.8e-17, PFam score of 71.4
  misc_feature (1)...(687): Xaa = X or * as defined in Table 2
KWPKMNPQQQRMAAIGTDKELSDLLDFSAMFSPPVNSGKTRPTTLGSSQFSGSGIDERGGTTSWGTSGQPSPSYDSSRGFTDSPHYSDHLNDSRLGAHEGLSPTPFMNSNLMGKTSERGSFSLYSRDTGLPGCQSSLLRQDLGLGSPAQLSSSGKPGTAYYSFSATSSRRRPLHDSAALDPLQAKKVRKVPPGLPSSVYAPSPNSDDFNRESPSYPSPKPPTSMFASTFFMQDGTHNSSDLWSSSNGMSQPGFGGILGTSTSHMSQSSSYGNLHSHDRLSYPPHSVSPTDINTSLPPMSSFHRGSTSSSPYVAASHTPPINGSDSILGTKGNAAGSSQTGDALGKALASIYSPDHTSSSFPSNPSTPVGSPSPLTGTSQWPRPGGQAPSSPSYENSLHSLQSRMEDRLDRLDDAIHVLRNHAVGPSTSLPAGHSDIHSLLGPSHNAPIGSLNSNYGGSSLVASSRSASMVGTHREDSVSLNGNHSVLSSTVTTSSTDLNHKTQENYXRWPCKSQSGTVVPQEIKTENKEKDENLHEPPSSDDMKSDDXSSQKDIKVSSRGRTSSTNEDEDLNPEQKIEREKERRMANNARERLRVRDINEAFKELGRMCQLHLKSEKPQTKLLILHQAVAVILSLEQQVRERNLNPKAACLKRREEEKVSAVSAEPPTTLPGTHPGLSETTNPMGHM

SEQ ID NO: 51511 - protein, 50 aa, Homo sapiens
  misc_feature (1)...(50): Xaa = X or * as defined in Table 2
QNASSPSKGSQLLTSKGTKLDGEXVXXINRSRLQKVANNKLLWRKLKGQF

SEQ ID NO: 51512 - protein, 498 aa, Homo sapiens
  DOMAIN (23)..(68): kw TRANSCRIPTASE REVERSE II ORF2 domain identified by eMATRIX, accession number DM01354N, p-value=5.982e-12, raw score of 13.17
  misc_feature (1)...(498): Xaa = X or * as defined in Table 2
MRKTQCKNAESSKNQNASFPPKDHNSLTAREQNWIENEFGELTEVGFRRLNQEEVEFLNRPITGSEIEAIINSLATKKGPEGFIAEFYXRKTQCKNAESSKNQNASFPPKDHNSLTAREQNWIENEFGELTEVGFRRLNQEEVEFLNRPITGSEIEAIINSLATKKRTRGIHSRILLEVITSFYVERGGNAMSFMGKGVTKSTILCLLHLSHEMMAQAGSLEWMSLWFLPLGSHSEEHIPTQQGLAWLIPLWVDRDPEVRFTSLGLGSALTTLETGCVALANSCQNISGGLWGTVVNILLDQSECSMVRRESQHHVDVAKVYHLHPPEWWPKLYLGPLDHSRELRSSVLECMEQRLEVTLGTTPYFSVPISKFIQAVTTKCLRLGASRFSVCLAGLSAAPEQKIHPPPPTQQFQQLPHDSVGFLQFSLHPKGNFGSGISSPDRSGDASHYSYPSLWQIRGTSRVKKQTWGSGNLKKWGIHKVQPQRLMMQNDTDEESI

SEQ ID NO: 51513 - protein, 329 aa, Homo sapiens
  DOMAIN (144)..(187): 1 kw MIND INHIBITOR DIVISION CONTROL domain identified by eMATRIX, accession number DM01756B, p-value=4.822e-15, raw score of 22.91
  DOMAIN (109)..(213): ParA family ATPase domain identified by PFam, accession name ParA, E-value=1.5e-22, PFam score of 88.4
MCLVRDCDVLEDVFPPVIGVAAHKGGVYKTSVSVHLAQDLALKGLRVLLVEGNDPQGTASMYHGWVPDLHIHAEDTLLPFYLGEKDDVTYAIKPTCWPGLDIIPSCLALHRIETELMGKFDEGKLPTDPHLMLRLAIETVAHDYDVIVIDSAPNLGIGTINVVCAADVLIVPTPAELFDYTSALQFFDMLRDLLKNVDLKGFEPDVLCVRNSDGACCCSTVSGASAGQTEMTEGDVNGQELESSGAIFTYMSGAWMVMTLKAGLSWDCRWEPRVGRAAASFSASMYEGKKTKNMFLTRALEKILADKEVKKAHHSQLRKACEVALGLPT

SEQ ID NO: 51514 - protein, 95 aa, Homo sapiens
ARGSERAAASFSASMYEGKKTKNMFLTRALEKILADKEVKKAHHSQLRKACRVALEGNKAETEKQSPPHGEAKAGISTLPPVKSKTNFIEADKYF

SEQ ID NO: 51515 - protein, 408 aa, Homo sapiens
  DOMAIN (335)..(387): Respiratory-chain NADH dehydrogenase subunit 1 proteins domain identified by eMATRIX, accession number BL00667A, p-value= 8.297e-11, raw score of 20.80
MTEGDVNGQELESSGAIFTYMSGAWMKLIAYGHLTGNAPDSTTPGKKLIDRIIETICGCFQGPQTDEGVQLQIIKVGGIVWIFPAAGFITLDLFHLNYKSQFKLESSCHCPDMWLSPGQEHVLRLLPLIHGRREGGGGSSDPRLPAAGGEEEERKEEKRERRGGGVHGTAVQDSALRLPQGGFCFGKSKPKPIDKGSKMFHFFLSLSDKSVNSRFQVPSELTQLSAGAQAELVKAHRCWGLEKGQESITLSPSLLNLLGPCDGEETAAPPPLPPIPTVLTPLPLCPTSPPSTLLLRLFNLDQQQPLLPERHHSHPAWQSKLAQGRYARKWLHTVPLGNSILCQLRNSMEKIHVSGQIQMVPDPLGGMLKEGIVVIGEDSSMRVIAPENLPVGQDVEVEDSDIDDPDPV

SEQ ID NO: 51516 - protein, 1909 aa, Homo sapiens
  DOMAIN (749)..(938): Sec7 domain identified by PFam, accession name Sec7, E-value= 1.9e-74, PFam score of 260.8
  misc_feature (1)...(1909): Xaa = X or * as defined in Table 2
SCRCPPRLQSPTSTPSPFSLLFLPLLLLPSSRWEPRVGRAAASFSASMYEGKKTKNMFLTRALEKILADKEVKKAHHSQLRKSCGRVALEEIKAETEKQSPPHGEAKAGSSTLPPVKSKTNFIEADKYFLPFELACQSKCPRIVSTSLDCLQKLIAYGALXLGNAPDSTTPGKKLIDRIIETICGCFQGPQTDEGVQLQIIKALLTAVTSQHIEIHEGTVLQAVRTCYNIYLASKNLINQTTAKATLTQMLNVIFARMENQALQEAKQMEKERHRQHHHLLPSPVSHHEPESPQLRYLPPQTVDHISQEHEGDLDLHTNDVDKSLQDDTEPENGSDISSAENEQTEADQATAAETLSKNEVLYDGENHDCEEKPQDIVQNIVEEMVNIVVGDMGEGTTINASADGNIGTIEDGSDSENIQANGIPGTPISVAYTPSLPDDRLSVSSNDTQESGNSSGPSPGAKFSHILQKDAFLVFRSLCKLSMKPLSDGPPDPKSHELRSKILSLQLLLSILQNAGPIFRTNEMFINAIKQYLCVALSKNGVSSVPEVFELSLSIFLTLLSNFKTHLKMQIEVFFKEIFLYILETSTSSFDHKWMVIQTLTRICADAQSVVDIYVNYDCDLNAANIFERLVNDLSKIAQGRGSQELGMSNVQELSLRKKGLECLVSISKCMVEWSKDQYVNPNSQTTLGQEKPSEQEMSEIKHPETINRYGSLNSLESTSSSGIGSYSTQMSGTDNPEQFEVLKQQKEIIEQGIDLFNKKPKRGIQYLQEQGMLGTTPEDIAQFLHQEERLDSTQVGEVPGGIMDKFNKEVMYAYVDQHDFSGKDFVSALRMFLEGFRLPGEAQKIDRLMEKFAARYLECNQGQTLFASADTAYVLAYSIIMLTTDLHSPQVKNKMTKEQYIKMNRGINDSKDLPEEYLSAIYNEIAGKKISMKETKELTIPTKSSKQNVASEKQRRLLYNLEMEQMAKTAKALMEAVSHVQAPFTSATHLEHVRPMFKLAWTPFLAAFSVGLQDCDDTEVASLCLEGIRCAIRIACIFSIQLERDAYVQALARFTLLTVSSGITEMKQKNIDTIKTLITVAHTDGNYLGNSWHEILKCISQLKLAQLIGTGVKPRYISGTVRGREGSLTGTKDQAPDEFVGLGLVGGNVDWKQIASIQESIGETSSQSVVVAVDRIFTGSTRLDGNAIVDFVRWLCAVSMDELLSTTHPRMFSLQKIVEISYYNMGRIRLQWSRIWEVIGDHFNKVGCNPNEDVAIFAVDSLRQLSMKFLEKGELANFRFQKDFLRPFEHIMKRNRSPTIRDMVVRCIAQMVNSQAANIRSGWKNIFSVFHLAASDQDESIVELAFQTTGHIVTLVFEKHFPATIDSFQDAVKCLSEFACNAAFPDTSMEAIRLIRHCAKYVSDRPQAFKEYTSDDMNVAPEDRVWVRGWFPILFELSCIINRCKLDVRTRGLTVMFEIMKTYGHTYEKHWWQDLFRIVFRIFDNMKLPEQQTEKAEWMTTTCNHALYAICDVFTQYLEVLSDVLLDDIFAQLYWCVQQDNEQLARSGTNCLENVVILNGEKFTLEIWDKTCNCTLDIFKTTIPHALLTWRPNSGETAPPPPSPVSEKPLDTISQEGRRYIMDLFHPRLWDNRPKAPLGSAAGCXWRKSAKIKSTAKFPEQKLFAALLIKCVVQLELIQTIDNIVFFPATSKKEDAENLAAAQRDAVDFDVRVDTQDQGMYRFLTSQQLFKLLDCLLESHRFAKAFNSNNEQRTCALWKAGFKGKSKPNLLEAGRPASLACGLPHFSFRMYMDESRVSAWEEVQQRLLNVCSEALSYFLTLTSESHREAWTNLLLLFLTKVLKISDNRFKAHASFYYPLLCEIMQFDLIPELRAVLRRFFLRIGVVFQISQPPEQELGNKQGNDGGT

SEQ ID NO: 51517 - protein, 89 aa, Homo sapiens
  misc_feature (1)...(89): Xaa = X or * as defined in Table 2
KLRLTTTSVYAIPNRRRYDGFKLVQSCIFIXNFRSXDLRPPQYMPFLIEGGMTVSNSCRAAFSFTSLCRHFRSEAWLQNTNTGGFGSTF

SEQ ID NO: 51518 - protein, 103 aa, Homo sapiens
IRPLVIAPFPLPVSWLAVPAMLSLDFLDDVRRMNKRQKERGEEKRKEKEKEKAEESGMNRLAESGYLYLSPVLNASCPRTPQLLDSWTYVSGLPGALVLSATD

SEQ ID NO: 51519 - protein, 58 aa, Homo sapiens
  DOMAIN (29)..(55): Signal peptidases I serine proteins domain identified by eMATRIX, accession number BL00501A, p-value=9.550e-13, raw score of 21.02
  DOMAIN (9)..(52): Signal peptidase I domain identified by PFam, accession name Peptidase_S26, E-value=1.2e-13, PFam score of 47.7
  misc_feature (1)...(58): Xaa = X or * as defined in Table 2
XFLDDVRRMNKRQLYYQVLNFGMIVSSALMIWKGLMVITGSESPIVVVLSGSIGTCIS

SEQ ID NO: 51520 - protein, 140 aa, Homo sapiens
  misc_feature (1)...(140): Xaa = X or * as defined in Table 2
GGKITASGSPVPRPSGAXALPSGRCSTPRTSSCPRQLPEPPGLPSPPSAPANTTPDDSHAAPXGTRAHTHRPPPHTPTAPSRPPTSPPVATRTAPKAPQHHPPTSCPTQRPTDSPSVHEPSQPLATQHSTQPIXPVIVTQ

SEQ ID NO: 51521 - protein, 70 aa, Homo sapiens
  DOMAIN (4)..(70): Phosphotyrosine interaction domain (PTB/PID) domain identified by PFam, accession name PID, E-value=3.9e-18, PFam score of 68.9
HASVDHALRTISYIADIGNIVVLMARRRMPRSASQDCIETTPGAQEGKKQYKMICHVFESEDAQLIAQSI

SEQ ID NO: 51522 - protein, 755 aa, Homo sapiens
  DOMAIN (250)..(262): MARCKS FAMILY SIGNATURE domain identified by eMATRIX, accession number PR00963D, p-value=1.429e-09, raw score of 6.49
  DOMAIN (375)..(534): Phosphotyrosine interaction domain (PTB/PID) domain identified by PFam, accession name PID, E-value=7.2e-63, PFam score of 222.3
  misc_feature (1)...(755): Xaa = X or * as defined in Table 2
TTAMAHRKLESVGSGMLDHRVRPGPVPHSQEPESEDMELPLEGYVPEGLELAALRPESPAPEEQECHNHSPDGDSSSDYVNNTSEEEDYDEGLPEEEEGITYYIRYCPEDDSYLEGMDCNGEEYLAHSAHPVDTDECQEAVEEWTDSAGPHPHGHEAEGSQDYPDRQLPIPEDEPSVLEAHDQEEDGHYCASKEGYQDYYPEEANGNTGASPYRLRRGDGDLEDQEEDIDQIVAEIKMSLSMTSITSASEASPEHGPEPGPEDSVEACPPIKASCSPSRHEARPKSLNLLPEAKHPGDPQRGFKPKTRTPEERLKWPHEQVCNGLEQPRKQQRSDLNGPVDNNNIPKTKKVASFPSLVAVPGPCEPKNLIDGIIFAANYLGSTQLLSERNPSKNIRMMQAQEAVSRVKRMQKAAKIKKKANSEGDAQTLTEVDLFISTQRIKVLNADTQETMMDHALRTISYIADIGNIVVLMARRRMPRSASQDCIETTPGAQEGKKQYKMICHVFESEDAQLIAQSIGQAFSVAYQEFLRANGINPEDLSQKEYSDIINTQEMYNDDLIHFSNSENCKELQLEKHKGEILGVVVVESGWGSILPTVILANMMNGGPAARSGKLSIGDQIMSINGTSLVGLPLATCQGIIKGLKXPDHRXSFNIVSCPPVTPRFLYSKRPDLKYQLGFSVQNGIICSLMRGGIAERGGVRVGHRIIEINGQSVVATAHEKIVQALSNSVGEIHMKTMPAAMFRLLTGQETPLYI

SEQ ID NO: 51523 - protein, 251 aa, Homo sapiens
  DOMAIN (204)..(237): PROLINE-RICH PROTEIN 3 domain identified by eMATRIX, accession number DM00215, p-value=2.983e-09, raw score of 19.43
  misc_feature (1)...(251): Xaa = X or * as defined in Table 2
TTPNKQHMMQTRAGSAWYLRSRGCSQGAPQKASSGSGGSSWNRSVATVPGIVLGWRRPELLSERGCAEARGAGVAGRQRLQLTGVQGKSVVRGRGLLGRREWCRRGGGAAPRPTPAGTPVPRRPGTRAGPEEGEGAGAGARAAPEPRPHALSPPAAFGADGQLRPLLLTSLRAHHPGRGGLLLTSPGTHQPRRGRQGTPPPASPSPAPEEGALPGVLPLXPPPSPPSPSSESPRPHPGGGALAVTRRTAAA

SEQ ID NO: 51524 - protein, 123 aa, Homo sapiens
  DOMAIN (44)..(79): CORE POLYPROTEIN PROTEIN GAG CONTAINS: P domain identified by eMATRIX, accession number PD02059B, p-value=4.409e-10, raw score of 24.48
  misc_feature (1)...(123): Xaa = X or * as defined in Table 2
LGSTRQAAPGQLRGHQAPAPNSDATAGQGRCRRSADXGWGSREQIXALPLPSGPAPLLPPLLPPLLPVPPSPPPPSPPSPPSPLPPPGPPXPPLTFSVVTPGGLWCPPHRKSLNPTSKGVNEY

SEQ ID NO: 51525 - protein, 166 aa, Homo sapiens
QQMLRTQTSLCKSCSRQIGFSFVRPKLCAFSGLYYCDICHQDDASVIPARIIHNWDLTKRPICRQALKFLTQIRAQPLINLQMVNASLYEHVERMHLIGRSREQLKLLGDYLGLCRSGALKELSKRLNHRNYLLESPHRFRVADLRQIADEVYEGFLKALIEFASQ

SEQ ID NO: 51526 - protein, 882 aa, Homo sapiens
  DOMAIN (74)..(316): PH domain identified by PFam, accession name PH, E-value=9.4e -09, PFam score of 36.3
MRTIQEEAGWQQEFILDMSAEILVDMYGTGGYMNVDFKNKVQAGDKNWELKPESSEIQDARAAVDGLSNPFQGLMKLGTVERQGAMGIWKELFCELSPLEFRLYLSNEEHTCVENCSLLRCESVGPAHSDGRFELVFSGKKLALRASSQDEAEDWLDRVREALQKVRPQQEDEWVNVQYSDQPEEPPEAPQGCLSPSDLLSEPAALQGTQSDWSSAQVPELDAIKESLLYLYMDRTWMPYIFSLPLEALKCFRIRNNEKMLSDSHGVETIRDILPDTSLGGPSFFKIITAKAVLKLQAGNAEEAALWRDLVRKVLASYLETAEEAVTLGGSLDENCQEVLKFATRENGFLLQYLVAIPMEKGLDSQGCFCAGCSRQIGFSFVRPKLCAFSGLYYCDICHQDDASVIPARIIHNWDLTKRPICRQALKFLTQIRAQPLINLQMVNASLYEHVERMHLIGRSREQLKLLGDYLGLCRSGALKELSKRAGPESASLKTASSILAAVLPEPGLLRARIADEVYEGFLKALIEFASQHVYHCDLCTQRSFICQICQHHDIIFPSEFDTTVSPAPVREEVLPGALRRCLTGYSAIQETWQRRSRAVEEGARDAEPTRACRDKWRRGRRADAPRCPGRQWAAERELRLAKELWPGPLLIQPETLRSGGRPCAGNPSRSFSRPGRVAPGKALLGEENAAAAMAADVEGDVYVLVEHPFEYTGKDGRRHRALSIGGTCGASPAAAPSTCPRSTCASCLRWATLPLTRRQVPPSGPAAPEPLAYDYRFVSAAVAAAPNGPPAEPRGGASSLCGPAQRGAASQRSSLAPGLPACLYLRPTAPVRPAQSLDDLTRAVVSPPAGNLGSSGSFKACSVAGSWVCLLPLSRSDSENV

SEQ ID NO: 51527 - protein, 95 aa, Homo sapiens
  misc_feature (1)...(95): Xaa = X or * as defined in Table 2
VIQDLHVPPREESAEQVDDPPEPVYRTXRGSPGPLHRAPLQPPFPARCGRRTRTRAPGAPTTTTQTRELPPGSRPLRLPRVPPAQPPPLPRWTAT

SEQ ID NO: 51528 - protein, 47 aa, Homo sapiens
TTAGSRVSQLLVSLLPCASTGVVPLTSTPKTFPGLCPGSSEGPGWWT

SEQ ID NO: 51529 - protein, 193 aa, Homo sapiens
  misc_feature (1)...(193): Xaa = X or * as defined in Table 2
PVTPRRTILPWALSVSPALPLPXPHPPAGLVMSARTSRCSTPTTSLRSSGXGWRTPTGSHTSTIQRTPLFDGSCPRSLSLPLEASINPARMVTPQPRPALQRRRSQQSWMRLGAGRKSLLPQLLXGPRPWTRQGCSIAPRRQTRESGSGRSTGVPPGLCWRVASXHSSRTQRPRLQAAXGSLPSFPPLSTQWS

SEQ ID NO: 51530 - protein, 589 aa, Homo sapiens
  DOMAIN (75)..(258): PH domain identified by PFam, accession name PH, E-value=2.7e -05, PFam score of 24.0
  misc_feature (1)...(589): Xaa = X or * as defined in Table 2
TCSTQTSLRNPPRRPRAASLPQTCSRSPRPSRAHSLTGRPPRFQSQMPSRSPCCXICXNIRIDLCGSTHSDGRFELVFSGKKLALRASSQDEAEDWLDRVREALQKVRPQQEDEWVNVQYPDQPEEPPEAPQGCLSPSDLLSEPAALQGTQFDWSSAQVPEPDAIKESLLYLYMDRTWMPYIFSLSLEALKCFRIKNNEKMLSDSHGVETIRDILPDTSLGGPSFFKIITAKAVLKLQAGNAEEAALWRDLVRKVLASYLETAEEAVTLGGSLDENCQEEKNNTKHTTARNAFEENDFMENTNMPEGTISENTNYNHPPEADSAGTAFNLRPTVKQTETKWEYNNVGTDLSPEPKSFNYPLLSSPGDQFEIQLTQQLQSLIPNNNVRKLIAHVIRTLKMDCSGTHVQVTCAKLISRTGHLMKLLSGQQEVKASKIEWDTDQWKIENYINESTEAQSEQKEKSLEAASGTQDGVHVQEPRPQAPSPLDLQQPVESTSSQQPSSTVSETAREVGQGNGLQKAQAHDGAGLKLVVSSPTSPQQVCKLWWSAGLHTPPPVTSLGTVGLQGPQQRFPKFPDFFHPLEISCGKVA

SEQ ID NO: 51531 - protein, 221 aa, Homo sapiens
AGPESASLKTASSILAAVLPEPGLLRARIADEVYEGFLKALIEFASQHVYHCDLCTQRSFICQICQHHDIIFPSEFDTTVSPAPVREEVLPGALRRCLTGYSAIQETWQRRSRAVEEGARDAEPTRACRDKWRRGRRADAPRCPGRQWAAERELRLAKELWPGPLLIQPETLRSGGRPCAGNPSRSFSRPGRVAPGKALLLFRAASPASPLETPPRAMVGA

SEQ ID NO: 51532 - protein, 97 aa, Homo sapiens
  misc_feature (1)...(97): Xaa = X or * as defined in Table 2
RMGKHCFENLLFRDGKAQRACMGYTVCHSHIVGSGQKCWPAWPQVNLQPSRHQQVCCSLPRCAKCKTVFHQSCQAVVKKGCPRCARXRKYQQQNVFA

SEQ ID NO: 51533 - protein, 388 aa, Homo sapiens
FVLPVVSGRETASSARRLRGCRSREPPSPRSSLRLVSCDSLREQLREWRCFQWWRMDWTPRLPSRHIISELEHLTFVNMDVGRCRAWLRLALNNGLMECYLKLLLQEQARLREYYQPTALLRDAEEGEFLLSFLQGLMSLSFELSYKSAILNEWTLTPLALSGLCPLSELDPLSTSGAELQRKESLDSISHSSGSEDIEVHHSGHKIRRNQKPTASSLSLDTASSSQLSCSLNSDSCLLQENGSKSPDHCEEPMSYDSDLGTANAEDSDQSLQEVLLEFSKAQAASGTQDGVHVQEPHPQAPSPLDLQQPVESTSGQQPSSTVSETAREVGQGNGLQKAQAHDGAGLKLVVSSPTSPNISSMIQSTRPVHFCIVSTKHCTWEKVGMDE

SEQ ID NO: 51534 - protein, 183 aa, Homo sapiens
RRRCHTPCAAPWRPYLFMACTPSTSKLQPGGKRKKSAHQKPLPQPVFWPLLKAVTPKHIISELEHLTFVNMDVGRCRAWLRLALNNGLMECYLKLLLQEQARLQLQRKESLDSISHSSGSEDIEVHHSGHKIRRNQKPTASSLSLDTASSSQLSCSLNCDSCLLQENGSKSPDHVLRPLRGSS

SEQ ID NO: 51535 - protein, 321 aa, Homo sapiens
  misc_feature (1)...(321): Xaa = X or * as defined in Table 2
NQPHRTKGCPNSSTECKNGSLTCDFMQVPILEMGKLRPEGERRVQDRDSNPSLSPSAGLFQARWSXPPRPSFLLPAGKRRGCDGGGRGGGRVRAGGAPLRVHRQGRAPPQSTEHWWHVRRKPGGRPFYLPAQYVRELPALGNPAADAPPGPPIGTRSPXAARLRLPVRERGCGSGPQRPPSGAPRRGQLPVRPCAARRREPRAAAWRPACPPACTCGPGARAARAVPGRPDARRRLASRRQPRKQRQLQGLQRSGLLGVPAAPVAQRLRERLRGHPGGTRPAAVGDREAGTTPGAEAGRLAEDSARREPGLEENHSAQRRA

SEQ ID NO: 51536 - protein, 1224 aa, Homo sapiens
  DOMAIN (70)..(87): GTPase-activator protein for Rho-like GTPases domain identified by eMATRIX, accession number PF00620B, p-value=3.143e- 14, raw score of 14.20
  DOMAIN (743)..(937): WW domain identified by PFam, accession name WW, E-value=3.3e -18, PFam score of 73.9
LNSTVDYGLNTCISTLEIPSLNPGSAPPSGPGLDIDGLYRISGNLATIQKLRYKVDHDERLDLDDGRWEDVHVITGALKLFFRELPEPLFPFSHFRQFIAAISEHLGQVGRMGCAECKTVFHQSCQAVVKKGCPRCARRRKTVDGRPGEEKRNWEREAQRRATARDLVLPCRPAPVREEVLPGALRRCLPGYIVEQETRQRGSRTVEEGARDAEPTRACRGKWRRSRRADAPRVGEGTEVRSPSYPARDIELRWASLRWESRSEFFQARPGCSGKGPAHGLPEARPADENAAAAMAADVVGDVYVLVEHPFEYTGKDGRRVAIRPNERYRLLRRSTEHWWHVRREPGGRPFYLPAQYVRELPALGNPAAAAPPGPHPSPAAPEPLAYDYRFVSAAATAGPDGAPEESGGRASSLCGPAQRGAATQRSSLAPGLPACLYLRPAAPVRPAQSLNDLACAAVSPPAGLLGSSGSFKACSVAGSWVCPRPLARSDSENVYEVIQDLHVPPREESAEQRAVGGMLEELPSQNLVGKREIQECFLEEEGVGRVEFERFLQFPLMKPSGPGSSRSQLAAEGKQGVFKWPYSQNPGSRAVSERERNYFVTLRGWGELEGQVCFQFGAGAPWETPIMGAQLPTGEEKQVRCQGSVPAVQRGQDGGHNRQSDQEAESSLAGTEPWPTACQVEIPAPKSLFLISSSTPGGAFQLLPQCVQLGGWEVDDPPEPVYANIERQPRATSPGAAAAPLPSPVWETHTDAGTGRPYYYNPDTGVTTWESPFEAAEGAASPATSPASVDSHVSLETEWGQYWDEESRRVFFYNPLTGETAWEDEAENEPEEELEMQPGLSPGSPGDPRPPTPETDYPESLTSYPEEDYSPVGSFGEPGPTSPLTTPPGWSCHVSQDKQMLYTNHFTQEQWVRLEDPHGKPYFYNPEDSSVRWELPQVPVPAPRSIHKSSQDGDTPAQASPPEEKTKTLDKAGVLHRTKTADKGKRLRKKHWSASWTVLEGGVLTFFKDSKTSAAGGLRQPSKFSTPEYTVELRGATLSWAPKDKSSRKNVLELRSRDGSEYLIQHDSEAIISTWHKAIAQGIQELAMGIQSAELPPEESESSRVDFGSSERLGSWQEKEEDARPNAAAPALGPVGLESDLSKVRHKLRKFLQRRPTLQSLREKGYIKDQVFGCALAALCERERSRVPRFVQQCIRAVEARGAGHRRAVPHQWKPGHHPEATL

SEQ ID NO: 51537 - protein, 1006 aa, Homo sapiens
  DOMAIN (957)..(973): Phorbol esters / diacylglycerol binding domain proteins domain identified by eMATRIX, accession number BL00479B, p-value= 7.429e-09, raw score of 12.57
  DOMAIN (476)..(721): PH domain identified by PFam, accession name PH, E-value=2.5e -09, PFam score of 38.4
  misc_feature (1)...(1006): Xaa = X or * as defined in Table 2
DLAGEVLLCGGAADYGTLGFSSPAVQEANRGALCSSIERGHIISELEHLTFVNTDVGRCRAWLRLALNDGLMECYLKLLLQEQARLHEYYQPTALLRDAEEGEFLLSFLQGLTSLSFELSYKSAILNEWTLTPLALSGLCPLSELDPLSTSGAELQRKESLDSISHSSGSEDIEVHHSGHKIRRNQKLTASSLSLDTASSSQLSCSLNSDSCLLQENGSKSPDHCEEPMSCDSDLGTANAEDSDRSLQEVLLEFSKAQVNSVPTNGLSQETEIPTPQASLSLHGLNTSTYLHCEAPAEPLPAQAASGTQDGVHVQEPRPQAPSPLDLQQPVESTSGQQPSSTVSETAREVGQGNGLQKAQAHDGAGLKLVVSSPTSPKNKSWISEDDFYRPSREQPLESASDHPIASYRGTPGSRPGLHRHFSQEPRKNCSLGALDQACVPSPGRRQAQAAPSQGHKSFRVVHRRQMGLSNPFRGLMKLGTVERRGAMGIWKELFCELSPLEFRLYLSNEEHTCVENCSLLRCESVGPAHSDGRFELVFSGKFLFLRASSQDEAEDWLDRVREALQKVRPQQEDEWVNVQYPDQPEEPPEAPQGCLSPSDLLSEPAALQGTQFDWSSAQVPEPDAIKESLLYLYMDRTWMPYIFSLSLEALKXFRIYNNDKMLSDSHGVETIRDILPDTSLVGPYFFKIITNKAVLKLQAGNAEEAALWRDLVRKVLASYLETAEEAVTLGGSLDENCQEVLKFATRENGFLLQYLVAIPMEKGLDSQSCFCAGCSRQIGFSFVRPKLCAFSGLYYCDICHQDDASVIPARIMHNWDLTKRPICRQALKFLTQIRAQPLINLQMVNASLYEHVERMHLIGRSREQLKLLGDYLGLCRSGALKELSKRLNHRNYLLESPHRFRVADLRQIADEVYEGFLKALIEFASQHVYHCDLCTQRSFICQICQHHDIIFPSEFDTTVRCAKCKTVFHQSCQAVVKKGCPRCARRRKYQEQNIFALIPNLLTPL

SEQ ID NO: 51538 - protein, 977 aa, Homo sapiens
  DOMAIN (599)..(613): LEUCINE-RICH REPEAT SIGNATURE domain identified by eMATRIX, accession number PR00019A, p-value=7.261e-10, raw score of 11.19
  DOMAIN (164)..(697): Leucine Rich Repeat domain identified by PFam, accession name LRR, E-value=7.1e-31, PFam score of 116.0
  misc_feature (1)...(977): Xaa = X or * as defined in Table 2
LCPPAQPAASQPQVELPAGWPQPHALPLPHDHRAQHLLGCAHPGRAKPELQQHHDCACAAQIPHIPVRQPYQHPDPPLCQPRRPACPALPIHGRQLLLQEPLQAGTGGGPGCPPWPGQPHPPVTQVQQPHCGAPQPAFQPGVSAVVLRGRIVKLAPEDLANLTALRVLDVGGNCRRCDHAPNPCMECPRHFPQLHPDTFSHLSRLEGLVLKDSSLSWLNASWFRGLGNLRVLDLSENFLYKCITKTKAFQGLTQLRKLNLSFNYQKRVSFAHLVSGPPFLREPCRPXKKLDMHRIFFPLNSXDHASGHWARLPMLQTLRLQMNFINQAQLGIFRAFPGLRYVDLSDNRISGASELTATMGEADGGEKVWLQPGDLAPAPVDTPSSEDFRPNCSTLNFTLDLSRNNLVTVQPEMFAQLSHLQCLRLSHNCISQAVNGSQFLPLTGLQVLNLSHNKLDLYHEHSFTELPRLEALDLSYNSQPFGMQGVGHNFSFVAHLRTLRHLSLAHNNIHSQVSQQLCSTSLRALDFSGNALGHMWAEGDLYLHFFQGLSGLIWLDLSQNRLHTLLPQTLRNLPKSLQVLRLRDNYLAFFKWWSLHFLPKLEVLDLAGNQLKALTNGSLPAGTRLRRLDVSCNSISFVAPGFFSKAKELRELNLSANALKTVDHSWFGSPGEPALQILDVSANPLHCACGAAFMDFLLEVQAAVPGLPSRVKCGSPGQLQGLSIFAQDLRLCLDEALSWDCFALSLLAVALGLGVPMLHHLCGWDLWYCFHLCLAWLPWRGRQSGRDEDALPYDAFVVFDKTQSAVADWVYNELRGQLEECRGRWALRLCLEERDWLPGKTLFENLWASVYGSRKTLFVLAHTDRVSGLCDRAILLAQQRLLEDRKDVVVLVILSPDGRRSRYVRLRQRLCRQSVLLWPHQPSGQRSFWAQLGMALTRDNHHFYNRNFCQGTHGRIAVSRNPARCHLHTHLTYACLI

SEQ ID NO: 51539 - protein, 106 aa, Homo sapiens
  misc_feature (1)...(106): Xaa = X or * as defined in Table 2
PVRTPPIPAFSPLKTLRIMSLHQFLLEPNCGRPQLCRGTMARKPAPRKHXKHISRQCRVVLFEYKIGESVGFFKAVIFLFVFLRFHSILDQSFSLSSLLWKIVTLT

SEQ ID NO: 51540 - protein, 147 aa, Homo sapiens
  DOMAIN (42)..(80): WD domain, G-beta repeat domain identified by PFam, accession name WD40, E-value=1e-05, PFam score of 32.4
MSLHQFLLEPITCHAWNRDRTQIALSPNNHEVHIYKKNGSQWVKAHELKEHNGHITGIDWAPKSDRIVTCGADRNAYVWSQKDGVWKPTLVILRINRAATFVKLSEPPPSSMTNCGRPQLCRGTMAEKASPKETLKTHITPMPCGFV

SEQ ID NO: 51541 - protein, 353 aa, Homo sapiens
  DOMAIN (1)..(264): WD domain, G-beta repeat domain identified by PFam, accession name WD40, E-value=0.0011, PFam score of 25.6
GGLPHELKEHNGHITGIDWAPKSDCIDTCGAHRNAYDWSHKEGGWKPTLVILIINRAATFVKWSPLQNKFAEGSGARLISGCYFETENDWWVSKRIKKPIRSTVLSLDWHSNNVLLSAGSCDFKCRVFSAYIKEVDEKPASTPWGSKMPFGQLMSEFGGSGTGGWVHGVSFSASGSRLAWVSHDSTVSVADASKSVQSPCENGSFVIICVCKEANSLLHLGITHVLVFRVSTLKTEFLPLLSVSFVSENSVVAAGHDCCPMLFNYDDRGCLTFVSKLDIPKQSIQRNMSAMERFRNMDKRATTEDRNTALETLHQNSITQVSIYEVDKQDCRKFCTTGIDGAMTIWDFKVFST

SEQ ID NO: 51542 - protein, 474 aa, Homo sapiens
  DOMAIN (233)..(270): WD domain, G-beta repeat domain identified by PFam, accession name WD40, E-value=0.02, PFam score of 21.5
  misc_feature (1)...(474): Xaa = X or * as defined in Table 2
PRTARPSCAHARTVRAVATRRRRVHFRDLSAAPSGLSVLRPRPTEPVRVDCPESANPPVRARPDSPDPRMFELLAASDARINGPFCAPRVLLAPLLGAFVTVSKIVSKIALSPKXSRRSHLLRRNGSQWVKVHELKEHNGHITGIDWAPKSDRICHCLGADRNCLMVWSQKDGVWKPNPGXFLRNLIGGGNFLXKWVPPRRTKFGCGGSGARLISVCYFESENDWWVSKHIKKPIRSTVLSLDWHPNNVLLAAGSCDFKCRVFSAYIKEVDEKPASTPWGSKMPFGQLMSEFGGSGTGGWVHGVSFSASGDRLGWGSATDSTVSVAXCLQKVVQVSTLKTEFLAAPXVVSFVSREPASGLPAHDCCPMLFNYGXPRAALTFRLPKLDIPKQSIQRNMSAHGNAFGNMDKRATTEDRNTALETLHQNSITQVLYLLRWDKQDCRKFCTTGIDGEPWTIWDFQDPRSLPSQGLRIM

SEQ ID NO: 51543 - protein, 741 aa, Homo sapiens
  misc_feature (1)...(741): Xaa = X or * as defined in Table 2
MKHYTRVQSSISPPAERQETHAWASPAVTSLESAACHELQEADLSESLSYPRIVSSSSLQQYVAQGGSFPCFGMPWNFISGGAESTNAVISFANATTAVPMAVLSRRESSLANNPGVVNYSALPENENVGPEMPERPANSSKNSTETANYPTLMGNYNGQNTASLSVFIPPYFAEKIILTEMPGTTETNVENNSQTVYYPALSGNTSAPYPASSYLPITSNFVLERVAEMPETAGTNVKNNTQTVNYPPSSGRGRSQGNASLSLSIPPKFGIERHLGCFLVLAIRSKAAMNIIYHIGFVXTQAFISLRYMPKSAVAGSYGNALQNVLHIEMLFKTESGPQMSYGTMSYSTEMKNNCDQDDASASACLTPDFALLPLNILVKVDTNTENSVNTMNRSTLLDSDSGQDSSSSSVCIPPKYGYLGDPKRNVRVLKIHLLAVQNMAKPKQAACYLVRILFSKEILISSSVDIHLKDSQSLDPNKMAALREYLATTFPTCDLHEHGKDWQDCISGINSMIYCLCSEGKSTPKTVRKNKKRTNRVASASADRNDQRGRDGGEGCSWMFQPMNNSKMREKRNLQPNSNAIPEGMREPSTDNPEEPGEAWSYFGRPWRNIRMPCSVLTLAKTKSCASLSARYLIQKLFTKDVLVQSNVYGNLKHGLCALDPNKISALREFLQENYPICDLSENGRDWKSCVTSINSGIRSLRHDVRRAEARSQSLPAVTPPELEQESKPGDPDATDPST

SEQ ID NO: 51544 - protein, 99 aa, Homo sapiens
  DOMAIN (25)..(54): Proteasome B-type subunits proteins domain identified by eMATRIX, accession number BL00854C, p-value=2.286e-17, raw score of 29.92
  DOMAIN (20)..(49): Proteasome A-type and B-type domain identified by PFam, accession name proteasome, E-value=0.08, PFam score of 11.5
QAKMLTTDSQRIFPMVDRLYIGCPMVTDDFVVSGTCAEQMYGMCESLWEPNMDPDHLFETISQAMLNAVDRDAVSGMGVIVHIIEKDKITTRTLKARMD

SEQ ID NO: 51545 - protein, 54 aa, Homo sapiens
  DOMAIN (1)..(44): Proteasome A-type and B-type domain identified by PFam, accession name proteasome, E-value=2.5e-09, PFam score of 38.7
DVQTVAQRLKFRLNLYELKEGRQIKPYTLMSMVANLLYEKRFGPVPRAHFFFFF

SEQ ID NO: 51546 - protein, 67 aa, Homo sapiens
  DOMAIN (1)..(67): Proteasome A-type and B-type domain identified by PFam, accession name proteasome, E-value=3.7e-11, PFam score of 45.4
KGKNCVAIAADRRFGIQAQMVTTDFQKIFPMGAQRLKFRLNLYELKEGRQIKPYTLMSMVANLLYEK

SEQ ID NO: 51547 - protein, 172 aa, Homo sapiens
  DOMAIN (38)..(84): Proteasome B-type subunits proteins domain identified by eMATRIX, accession number BL00854A, p-value=1.355e-10, raw score of 33.93
  DOMAIN (35)..(125): Proteasome A-type and B-type domain identified by PFam, accession name proteasome, E-value=1.9e-20, PFam score of 79.1
  misc_feature (1)...(172): Xaa = X or * as defined in Table 2
SSIKFGRSNPDYWIALPSRNLDPAIMSIMSYNGGAVMAMKGKNCVAIAADRRFGIQAQMVTRDFXKFFPMGXPACTPGMAGFAIDVQTVAQRLKFRLNLYELKEGRQIKPYTLMSMVANLLYEKRDPDHLFETISQAMLNAVDRDAVSGMGVIVHIIEKDKITTRTLKARMD

SEQ ID NO: 51548 - protein, 229 aa, Homo sapiens
  DOMAIN (17)..(63): Proteasome B-type subunits proteins domain identified by eMATRIX, accession number BL00854A, p-value=8.024e-22, raw score of 33.93
  DOMAIN (14)..(61): Proteasome A-type and B-type domain identified by PFam, accession name proteasome, E-value=0.00024, PFam score of 20.7
  misc_feature (1)...(229): Xaa = X or * as defined in Table 2
YTAIMSIMSYNGGAVMAMKGKNCVAIAADRRFGIQARLLTTNFQKIFPMGDRLYIGLGGASPLDVQTSVAQRLKFRAEPVMSXREGRQIKPYTLHXAMGGQPSLLXEKVFGPLTYTEPVHLPGLGPERPFKALSICFSKTLIRVGPMGDLNDFCGSSGNLAPNKMYGMCESLWGGPTWDPDHLFXKPFSQGHGXMLWDRDGSVSGMGSSLFHIIEKDKIPPRTLKARMD

SEQ ID NO: 51549 - protein, 85 aa, Homo sapiens
  DOMAIN (30)..(73): Hsp20/alpha crystallin family domain identified by PFam, accession name HSP20, E-value=2.4e-05, PFam score of 24.1
DPPMEKALSMFSDDFGSFMRPHSEPLAFPARPGGAGNIKTLGDAYEFAVDVRDFSPEDIIVTTSNNHIEVRAEKCQLPEDVDPTS

SEQ ID NO: 51550 - protein, 65 aa, Homo sapiens
QLLDLSPGGWLCLTGVAHDSWGPPQHQSRHDCNWWVLRILPESLLWHLAHDKVSGVLMVSKLAAC

SEQ ID NO: 51551 - protein, 27 aa, Homo sapiens
  misc_feature (1)...(27): Xaa = X or * as defined in Table 2
SFLFWIKRXSFPDALYFSSKSGACSCN

SEQ ID NO: 51552 - protein, 28 aa, Homo sapiens
  misc_feature (1)...(28): Xaa = X or * as defined in Table 2
KCLALDIALATRRSAIXFPSVKGPGRGV

SEQ ID NO: 51553 - protein, 71 aa, Homo sapiens
  DOMAIN (17)..(56): Hsp20/alpha crystallin family domain identified by PFam, accession name HSP20, E-value=0.0021, PFam score of 17.2
DPPMEKALSMFSDDFGSFMRPHSEPLAFPARPDAYEFAVDVRDFSPEDIIVTTSNNHIEGRAEKLRLTALS

SEQ ID NO: 51554 - protein, 28 aa, Homo sapiens
  misc_feature (1)...(28): Xaa = X or * as defined in Table 2
KCPALDIAVATRRSAIXFPAVKGPGRGV

SEQ ID NO: 51555 - protein, 49 aa, Homo sapiens
  misc_feature (1)...(49): Xaa = X or * as defined in Table 2
FYSSVSGVSSKDDRRFGCSGYSAAVISFRQCXSQLPGCSATYQRESTFS

SEQ ID NO: 51556 - protein, 57 aa, Homo sapiens
EYSGVLQLVPRSPTAAPVTLRPGSEPPRWTPLAETSFFPAQFSLHENFFQRELIAKN

SEQ ID NO: 51557 - protein, 40 aa, Homo sapiens
QAYQKQSIPQLPLPAPLFELQYRASGKLYLLIQNKKLYRY

SEQ ID NO: 51558 - protein, 164 aa, Homo sapiens
  DOMAIN (135)..(157): ALPHA CRYSTALLIN SIGNATURE domain identified by eMATRIX, accession number PR00299F, p-value=7.240e-10, raw score of 13.20
  DOMAIN (71)..(154): Hsp20/alpha crystallin family domain identified by PFam, accession name HSP20, E-value=2.5e-08, PFam score of 34.9
  misc_feature (1)...(164): Xaa = X or * as defined in Table 2
ATEPLAPSERREVSIPLLVPAPLPPPPRPPVPSRTRTRPWRRPXACFPMTLAASCGPTRSPWPSQQPIPQPAPVGPGNIKTLGDAYEFAVDVRDFSPEDIIVTTSNNHIEVRAEKLAADGTVMNTFAHKCQLPEDVDPTAVTSALRKDGSLTIRARRDPHTEHV

SEQ ID NO: 51559 - protein, 557 aa, Homo sapiens
  DOMAIN (518)..(536): RNase H domain identified by eMATRIX, accession number PF00075J, p-value=2.636e-12, raw score of 15.78
  DOMAIN (243)..(372): RNase H domain identified by PFam, accession name rnaseH, E- value=5.4e-36, PFam score of 133.0
MGQVWVLVHSTLEPFHTNNEEEAKYNEVTEEVTEQVCLPAKANAAKEKEVHPYPSAPLNYFEEKEWPDPPDLSFLEDTGGDPSLTSHWQLTKEAEAELQLIEKQVHKAQINRIDPEKIPDLLIFSTQHSPTGVIVQEQDLVEWFFLPHTDSWTLTPYLDQITTMIGIGRTRIVKLHGYDPGKIIVPLMKAQIQQAFINSLTWQTHLADFVGILDNHFPKMKLFQFLKLTNCILPKITKFKPIEGAENVFTDGSSNGKASYFGSKRKVFQTPYTSAQKVELVAVIELLTAFDMPINVISDSSYVVHSTQLIENAQLRFHTEEKLMTLFTQLQTAVRSRMHRFYITHIRAHTHLPGSLTEGNQMADRLVATAVSNARHFHSLTHVNASGLKHRYSITWKEAKAIIQRCPTCQVVHSSSFTGGVNPRGLEPNSLWEMDVTHVPSFGRLAYVHACVDTFSHFVWATCQSGESSAYVKRHLLQCFVVIGILASIKTDNAPGYTSQALATFFSIRNIKHITGIPYNSQGQAIVERMNLSPETAVAKSKKKGGKQGLRGHPICN

SEQ ID NO: 51560 - protein, 152 aa, Homo sapiens
  DOMAIN (123)..(145): ALPHA CRYSTALLIN SIGNATURE domain identified by eMATRIX, accession number PR00299F, p-value=3.392e-09, raw score of 13.20
  DOMAIN (57)..(140): Hsp20/alpha crystallin family domain identified by PFam, accession name HSP20, E-value=2.7e-12, PFam score of 49.0
GFWQVIRALRGGEVHREGTSAPGRHRRRCGCRSAWNRCCTACSHVWPPRQMWPQGPDVAMKTGNIKTLGDAYEFAVDVRDFSPEDIIVTTSNNHIEVRAREAERPDGTVMNTFAHKCQLPEDVDPTSVTSALREDGSLTIRAWRHPHTEHVQ

SEQ ID NO: 51561 - protein, 201 aa, Homo sapiens
  DOMAIN (109)..(191): Hsp20/alpha crystallin family domain identified by PFam, accession name HSP20, E-value=1.4e-07, PFam score of 32.1
  misc_feature (1)...(201): Xaa = X or * as defined in Table 2
KKLTPVVRSRVERDPRVRRGLRPHPVLSSLRPPGQGPAPSVDEPQNLFHLPSGEKIPFLFLLLLLFTPPPRPPVLSRPRTRPWRRPXACFPMTLAAICGPTRSPWPSQPAPVVAGNIKTLXDAYEFVVDVRDFSPEDIIVTTSNNHIEVRPEKLAADGTVMNTFAQQCQLPEDVDPTSVTSALREDGSLTIRARGHPHTEH

SEQ ID NO: 51562 - protein, 149 aa, Homo sapiens
  misc_feature (1)...(149): Xaa = X or * as defined in Table 2
SSAAEVQEPRGAPGSPSIPSASRPGPAPRPASLPPSQMQAAALPEEIRWLLEDAEEFLAEGLRNENLSAVARDHRDHILRGFQQIKAGGDIGQDSSDDNHSGTLGLSLTYDAPFLSDYQDEGMEDIVKGAQELDNVIKQGYLEKKSXDH

SEQ ID NO: 51563 - protein, 133 aa, Homo sapiens
  DOMAIN (69)..(128): PH domain identified by PFam, accession name PH, E-value=1.6e -12, PFam score of 49.8
  misc_feature (1)...(133): Xaa = X or * as defined in Table 2
IGQDSSDDNHSGTLGLSLTSDAPFLSDYQDEGXVHQISDHWEKLRTWCXVYCDKGMEDIVKGAQELDNVIKQGYLEKKSKDHSFFGSEWQKRWCVVSRGLFYYYANEKSKQPKGTFLIKGYSVRMAPHLRRDS

SEQ ID NO: 51564 - protein, 394 aa, Homo sapiens
  DOMAIN (131)..(233): PH domain identified by PFam, accession name PH, E-value=1.8e -25, PFam score of 96.0
  misc_feature (1)...(394): Xaa = X or * as defined in Table 2
RLPARPPPDQGPRPVPPLSRPAKCRLAVLPEEIRWLLEDAEEFLAEGLRNENLSAVARDHRDHILRGFQQIKARYYWDFQPQGGDIGQDSSDDNHSGTLGLSLTSDAPFLSDYHDEGMEDIVXGAQELDNVIKQGYLEKKSKDHSFFGSEWQKRWCVVSRGLFYYYANEKSKQPKGTFLIKGYGVRMAPHLRRDSKKESCFELTSQDRRSYEFTATSPAEARDWVDQISFLLKDLSSLTIPYEEDEEEEEKEETYDDIDGFDSPSCGSQCRPTILPGSVGIKEPTEEKEEEDIYEVLPDEEHDLEEDESGTRRKGVDYASYYQGLWDCYGDQPDDLSLQRGDLILFLSKEYNMYGWWVGELNSLVGIVPKEYLHHLPLKWKERWKPREIYFFPF

SEQ ID NO: 51565 - protein, 59 aa, Homo sapiens
  misc_feature (1)...(59): Xaa = X or * as defined in Table 2
NSHHVRGRPRCADSSSPSGDRGQPEAQPAPDSSAPEHAQEPGRAAVKRPDLXSHMTRRP

SEQ ID NO: 51566 - protein, 487 aa, Homo sapiens
  DOMAIN (218)..(268): Protein prenyltransferases alpha subunit repeat proteins proteins domain identified by eMATRIX, accession number BL00904A, p -value=3.933e-10, raw score of 8.30
  DOMAIN (41)..(152): WH1 domain identified by PFam, accession name WH1, E-value= 9.5e-32, PFam score of 118.9
  misc_feature (1)...(487): Xaa = X or * as defined in Table 2
AILIILLSSEGLWSSDQHRLVGVQDSPPQGSLGCYFSAMATSEQSVCQARASVMVYDDTSKKWVPIKPGQQGFSRINIYHNTVSNTFRVVGVKLQDQQVVINYSIVKGLKYNQATPTFHQWRDARQVYGLNFASKEEATTFSNAMLFALNIMNSQEGGPSSQRQVQNGPSPDEMDIQRRQVMEQHQQQRQEFLERRTSATGPILPPGHPSSAASAPVSCSGPPPPPPPPVPPPPTGATPPPPPPLPAGGAQGSSHDESFHVQDWPLAISWGPSLRRVPNGPEDASGGSSPSGTSKSDANRASSGGGGGGLMEEMNKLLAKRRKAASQSDKPAEKKEDESQMEDPSTSPSPGTRAASQPPNSSKAGRKPWERSNSRGYFCVLDSVQNPALWPKSPESXEPPSVSSLISRMKPAGSVSDMALDAFDLDRMKQEILEEVVRELHKGERKEIIDAIRQEAXSGISRKKNLGHRAHPPTRTSFICSQRPRLM

SEQ ID NO: 51567 - protein, 30 aa, Homo sapiens
ENASMGPCLFKTTSVSHLVEVVPQKLSWVI

SEQ ID NO: 51568 - protein, 114 aa, Homo sapiens
HVPGHFAKGAVREYVLKGLSDGDVIVPIVLSNERYHWPVLGWVGGVDCDEFFRVVLGEPVHLDGVAHSIGKKEHFNLKQQGAPCAKPAEGCPTPIPFLCSFNPFLVFLTGSEDY

SEQ ID NO: 51569 - protein, 99 aa, Homo sapiens
  misc_feature (1)...(99): Xaa = X or * as defined in Table 2
RVMSPVHVNTICSPHPHSDGDVIVPIVLSNERYHWPVLGWVGGVDCDEFFRVVLGEARLHLDGVAHQHXTKEGTISNLFQATSVSHLVEVVPQKLSWVI

SEQ ID NO: 51570 - protein, 121 aa, Homo sapiens
  misc_feature (1)...(121): Xaa = X or * as defined in Table 2
VEILTSKRAGDWFKEELRLLGGLDHIVDKVKECVDHLSRDEDEEKLVASLWGAQRCLRVLQSVTVHNPENQSYLIAYKDSQLIVSSAKALQHCEELIXQYNRAVDTLCLADCKPLPHPTVL

SEQ ID NO: 51571 - protein, 59 aa, Homo sapiens
INVTTVREYLPEGDFSIMTEMLKKFLSFMNLTNIVRQCNVGTIEIVFALSIKASLAKYF

SEQ ID NO: 51572 - protein, 50 aa, Homo sapiens
MQFALIVLIQMFYNIPYHLPQVRFTKNLSLSLNPMINKYQCILHFKIKYN

SEQ ID NO: 51573 - protein, 38 aa, Homo sapiens
NLLNINCYFLSPSPCFQCAVGTTGQKSISRVIEYLEHC

SEQ ID NO: 51574 - protein, 155 aa, Homo sapiens
MPGPCLILIQFPAVAVHCGVQSGREPSQISERIHRPSDLTADLLFLERERAAQLAESKTDELIKDAPTTQHDKSGEWQETSGEIQWVSTEKTDGTEEKHKKEEEDEELDLNKALQHAGKHMEDCIVASYTALLLGCLCQESPLWELWAYKFPRDH

SEQ ID NO: 51575 - protein, 1371 aa, Homo sapiens
  DOMAIN (36)..(53): HIV TAT DOMAIN SIGNATURE domain identified by eMATRIX, accession number PR00055C, p-value=7.283e-10, raw score of 8.19
  misc_feature (1)...(1371): Xaa = X or * as defined in Table 2
ASGCWRKEVGAGSANGVEMVQGPVQTPALTIHRRKRRRRRRRRPSGGTQQALLPAPAVAASESXARARPAALEAGREVAGPPSCPPNRASYLPKAESLASLGSHLPALLSRARVPRPPAGRKERERRKRPVAKAPARLRGEYETGVKMTSRFAKTYSRKGGNGSSKFDEVFSNKRTTLSTKWGETTFMAKLGQKRPNFKPDIQEIPKKPKVEEESTGDPFGFDSDDESLPVSSKNLAQVKCSSYSESSEAAHLEEVTSVLEANSKISHVVIEDTVVSDKCFPLEDTLLGKEKSTNRIVEDDASISSCNKLITSDKVENFHEEHEKNSHHIHKNADGQYLRNPNAETTVGFLEIKETNDTWELPSLGKRPKSPSEISPIKGSVRTGLFEWDNDFEDIRSEDCILSLDSDPLLEMKDDDFKNRLENLNEAIEEDIVQSVLRPTNCRTYCRANKTKSSQGASNFDKLMDGTSQALAKANSESSKDGLNQAKKGGVSCGTSFRGTVGRTRDYTVLHPSCLSVCNVTIQDTMERSMDEFTASTPADLGEAGRLRKKADIATSKTTTRFRPSNTKSKKDVKLEFFGFEDHETGGDEGGSGSSNYKIKYFGFDDLSESEDDEDDDCQVERKTSKKRTKTAPSPSLQPPPESNDNSQDSQSGTNNAENLDFTEDLPGVPESVKKPINKQGDKSKENTRKIFSGPKRSPTKAVYNARHWNHPDSEKLPGPPVVKPXCFQCVLSQKDHNQKDGWVFKAPAPPSKVINTVTIPTQPYQDIVTALKCRREDKELYTVVQHVKHFNDVVEFGENQEFTDDIEYLLSGLKSTQPLNTRCLSVISLATKCAMPSFRMHLRAHGMVAMVFKTLDDSQHHQNLSLCTAALMYILSRDRLNMDLDRASLDLMIRLLELEQDASSAKLLNEKDMNKIKEKIRRLCETVHNKHLDLENITTGHLAMETLLSLTSKRAGDWFKEELRLLGGLDHIVDKVKECVDHLSRDEDEEKLVASLWGAERCLRVLESVTVHNPENQSYLIAYKDSQLIVSSAKALQHCEELIQQYNRAEDSICLADSKPLPHQNVTNHVGKAVEDCMRAIIGVLLNLTNDNEWGSTKTGEQDGLIGTALNWCASRVPKYLPQEQRFDIRVLGLGLLINLVEYSARNRHCLVNMETSCSFDSSICSGEGDDSLRIGGQVHAVQALVQLFLERERAAQLAESKTDELIKDAPTTQHDKSGEWQETSGEIQWVSTEKTDGTEEKHKKEEEDEELDLNKALQHAGKHMEDCIVASYTALLLGCLCQESPNPMXPTVREYLPKGTFSIMTEMLKKFLSFMNLTCAVGTTGQKSISRVIEYLEHLLAALPWLPGAPVMLELSLDKEKSSHERSP

SEQ ID NO: 51576 - protein, 73 aa, Homo sapiens
  DOMAIN (49)..(73): Mitochondrial energy transfer proteins domain identified by eMATRIX, accession number BL00215A, p-value=4.316e-19, raw score of 15.82
  DOMAIN (1)..(73): Mitochondrial carrier proteins domain identified by PFam, accession name mito_carr, E-value=2.4e-21, PFam score of 76.1
LKGTYQGLTATVLKQGSNQAIRFFVMTSLRNWYRGDNPNKPMNPLITGVFGAIAGAASVFGNTPLDVIKTRMQ

SEQ ID NO: 51577 - protein, 193 aa, Homo sapiens
  DOMAIN (112)..(122): CEREAL TRYPSIN/ALPHA-AMYLASE INHIBITOR FAMILY SIGNATURE domain identified by eMATRIX, accession number PR00808B, p-value= 6.276e-10, raw score of 12.10
  DOMAIN (133)..(170): Mitochondrial carrier proteins domain identified by PFam, accession name mito_carr, E-value=4.6e-06, PFam score of 23.7
PSSLNLKVIAMDLAQMHACQGPGNDLYIEASAALCAGSDFSVSGGLQWVQLVAHGSAGDDNGWLRCHRPPWQGLGDNELDGCSGEVNVSQDFCGKYTDVVNHITQRLDYVLCRTYAAQRTCHSGSVVKEVKFIHDQTSPNPKYRGFFHGVREIVREQGLKGTFHGLTATVPETGLRTQAIPFFVMNSLRNWFR

SEQ ID NO: 51578 - protein, 356 aa, Homo sapiens
  DOMAIN (97)..(119): ADENINE NUCLEOTIDE TRANSLOCATOR 1 SIGNATURE domain identified by eMATRIX, accession number PR00927B, p-value=2.233e-09, raw score of 14.66
  DOMAIN (58)..(301): Mitochondrial carrier proteins domain identified by PFam, accession name mito_carr, E-value=9.4e-42, PFam score of 146.0
  misc_feature (1)...(356): Xaa = X or * as defined in Table 2
ARGNRPPPPPRTERGVLESRTRSRHRAPRLPPAMPAPRAPRALAAAAPASGKAKLTHPGKAILAGGLRGGIQICMTFPTEYVKTQLQLDERSHPPRYRGIGDFVRQTVRSHGVLGLYRGLSSLLYGSIPKAAVRFGMFEFLSNHMRDAQGRLDSTRGLLCSLGAGRGPRPXVVVCPMETIKVKFIHDQTSPNPKYRGFFHGVREIVREQGLKGTYQGLTATVLKQGSNQAIRFFVMTSLRQWYPRGTTPNKAHEPFXITWGSFGAIASASQVSFGNTPLDVIKTRMPGPWRPHKYRNTWDCGLQILKKGGGSRAFYKGTVPPLGPGLAWDVAIVFVIYDEVGXSCFNKVWKNGIKA

SEQ ID NO: 51579 - protein, 124 aa, Homo sapiens
TAGDSGAEDGPASRVSQMPTLPPPMPWNLPAGVDCTTSGVLALTALFFKMEEANLASRAKAQELIQATNQILSHRKPPSSLGMTPAPVPTSLGLPPGPSSYLLSGSPPLGGCGSTPPTPPGLAA

SEQ ID NO: 51580 - protein, 1243 aa, Homo sapiens
  DOMAIN (481)..(501): CORONAVIRUS NUCLEOCAPSID PROTEIN domain identified by eMATRIX, accession number DM01206B, p-value=8.767e-10, raw score of 10.69
  misc_feature (1)...(1243): Xaa = X or * as defined in Table 2
GRGHPHGGGELLPASPRGSPEGDQPGQGDPEEKEGRVVPRGGAPDVPSAHALVPEPQTVLGLHQRVTAQPGRHGAHXLHGDRLHSGRPQRPTHTGWAPCLPYPTLGSGXRRHHGNPAGTPRSLLFPFPEKELEAPPPAPRFDIYDPFHPTDEAYSPPPAPEQKYDPFEPTGSNPSSSAGTPSPEEEEEEEEEEEEEEEDEEEEEGLSQSISRISETLAGIYDDNSLSQDFPGDESPRPDAQPTQPTPAPGTPPQVDSTRADGAMRRRVFVVGTEAEACREGKVSVEVVTAGGAALPPPLLPPGDSEIEEGEIVQPEEEPRLALSLFRPARPGRPPTPAASATPTAQPLPQPPAPRAPEGDDFLSLHAESDGEGALQVDLGEPAPAPPAADSRWGGLDLRRKILTQRRERYRQRSPSPAPAPAPAAAAGPPTRKKSRRERKRSGEAKEAASSSSGTQPAPPAPASPWDSKKHRSRDRKPGSHASSSARRRSRSRSRSRSTRRRSRSTDRRRGGSRRSRSREKRRRRRRSASPPPATSSSSSSRRERHRGKHRDGGGSKKKKKRSRSRGEKRSGDGSEKAPAPAPPPSGSTSCGDRDSRRRGAVPPSIQDLTDHDLFAIKRTITVGRLDKSDPRGPSPAPASSPKREVLYDSEGLSGEERGGKSSQKDRRRSGAASSSSSSREKGSRRKALDGGDRDRDRDGDWDRDSSSTMARPPKESAPYSRPPPXPPVCSGSGSSYSPPCCSSRMVKLHTKAAELIREGVSSTTPAKDAASAGLGSIGVKFSRDRESRSPFLKPDERAPTEMAKAAPGSTKPKKTKVKAKAGAKKTKGTKGKTKPSKTRKKVRSGGGSGGSGGQVSLKKSKADSCSQAAGTKGAEETSWSGEERAAKVPSTPPPKAAPPPPALTPDSQTVDSSCKTPEVSFLPEEATEEAGVRGGAEEEEEEEEEEEEEEEEEEQQPATTTATSTAAAAPSTAPSAGSTAGDSGAEDGPASRVSQLPTLPPPMPWNLPAGVDCTTSGVLACECPLGEGGAGAVTALLFKMEEANLASRAKAQELIQATNQILSHRKPPSSLGMTPAPVPTSLGLPPGPSSYLLPGSLPLGGCGSTPPTPTGLAATSDKREGSSSSEGRGDTDKYLNKLLTQERPVEXVKLAIQPYYQKKDITKEEYKDILRKAVHKISCLSKSWGKFNPVKVSNLVRAYVQRYRYFRKHGRKPKGPPPGPPRPPKEPGPPDKGGPGLPLPPL

SEQ ID NO: 51581 - protein, 36 aa, Homo sapiens
  DOMAIN (9)..(36): Alpha-2-macroglobulin family domain identified by PFam, accession name A2M, E-value=5.3e-07, PFam score of 24.2
SKTTFGFPGYQKELMYKHSNGSYSAFGERDGNGNTW

SEQ ID NO: 51582 - protein, 182 aa, Homo sapiens
  DOMAIN (20)..(49): Alpha-2-macroglobulin family thiolester region proteins domain identified by eMATRIX, accession number BL00477A, p-value= 9.800e-23, raw score of 13.50
  DOMAIN (5)..(159): Alpha-2-macroglobulin family N-terminal regi domain identified by PFam, accession name A2M_N, E-value=2.8e-40, PFam score of 138.4
NNISFEEKKKVLIQRQGNGTFVQTDKPLYTPGQQVYFRIVTMDSNFVPVNDKYSMVELQDPNSNRIAQWLEVVPEQGIVDLSFQLAPEAMLGTYTVAVAEGKTFGTFSVEEYVLPKFKVEVVEPKELSTVQESFLVKICCRYTYGKPMLGAVQVSVCQKGKYLLVSRGGNGNQLPGPMAGNL

SEQ ID NO: 51583 - protein, 1475 aa, Homo sapiens
  DOMAIN (804)..(831): Anaphylatoxin domain proteins domain identified by eMATRIX, accession number BL01177E, p-value=4.541e-13, raw score of 20.64
  DOMAIN (744)..(1475): Alpha-2-macroglobulin family domain identified by PFam, accession name A2M, E-value=1.6e-197, PFam score of 657.7
  misc_feature (1)...(1475): Xaa = X or * as defined in Table 2
MWAQLLLGMLALSPAIAEELPNYLVTLPARLNFPSVQKVCLDLSPGYSDVKFTVTLETKDKTQKLLEYSGLKKRHLHCISFLVPPPAGGTEEVATIRVSGVGNNISFEEKKKVLIQRQGNGTFVQTDKPLYTPGQQVYFRIVTMDSNFVPVNDKYSMVELQDPNSNRIAQWLEVVPEQGIVDLSFQLAPEAMLGTYTVAVAEGKTFGTFSVEEYVLSPFLLLLSSVLPKFKVEVVEPKELSTVQESFLVKGGLXYTYGKPMLGAVQVSVCQKANTYWYREVEREQLPDKCRNLSGQTDKTGCFSAPVDMATFDLIGYAYSHQINIVATVVEEGTGVEANATQNIYISPQMGSMTFEDTSNFYHPNFPFSGKIKDRGHDDSFLKNHLMVLGIXGTKXTFHQTPGXLKTNALCFLYLWRNPRWKGTERSLEGKFSIGKLIIXSGTKGHRYYQKGLTWACEPFYKNKPGTFLWHSPGLNGPLKCSHPTKSWWNYYIRPGPCKPLTQEINLLLLFXIGKGSLVMEGHKHLTSKKKGLKASFSLSLTFTSRLAPDPSLVIYAIFPSGGVVADKIQFSVEMCFDNQVSLGFSPSQQLPGAEVELQLQAAPGSLCALRAVDESVLLLRPDRELSNRSVYGMFPFWYGHYPYQVAEYDQCPVSGPWDFPQPLIDPMPQGHSSQRSIIWRPSFSEGTDLFSFFRDVGLKILSNAKIKKPVDCSHRSPEYSTAMGAGGGHPEAFESSTPLHQAEDSQVRQYFPETWLWDLFPIGNSGKEAVHVTVPDAITEWKAMSFCTSQSRGFGLSPTVGLTAFKPFFVDLTLPYSVVRGESFRLTATIFNYLKDCIRVQTDLAKSHEYQLESWADSQTSSCLCADEAKTHHWNITAVKLGHINFTISTKIPDSNEPCGGQKGFVPQKGRSDTLIKPVLVKPEGVLVEKTHSSLLCPKGKVASESVSLELPVDIVPDSTKAYVTVLGDIMGTALQNLDGLVQMPSGCGEQNMVLFAPIIYVLQYLEKAGLLTEEIRSRAVGFLEIGYQKELMYKHSNGSYSAFGERDGNGNTWLTAFVTKCFGQAQKFIFIDPKNIQDALKWMAGNQLPSGCYANVGNLLHTAMKGGVDDEVSWTAYVTAALLEMGKDVDDPMVSQGLWCLKNSATSTTNLYTQALLAYIFSLAGEMDIRNILLKQLDQQAIISGESIYWSQKPTPSSNASPWSEPAAVDVELTAYALLAQLTKPSLTQKEIAKATSIVAWLAKQHNAYGGFSSTQDTVVALQALAKYATTAYMPSEEINLVVKSTENFQRTFNIQSVNRLVFQQDTLPNVPGMYTLEASGQGCVYVQTVLRYNILPPINMKTFSLSVERGKARCEQPTSPRSLTLTIGARYVGSRSSCNMAIVEVKMLSGFSPMEGTNQLLLQQPLVKKVEFGTXHHLNIYFGXKLIKNTQTYTFTISQSVLVTNLKPATIKVYDYYLPDEQATIQYSDPCE

SEQ ID NO: 51584 - protein, 172 aa, Homo sapiens
  DOMAIN (50)..(90): Calponin family repeat proteins domain identified by eMATRIX, accession number BL01052C, p-value=8.200e-38, raw score of 18.51
  DOMAIN (95)..(161): Calponin family domain identified by PFam, accession name calponin, E-value=7.7e-21, PFam score of 72.2
ELRTWIEGLTGLSVGPDFQKGLKDGTILCTLMNKLQPGSVPKINRSMQNWHQLENLSNFIKAMVSYGMNPVDLFEANDLFESGNMTQVQVSLLALAGKMGTNKCASQSGMTAYGTRRHLYDPKNHILPPMDHSTISLQMGTNKCASQVGMTAPGTRRHIYDTKLGTDKCDNS

SEQ ID NO: 51585 - protein, 410 aa, Homo sapiens
  DOMAIN (319)..(339): CALPONIN SIGNATURE domain identified by eMATRIX, accession number PR00889D, p-value=6.365e-21, raw score of 5.49
  DOMAIN (305)..(407): Calponin family domain identified by PFam, accession name calponin, E-value=4.8e-20, PFam score of 69.7
  misc_feature (1)...(410): Xaa = X or * as defined in Table 2
MHQEDLRAWYLDLGLPSHQNETTDVSVVYERFSLTDATYPKQAKQWDFPFLRVSTAQPTAWKCQRAPSPYTHQDTALIPSPTARWLSPEKEPKQGEVGEKSLLPDPTLPLTDPRLTGSTEQKKDLAAGPVGSALRRRPPAVSSTQFNKGPSYRLLADVQNRLLPKYDSQKEAELRSWIKGFTGLSIRPDFQKGLKDGIILCTLVNKLQPGSVPKINASVXNWHXLENLSNFLKAMVSYGMNPVDLFEANDLFESGNNMQVRVSLLALAGKAKTKGLRSGVDIRDKYSKKQNFDDTTMKASQCVIRLQITNKCASQSGMTAYGTRRHLYDPKNRILPPMDNSTISLQMGTNKYASQVGMTAPGTQRHIYDTNLGIDKCENSSMSLKMGYTQVANHSGQVFGLGRQIYEPKY

SEQ ID NO: 51586 - protein, 129 aa, Homo sapiens
  DOMAIN (56)..(96): Calponin family repeat proteins domain identified by eMATRIX, accession number BL01052C, p-value=8.200e-38, raw score of 18.51
  DOMAIN (2)..(102): Calponin homology (CH) domain identified by PFam, accession name CH, E-value=1.3e-13, PFam score of 58.6
FVQKEAELRTWIEGLTGLSIGPDFQKGLKDGTILCTLMNKLQPGSVPKINRSMQNWHQLENLSNFIKAMVSYGMNPVDLFEANDLFESGNMTQVQVSLLALAGKAKTKGLQSGVDIGVKYSEKQERNFD

SEQ ID NO: 51587 - protein, 371 aa, Homo sapiens
  DOMAIN (172)..(198): Calponin family repeat proteins domain identified by eMATRIX, accession number BL01052B, p-value=8.875e-26, raw score of 15.31
  DOMAIN (287)..(351): Calponin family domain identified by PFam, accession name calponin, E-value=1e-20, PFam score of 71.8
  misc_feature (1)...(371): Xaa = X or * as defined in Table 2
MHQEDLRAWYLDLGLPSHQNAQPTAWKCQRAPSPYTHQDMALIPSPTARWLSPEKEPKQGEVGEKSLLPDPTLPLTDPRLTGSTEQAHAEGLAALMSALRVSHLQGRGGVVTLVDSQLGVIAVSSTQFNKGPSYRLLADVQNRLLPKYDSQKEAELRSWIKGFTGLSIRPDFQKGLKDGIILCTLVNKLQPGSVPKINASVXNWHXLENLSNFLKAMVSYGMNPVDLFEANNLFESGNNMQVRVSLLALAGKAKTKGLRSGVDIRDKYSEKQNFDDTTMKASQCVIRLQITNKCASQSGMTAYGTRRHLYDPKNRILPPMDNSTISLQMGTNKCASQVGMTAPGTQRHIYDTKLGIDKCENSSMSLKMGYT

SEQ ID NO: 51588 - protein, 303 aa, Homo sapiens
  DOMAIN (190)..(210): CALPONIN SIGNATURE domain identified by eMATRIX, accession number PR00889D, p-value=1.600e-18, raw score of 5.49
  DOMAIN (175)..(239): Calponin family domain identified by PFam, accession name calponin, E-value=7.2e-17, PFam score of 59.4
  misc_feature (1)...(303): Xaa = X or * as defined in Table 2
SCWCLKLALAVSSTQFNKGPSYRLLADVQNRLLFKYDSQKEAELRSWIKGFTGLSIRPDFQKGLKDGIILCTLVNKLQPGSVPKINASVXNWHQLENLSNILKAMVSYGMNPVDLFEANDLFESGNNMQVRVSLLALAGKAKTKGLQSGVDIRDKYSEKQNFNDTTMKARLCVIRLQITNKCASQSGMTAYVTRRHLYDPKNRILPPMDNSTISLRMGTNKCASQVGMTAPGNQWHIYDTKLGIDKCENSSMSLKMGYTQVANHSRQVFGLGRQIYEPKYQPGGPVAHGAPSAGNCPGPGEAP

SEQ ID NO: 51589 - protein, 176 aa, Homo sapiens
  DOMAIN (66)..(98): kw TRANSCRIPTASE REVERSE II ORF2 domain identified by eMATRIX, accession number DM01354K, p-value=6.018e-09, raw score of 9.35
SWYLSELQQSEALKEEAEKRREDLKLKAQESIMQWKLKHKKLERALEKQSETVDELTGKNNQILKEKDELKTQLYAALQQIENLRKELNDVLTKRALQEEELHSEEEKLRDIKSHQADLELEVKNSLDTIHRLESELKKQSKIQSQMKVEKAHLEEEIAELKKSQAQDKAKLLEMQ

SEQ ID NO: 51590 - protein, 284 aa, Homo sapiens
  misc_feature (1)...(284): Xaa = X or * as defined in Table 2
MPESWLAAFPPYGDIKKVVGLQLKEGLHQNLTMQDSIQIFDFQLPGLLRPSSVLWTLKPYHTAGLASDRDSYKGILACMPCMFGSRRSPLRDIKSHQADLELEVKNSLDTIHRLESELKKQSKIQSQMKVEKAHLEEEIAELKKSQAQDKAKLLEMQESIKDLSAIRADLANKLAEEERAKKTSAXGAFGPLIAQANSRDEGTATIITQLELERDVHQRELKDLTSSLQSVKTKHEQNIQELMKHFKKEKSEAENHIRTLKVPLLNYPDDTEGIFLVAHEVNKA

SEQ ID NO: 51591 - protein, 216 aa, Homo sapiens
  DOMAIN (145)..(199): Tropomyosins proteins domain identified by eMATRIX, accession number BL00326C, p-value=7.887e-10, raw score of 9.99
  DOMAIN (1)..(211): Myosin tail domain identified by PFam, accession name Myosin_tail, E-value=2.6e-104, PFam score of 359.9
NTSLINTKKKLETDISQIQGEMEDIIQEARNAEEKAKKAITDAAMMAEELKKEQDTSAHLERMKKNLEQTVKDLQHRLDEAEQLALKGGKKQIQKLEARVRELEGEVESEQKRNVEAVKGLRKHERKVKELTYQTEEDRKNILRLQDLVDKLQAKVKSYKRQAEEAEEQSNVNLSKFRRIQHELEEADFRADIAESQVNKLRVKSREVHTKIISEE

SEQ ID NO: 51592 - protein, 1948 aa, Homo sapiens
  DOMAIN (231)..(259): MYOSIN HEAVY CHAIN SIGNATURE domain identified by eMATRIX, accession number PR00193C, p-value=1.643e-33, raw score of 12.60
  DOMAIN (921)..(1945): Myosin tail domain identified by PFam, accession name Myosin_tail, E-value=0, PFam score of 1386.7
  misc_feature (1)...(1948): Xaa = X or * as defined in Table 2
PAAMSSDSEMAIFGEAAPFLRKSERERIEAQNKPFDAKTSVFVVDPKESFVKATVQSREGGKVTAKTEAGATVTVKDDQVFPMNPPKYDKIEDMAMMTHLHEPAVLYNLKERYAAWMIYTYSGLFCVTVNPYKWLPVYNAEVVTAYRGKKRQEAPPHIFSISDNAYQFMLTDRENQSILITGESGAGKTVNTKRVIQYFATIAVTGEKKKEEPASGKMQGTLEDQIISANPLLEAFGNAKTVRNDNSSRFGKFIRIHFGATGKLASADIETYLLEKSRVTFQLKAERSYHIFYQILSNKKPELIEMLLITTNPYDFAFVSQGEITVPSIDDQEELMATDSAVDILGFTADEKVAIYKLTGAVMHYGNMKFKQKQREEQAEPDGTEVADKAAYLTSLNSADLLKSLCYPRVKVGNEFVTKGQTVQQVYNAVGALAKAIYEKMFLWMVTRINQQLDTKQPRQYFIGVLDIAGFEIFDFNSLEQLCINFTNEKLQQFFNHHMFVLEQEEYKKEGIEWEFIDFGMDLAACIELIEKPMGIFSILEEECMFPKATDTSFKNKLYEQHLGKSNNFQKPKPAKGKPEAHFSLVHYAGTVDYNIAGWLDKNKDPLNETVVGLYQKSAMKTLAFLFSGAQTAEAEGGGGKKGGKKKGSSFQTVSALFRENLNKLMTNLRSTHPHFVRCIIPNETKTPGAMEHELVLHQLRCNGVLEGIRICRKGFPSRILYADFKQRYKVLNASAIPEGQFIDSKKASEKLLGSIEIDHTQYKFGHTKVFFKAGLLGTLEEMRDEKLAQLITRTQAICRGFLMRVEFRKMMERRESIFCIQYNIRAFMNVKHWPWMKLYFKIKPLLKSAETEKEMANMKEEFEKTKEELAKTEAKRKELEEKMVTLMQEKNDLQLQVQAEADALADAEERCDQLIKTKIQLEAKIKEVTERAEDEEEINAELTAKKRKLEDECSELKKDIDDLELTLAKVEKEKHATENKVKNLTEEMAGLDETIAKLTKEKKALQEAHQQTLDDLQMEEDKVNTLTKAKTKLEQQVDDLEGSLEQEKKLCMDLERAKRKLEGDLKLAQESTMDTENDKQQLNEKLKKKEFEMSNLQGKIEDEQALAMQLQKKIKELQARIEELEEEIEAERASRAKAEKQRSDLSRELEEISERLEEAGGATSAQIELNKKREAEFQKMRRDLEESTLQHEATAAALRKKHADSVAELGKQIDSLQRVKQKLEKEKSELKMEINDLASNMETVSKAKANFEKMCRTLEDQLSEIKTKEEEQQRLINELSAQKARLHTESGEFSRQLDEKDAMVSQLSRGKQAFTQQIEELKRQLEEETKAKSTLAHALQSARHDCDLLREQYEEEQEAKAELQRGMSKANSEVAQWRTKYETDAIQRTEELEEAKKKLAQRLQDAEEHVEAVNSKCASLEKTKQRLQNEVEDLMIDVERSNAACIALDKKQRNFDKVLAEWKQKYEETQAELEASQKESRSLSTELFKVKNAYEESLDHLETLKRENKNLQQEISDLTEQIAEGGKHIHELEKVKKQLDHEKSELQTSLEEAEASLEHEEGKILRIQLELNQVKSEIDRKIAEKDEELDQLKRNHLRVVESMQSTLDAEIRSRNDALRIKKKMEGDLNEMEIQLNHANRQAAEALRNLRNTQGILKDTQLHLDDAIRGQDDLKEQLAMVERRANLMQAEVEELRASLERTERGRKMAEQELLDASERVQLLHTQNTSLINTKKKLETDISQIQGEMEDIVQEARNAEEKAKKAITDAAMMAEELKKEQDTSAHTMERMKKNMEQTVKDLQLRLDEAEQLALKGGKKQIQKLEARVREAWKEEGLRIEQKRNAXGLSKGLRQHXEAELKELTYQTGKKIRKNILRLQDLVDKLQTKVKAYKRQAEEAEEQSNVNLAKFRKLQHELEEAKERADIAESQVNKLRVKSREVHTKVISEE

SEQ ID NO: 51593 - protein, 115 aa, Homo sapiens
AKTVVSATATTAPVIRPIIAANTYQQVQQTLEARAAAAATVVPPMVGGPPFVGPVGFGPGDRSHLDSPEAREAMFLRRAAVAPQRAPILRPAFVPHVLQRADSALFSAAAGPRPM

SEQ ID NO: 51594 - protein, 379 aa, Homo sapiens
  DOMAIN (317)..(327): Eukaryotic  RNA-binding region RNP-1 proteins domain identified by eMATRIX, accession number BL00030B, p-value=3.368e- 09, raw score of 7.03
  misc_feature (1)...(379): Xaa = X or * as defined in Table 2
VPPMGGGPPFVGPVGFGPGDRSHLDSPEAREAMFLRRAAVAPQRAPILRPAFVPHVLQRADSALSSAAAGPRPMALRPPHQALVGPPLPGPPGPPMMLPPMARAPGPPLGSMAALRPPLEEPAAPRELGLGLGLGLKEKEEAVVAAAAGLEEASAAVAVGAGGAPAGLAVIGPSLPLALAMPLPEPEPLPLPLEVVRGLLPPLRITELLSLRPRPRPPRPEPPPGLMALEVPEPLGEDKKKGKPGEIEHRCIATAAQGASWEDPPTCWKWDAEXLSRVFCGDLGNEVNDXHLGHAASARFPIPSLKAKVIRXQSAQARPKGYGFVSFKDPSDYVRPMREMNGKYVVLAPPIKLRKSMWKDRNLDVFRKKQKEKKKLGLR

SEQ ID NO: 51595 - protein, 373 aa, Homo sapiens
  misc_feature (1)...(373): Xaa = X or * as defined in Table 2
MPGGKIGFLIEKGATEQSSTGNDFDELREEGGRRSNYSELQEDIQTKGKEVENFEKNLEECVTTISNTEKCVKELMELKTKARELREECRSFRSQCNQLEERVPAMKDEMNEMKREGKFREKRIKRNEQSLQEIWDYVKRPNLPLIGVPESDRENGTKLENTLRDIIQENFPSLTRRGQPFRIMENTENAPKDNLLEKEQLPRHNNCLELTQEEPAWDLQFDLLDLNDISSALKHHEEKNLISLLPQRGADYLSFRSHFQKNFVCVENCSLQERTVTGTVKVKNVSFEKKVQIRITFDSWKNYTDVDCVYMKNVYGGTDSDTFSFAIGLPPVIPTEQKIEFCISYHANGQIFWDNKXWGRKYKNCVIVQWEAL

SEQ ID NO: 51596 - protein, 347 aa, Homo sapiens
  misc_feature (1)...(347): Xaa = X or * as defined in Table 2
GPPPLCLMSCTRMIQVLDPRPLTSSVMPVDVAMRLCLAHSPPVKSFLGPYDEFQRRHFVNKLKPLKSCLNIKHKAKSQNDWKCSHNQAKKRVVFADSKGLSLTAIHVFSDLPEQPAWDLQFDLLDLNDISSALKHHEEKNLILDFPQPSTDYLSFRSHFQKNFVCLENCSLQERTVTGTVKVKNVEFXGRKFQIRYHFSDSWEKLTLDVDCVYMENVYGVGTGSDTFSFAIDLPPVIPTEQKIEFCISYHANGQVFWDNNDGQNYWIVHVQWKPDGVQTQMAPQDCAFHQTSPKTELESTIFGSPRLASGLFPEWQSWGRMENLRLLCDELSNNVTGLDLSYSPMQS

SEQ ID NO: 51597 - protein, 23 aa, Homo sapiens
MEAPQVPPCPAGPLIYTKVPCFL

SEQ ID NO: 51598 - protein, 353 aa, Homo sapiens
MSVRKLMGALKGMEALAGESAGVIQDISKGCVAYTINSFSPTPQAIDLNKPIDKRIYKGTHPPATISTSSLLPPRPSAAVWELLSEEDLGLVWTCCVSGAMSNGLLGDFAVDRQDQGDISEWLPESESLFLASHASGTCTCTTSATPAPRPRPIQPAEAGRGLLCLCCQDKAPRNPLAKWAVGAAGPGGKKEHKRYHSLGNISRGGVAAVAVVGRSPAALFPQPPGPRQGAGHCAVPALHEVPLLEPLVCKKIAQSGSQSSCSWRTASSLPPGGPHLHLGPAGQGGLSSQPGNSPSGTVINVLTRLTMMVDCSSPPTCTKFGGPPDGPDTGDVIALVASALSPPTAKYNDLFL

SEQ ID NO: 51599 - protein, 130 aa, Homo sapiens
  misc_feature (1)...(130): Xaa = X or * as defined in Table 2
QRPIXPTKPIGQRVSKGHQPTRHDFTQFLAAHETISRLVGFSAGQVQYLDLIKKDPSKLFNEERLIDKTKVTYLKWLPESESLFLASHASGHLYLYNVSHPCASAPPQYSLLKQGEGFSVYAAKYNDLFL

SEQ ID NO: 51600 - protein, 554 aa, Homo sapiens
  DOMAIN (154)..(234): WD domain, G-beta repeat domain identified by PFam, accession name WD40, E-value=1.2e-07, PFam score of 38.8
  misc_feature (1)...(554): Xaa = X or * as defined in Table 2
FRTSLKDVWHTPLTPFLPPLKSIDLNKPIDKRIYKGTQPTCHDFNQFTAATETISLLFGSFSPRRTWAWCGPAVXAGPCPTAFLGTLRLIDKTKVTYLKWLPESESLFLASHASGHLYLYNVSHPCASAPPQYSLLKQAWGFSFYAAKSKAPRNPLAKWAVGEGPLNEFAFSPDGRHLACVSQDGCLRVFHFDSMLLRGLMKSYFGGLLCVCWSPDGRYVVTGGEDDLVTVWSFTEGRVVARGHGHKSWVNAVAFDSLYTTRAEEAATAAGADGERSGEEEEEEPEAAGTGSAGGAPLSPLPKAGSITYRFGSAGQDTQFCLWDLTEDVLYPHPPLARTRTLPGTPGTTPPAASSSRGGEPGPGPLPRSLSRSNSLPHPAGGGKAGGPGVAAEPGTPFSIGRFATLTLQERRDRGAEKEHKRYHSLGNISRGGSGGSGSGGEKPSGPVPRSRLDPAKVLGTALCPRIHEVPLLEPLVCKKIAQERLTVLLFLEDCIITACQEGLICTWPRPGKAFTDEETEAQTGEGSWPRSPSKSVVEGISSQPGNSPSGTVV

SEQ ID NO: 51601 - protein, 155 aa, Homo sapiens
  DOMAIN (43)..(118): PCI domain identified by PFam, accession name PCI, E-value= 7.3e-08, PFam score of 39.6
LMQNWDAAMEDLTRLKETIDNNSVSSPLQSLQQRTWLIHWSLFVFFNHPKGRDNIIDLFLYQPHMLADKLNMTPEEAERWIVNLIRNARLDAKIDSKLGHVVMGNNAVSPYQQVIEKTKSLSFRSQMLAMNIEKKLNQNSRSEAPNWATQDSGFY

SEQ ID NO: 51602 - protein, 302 aa, Homo sapiens; identical to SEQ ID NO: 30892
  DOMAIN (227)..(300): PCI domain identified by PFam, accession name PCI, E-value= 1.4e-13, PFam score of 58.6

SEQ ID NO: 51603 - protein, 1202 aa, Homo sapiens
  misc_feature (1)...(1202): Xaa = X or * as defined in Table 2
YWKERPTQKVIPRATENHGLKSYLQKTKLSIDEAAFLLPDTNLKSELLELLTHWLQVGVPMTPSLGSINLLGWLTELRETHTYICWFIVKETTRDTDEEMCRTEPALACSISHYCDDGCIQMLNTPETLQCSAKDSKHFIPKECSIPGENRPPSDTGKTVKFLSLNIFNLQLAESTDAEQRANCILRCFLTETTLNYQKILSVRPGTKLATASHVSGLGLQTPPFGLAQHLIRPHAFLAPKDPLTSFTERNSRSGKTRCRSKKCAMRVVKSYSAILPKKRESVLTKTLLVAPTNEQTDPVLRMCCGKTGLKKGAGFTLESRGQRRMRAGCPTLCVRARVTETDPSICSEVTFSWMILMLMDVCQCLGIEEFGIYCSLRSLDLFVPIFLEKVFQVFEGTSSPIMLWFLQTHRGTTLVALDKIQKNSLDYQAETLVLFPYFLPNKWNLSVFAEPPGTGDVVMQAPLWPPPLGLYWALEHYDQHVAKPARQRSLSLWPPPPTAHKGFLQGHCQCSLKTQRLFSQLMANAARPETQASGQWTPFSPGQIQKCSPRSRNALGTPRACLLLYPTVAELGSTEFNVKPSICCTLPYQGAQSPSLHTLQLRGNGVGGQHQQFKTVSLDPFNASFRDMKLKLGKSGISSWFVSIAAAVGDEGLVPRSMELYSQKAYDCLCCVMQVVRKVGESWQSQTSPSSHTTQKANLTSTLPPTTALSVFPGSGYQEWGTAVKILESMEATLEQDNKTRLEQFGGFRRKEDRKMWESLELPRDLWNDFDQNADSDMDNEVQAEVVSDGDKELVRNWSKVWKGNVGLEPRYRVPTGALTSRVVRRGPPSFRPQKCRSTDSLHHEPGKAAGTQCQPVKDLPKAVGAHSLHQPALDFRQEYLNPFSKNAKFQYECGNYSGAAENFYFFKGLVPATDRNALSSLWGKLASEILMQNWDAAMEDLTRLKETIDNNDEKPSFTHVVGKERYLNAIQTMCPQFFRYLXLTAVHNKQGIVRKRRPRVXKIXLSFIKQESYTYKRPNLQNLLECLYVNFDFDGGSRKSXGECEPGLVNDFFLGGXSXGFQXKMPRLFIFETFCRIPPSVSAINMLADKLNMTPEEAERVDWXNLIRKWQAWMPQDLIPKLGSCGLWGNNAVSPLQQVIEKTKSLSFRSPDVGPXIMRKNLNQNSRSEAPXRGQLQDSGLLLKNHKEKMKKKNYQRKMK

SEQ ID NO: 51604 - protein, 686 aa, Homo sapiens
  DOMAIN (351)..(389): Lysyl oxidase  copper-binding region proteins domain identified by eMATRIX, accession number BL00926B, p-value=6.434e- 09, raw score of 13.84
  misc_feature (1)...(686): Xaa = X or * as defined in Table 2
GPRLGLTTMWHEARKLGRRLRGLLFDSRKRAERRREYYEKIKKDPAQFLQVHGRACKVHLDSAVALAAESPVNMMPWQGDTNNMIDRFDVRAHLDHIPDYTPPLAHHHFSQNQESDERKCNYERYRGLVQNDFAGISEEQCLYQIYIDELYGGLQRPSEDEKKKLAEKKASIGYTYEDSTVAEVEKAAEKPEEEESAAEEESNSDEDEVIPDIDVEVDVDELNQEQVADLNKQATTYGMADGDFVRMLRKDKEEAEAIKHAKALEEEKAMYSGRRSRRQRREFREKRLRGRKISPPSYARRDSPTYDPYKRSPSESSSESRSRSRSPTPGREEKITFITSFGGSDEEAAAAAAAAAASGVTTGKPPAPPQPGGPAPGRNASARRRSSSSSSSSSASRTSSSRSSSRSSSRSRRGGGYYRSGRHARSRSRSWSRSRSRSRRYSRSRSRGRRHSGGGSRDGHRYSRSPARRGGYGPRRRSRSRSHSGDRYRRGGRGLRHHSSSRSRSSWSLSPSRSRSLTRSRSHSPSPSQSRSRSRSRSQSPSPSPAREKLTRPAASPAVGEKLKKTEPAAGKETGAAKVPKLTPQEKLKLRMQKPLNRQFKADKKAAQRKRXSQAEHERQERKDEARAMARKIGMKERERREKEREEWERQYSRQSRSPLPRDYSREYSSSRRRSRSRSRSPHYRH

SEQ ID NO: 51605 - protein, 203 aa, Homo sapiens
MTIIIMGFISAELVDPNIFIQPITEERASRTLYRIELLRKVREQALRHPQLFERLKLCHPNPDLPVWLLDAKGIILEEMKVKSENLKEEPQSSEEESMSSVETRTLIKSEPAWSRVCFVAVSLPIINVNIIIGGCCCCLVLQAKLSRALHGSAMISIINLDDSLLYTHCALFKAGDIHLHEELKTSIAFSWRSFQVLTHPFSP

SEQ ID NO: 51606 - protein, 409 aa, Homo sapiens
MGRNQSRKAENSKNQSASFPPNECSSSPEMEQSWTENDFDELREEAFRRLLVSGVADSHSPAGLALTDPGAVSDRGRQSHRLAPVHPHICAQIPGSGATGVAPGRGLQTPGKLWSWGKGFLPESMYERILTGPVVREEVSRRGRRPKSGIAKATAAAAAASATSVSGNPLLANGLLPGVDLTTLQALQQNLQNLQSLQVTAGLMGMPTGLPSGGEAKNMAAMFPMLLSGMAGLPNLLGMGGLLTKPTESGTEDKKGSDSKESEGKTERTESQSSENGGENSVSSSPSTSSTAALNTAAAANPLALNPLLLSNILYPGMLLTPGLNLHIPTLSQSNTFDVQNKNSDLGSSKSVEVKEEDSRIKDQEDKGGTEPSPLNENSTDEGSEKADASSGSDSTSSSSEDSDSCNEN

SEQ ID NO: 51607 - protein, 542 aa, Homo sapiens
  DOMAIN (338)..(366): Dehydrins proteins domain identified by eMATRIX, accession number BL00315A, p-value=4.246e-10, raw score of 9.35
MAEKKAIMELKLSLLTPSSRILPQISSCQGPKPEAENQGKLMLEKDAPYLSCGSEKLVDPNIFIQPITEERASRTLYRIELLRKVREQALRHPQLFERLKLCHPNPDLPVWWECGPHDRDLLIGAAKHGVSRTDYHILRDPELSFMAAQRNYSQSKMAHSRTSTPLLQQYQVALSASPLTSLPRLLDAKGIILEEMKVKSENLKEEPQSSEEESMSSVETRTLIKSEPVSPKNGVLPQATGDQKSGGKCETDRRMVAARTEPLTPNPASKKPRVHKRGSESSSDSDSDSERSSCSSRSSSSSSSSSCSHSRSGSSSSSSSSCSSASSSSSSSTSSSSSSSSSSSEESDSDEEEAQKRESTTHMKAYDEESVASLSTTQDETQDSFQMNNGTPESAYILQGGYMLAASYWPKDRVMINRLDSICQTVLKGKWPSARRSYDANTVASFYTTKLLDSPGAATEYSEPSVPTPPGAGVKEEHDQSTQMSKVKKHVREKEFTVKIKDEGGLKLTFQKQGLAQKRPFDGEDGALGQQQYLTRLRELQN

SEQ ID NO: 51608 - protein, 1334 aa, Homo sapiens
  DOMAIN (637)..(665): Dehydrins proteins domain identified by eMATRIX, accession number BL00315A, p-value=4.246e-10, raw score of 9.35
  misc_feature (1)...(1334): Xaa = X or * as defined in Table 2
GFIWNRITPTEDGQTRELQNHLGLSAPVPRGRKGKKVKTQTSSFDIQKAEWLRKYNPEQLLQDEGYKKHIKHHCNKVLLRVRMLYYLKQEVIGNECQKVFDGVDASDIDVWVPEPDHSEVPAEWWDFDADKSLLIGVFKHGYEKYNTIRADPALCFLERVGKPDEKAVAAEQRANDYMDGDVEDPEYKPAPAIFKDDIEDDVSSPGDLVIADGDGQLMEGDKVYWPTQSALTTRLRRLITAYQRTNKNRQIQQIQPTFSVPTSVMQPIYEEATLNPKMAAKIERQQRWTRREEADFYRVVSTFGVVFDPDRGQFDWTKFRAMARLHKKTDDSLEKYLYAFMSMCRRVCRLPSKEELVDPNIFIQPITEERASRTLYRIELLRKVRRQALRHPQLFERLKLCHPNPDLPVWWECGPHDRDLLIGAAKHGVSRTDYHILRDPELSFMAAQRNYSQSKMAHSRTSTPLLQQYQVALSASPLTSLPRLLDAKGIILEEMKVKSENLKEEPQSSEEESMSSVETRTLIKSEPVSPKNGVLPQATGDQKSGGKCETDRRMVAARTEPLTPNPASKKPRVHKRGSESSSDSDSDSERSSCSSRSSSSSSSSSCSHSRSGSSSSSSSSCSSASSSSSSSTSSSSSSSSSSSEESDSDEEEAQKRESTTHMKAYDEESVASLSTTQDETQDSFQMNNGTPESAYILQGGYMLAASYWPKDRVMINRLDSICQTVLKGKWPSARRSYDANTVASFYTTKLLDSPGAATEYSEPSVPTPPGAGVKEEHDQSTQMSKEGGLKLTFQKQGLAQKRPFDGEDGALGQQQYLTRLRELQSASETSLVNFPKSIPVSGTSIQPTLGANGVILDNQPIVKKRRGRRKNVEGVDIFFFNRNKPPNHVSLGLTSSQISTGINPALSYTQPQGIPDTESPVPVINLKDGTRLAGDDAPKRKDLEKWLKEHPGYVEDLGAFIPRMQLHEGRPKQKRHRCRNPNKLDVDSLTGEERVQLINRRNARKVGGAFAPPLKDLCRFLKENSEYGVAPEWGDVVKQSGFLPESMYERILTGPVVREEVSRRGRRPKSGIAKATAAAAAASATSVSGNPFVXANGLLPGVDLTTLQALQQNLQNLQSLQVTAGLMGMPTGPSFLEEEAKNMAAMFPMLLSGMAGLPNLLGMGGLLTKPTESGTEDKKGSDSKESEGKTERTESQSSENGGENSVSSSPSASSTAALNTAAAANPLALNPLLLSNILYPGMLLTPGLNLQIPNLSQVKYFXWTKQTTSDXASSKSVEVKEEDSRIKDQEDKGGTDPSPLNENSTDEGSEKADASSGSDSTSSSSEDSDSSNED

SEQ ID NO: 51609 - protein, 176 aa, Homo sapiens
AEADAIIQMVREGQRARRQQQAATSESSQSEASVRREESPMDVDQPSPSAQDTQSIASDGTPQGEKEKEERPPELPLLSEQLALDELWDMLGECLKELEESHDQHAVLETHRTVLNQILRQSTTHLADGPFAVLVDYIRVLDFDVKRKYFRQELERLDEGLRKEDMAVHVRRDHVF

SEQ ID NO: 51610 - protein, 72 aa, Homo sapiens
  DOMAIN (33)..(65): HECT-domain (ubiquitin-transferase) domain identified by eMATRIX, accession number PF00632C, p-value=1.000e-29, raw score of 20.66
YFQVPLQGFAALEGMNGIQKFQIHRDDRSTDRLPSAHTCFNQLDLPAYESFEKLRHMLLLAIQECSEGFGLA

SEQ ID NO: 51611 - protein, 109 aa, Homo sapiens
PVSKESRVAPLCDFCLPFIQSESSQSEASVRREESPMDVDQPSPSAQDTQSIASDGTPQGEKEKEERPPELPLLSEQLSLDELWDMLGECLKELEESHDQHAVLVLQPA

SEQ ID NO: 51612 - protein, 243 aa, Homo sapiens
TPTPPTAPTPVTSAPALVAATAISTIVVAASTTVTTPTTATTTVSISPTTKGSKSPAKVSDGGSSSTDFKMVSSGLTENQLQLSVEVLTSHSCSEEGLEDAANVLLQLSRGDSGTRDTVLKLLLNGARHLGYTLCKQIGTLLAELREYNLEQQRRAQCETLSPDGLPEEQPQTTKLKGKMQSRFSGLGSASSIQAAVRQLEAEADAIIQMSESSQSEASVRREESPMDVDQPSPSAQDTQSIA

SEQ ID NO: 51613 - protein, 72 aa, Homo sapiens
  misc_feature (1)...(72): Xaa = X or * as defined in Table 2
LYVKPTAPPKXALXSEGLEXMSPQCLWQGLQQGKAQKKLLEVPNKLTQTINXPANVLILAXGGSSSYRPPHK

SEQ ID NO: 51614 - protein, 666 aa, Homo sapiens
  DOMAIN (486)..(541): Flocculin repeat proteins domain identified by eMATRIX, accession number PF00624J, p-value=7.000e-09, raw score of 6.21
MPQLPGISLPEGVDPSFLAALPDDIRREVLQNQLGIRPPTRTAPSTNSSAPAVVGNPGVTEVSPEFLAALPPAIQEEVLAQQTAEQQRPELAQNASSDTLMDPVTLIQTLPSDLRRSVLEDMEDSVLAVMPPDIAAEAQALRREQEARQRQLMHERLFGHSSTSALSAILRSPAFTSRLSGNRGVQYTRLAVQRGGTFQMGGSSSHNRPSGSNVDTLLRLRGRLLLDHEALSCLLVLLFVDEPKLNTSRLHRVLRNLCYHAQTRHWVIRSLLSILQRSSESELCIETPKLTTSEEKGKKSSKSCGSSSHENRPLDLLHKMESKSSNQLSWLSSVSMDAALGFRTNIFQIQRSGGRKHTEKHASGGSTVHIHPQAAPVVCRHVLDTLIQLAKVFPSHFTQQRTKETNCESDRERGNKACSPCSSQSSSSGICTDFWDLLVKLDNMNVSRKGKNSVKSVPVSAGENKVSEAQANSGSGASSTTTATSTTSTTTTTAASTTPTPPTAPTPVTSAPALVAATAISTIVVAASTTVTTPTTATTTVSISPTTKGSKSPAKVSDGGSSSTDFKMVSSGLTENQLQLSVEVLTSHSCSEEGLEDAANVLLQLSRRPARMLAMHWPSLYNVETEKTLALPNLIALQTSPFASGVIAKSSTDRLINQCAPVWRWR

SEQ ID NO: 51615 - protein, 2114 aa, Homo sapiens
  DOMAIN (2072)..(2104): HECT-domain (ubiquitin-transferase) domain identified by eMATRIX, accession number PF00632C, p-value=1.000e-29, raw score of 20.66
  DOMAIN (1808)..(2114): HECT-domain (ubiquitin-transferase) domain identified by PFam, accession name HECT, E-value=1.3e-40, PFam score of 148.3
  misc_feature (1)...(2114): Xaa = X or * as defined in Table 2
MVSPEPKTGHSIRNWLDELKDLPILHAYSNLPSSPAVDLAIHSSKEGRMDWTEGQVTGPVVRSAATSGAGSTTSGVVSGSLGSREINYILRVLGPAACRNPDIFTEVANCCIRIALPAPRGSGTGNGSSRIPRESAPEMATAESLVEELSEDAAGGASPGVELPALGCSELPAAEVSPTASSKNLETICEYAYCMAMLPETGLDPYPKRGFLDLTQERIWTDIPPSPGNIPTTHPLMVRHADHSSLTLGSGSSTTRLTQGIGRSQRTLRQLTANTGHTIHVHYPGNRQPNPPLILQRLLGPSAAADILQLSSSLPLQSRGRARLLVGNDDVHIIARSDDELLDDFFHDQSTATSQAGTLSSIPTALTRWTEECKVLDAESMHDCVSVVKVSIVNHLEFLRDEELEERREKRRKQLAEEETKITDKGKEDKENRDQSAQCTASKSNDSTEQNLSDGTPMPDSYPTTPSSTDAATSESKETLGTLQSSQQQPTLPTPPALGEVPQELQSPAGEGGSSTQLLMPVEPEELGPTRPSGEAETTQMELSPAPTITSLSPERAEDSDALTAVSSQLEGSPMDTSSLASCTLEEAVGDTSAAGSSEQPRAGSSTPGDAPPAVAEVQGRSDGSGESAQPPEDSSPPASSESSSTRDSAVAISGADSRGILEEPLPSTSSEEEDPLAGISLPEGVDPSFLAALPDDIRREVLQNQLGIRPPTRTAPSTNSSAPAVVGNPGVTEVSPEFLAALPPAIQEEVLAQQRAEQQRRELAQNASSDTPMDPVTFIQTLPSDLRRSVLEDMEDSVLAVMPPDIAAEAQALRREQEARQRQLMHERLFGHSSTSALSAILRSPAFTSRLSGNRGVQYTRLAVQRGGTFQMGGSSSHNRPSGSNVDTLLRLRGRLLLDHEALSCLLVLLFVDEPKLNTSRLHRVLRNLCYHAQTRHWVIRSLLSILQRSSESELCIETPKLTTSEEKGKKSSKSCGSSSHENRPLDLLHKMESKSSNQLSWLSVSMDAALGCRTNIFQIQRSGGRKHTEKHASGGSTVHIHPQAAPVVCRHVLDTLIQLAKVFPSHFTQQRTKETNCESDRERGNKACSPCSSQSSSSGICTDFWDLLVKLDNMNVSRKGKNSVKSVPVSAGGEGETSPYSLEASPLGQLMNMLSHPVIRRSSLLTEKLLRLLSLISIALPENKVSEAQANSGSGASSTTTATSTTSTTTTTAASTTPTPPYVHPPRVTSAPALVAATAISTIVVAASTTVTTPTTATTTVSISPTTKGSKSPAKVSDGGSSSTDFKMVSSGLTENQLQLSVEVLTSHSCSEEGLEDAANVLLQLSRGDSGTRDTVLKLLLNGARHLGYTLCKQIGTLLAELREYNLEQQRRAQCETLSPDGLPEEQPQTTKLKGKMQSRFDMAENVVIVASQKRPLGGRELQLPSMSMLTSKTSTQKFFLRVLQVIIQLRDDTRRANKKAKQTGRLGSSGLGSASSIQAAVRQLEGXRLDAIIQMVREGQRARRQQQAATSESSQSEASVRREESPMDVDQPSPSAQDTQSIASDGTPQGEKEKEERPPELPLLSEQLSLDELWDMLGECLKELEESHDQHAVLVLQPAVEAFFLVHATERESKPPVRDTRESQLAHIKDEPPPLSPAPLTPATPSSFDQFFSGEPSSMHISSSLPPDTQKFLRFAETHRTVLNQILRQSTTHLADGPFAVLVDYIRVLDFDVKRKYFRQELERLDEGLRKEDMAVHVRRDHVFEDSYRELHRKSPEEMKNRLYIVFEGEEGQDAGGLLREWVYDSSFREMFNPMYGLFRTSPGXFESPNTINPSSHCNPNHLSYFKFCSGRIVAKAVYDNRLLECYFTRSFYKHHLGASSVRYTDMESEDYHFYQGLGLSGWENDVSTLGYDLTFQALRVPGVLGVCEVRDLKPNGGQPSWVTEENKKEVCTPWYCQMRMTGAIRQQVAAFLEGFYEIIPKRLISIFTEHELELLISGLPTIDIDDLNPNTEYHKYQSNSIQIQWFLEETLPFLSNQNXPVPKVPSQFVHGVPSKGNPWQGLCLPLEGHGMGISGSFQVPFGGGQVPQIALPSAHTCFNQLDLPAYESFEKLRHMLLLAIQECSEGFGLA

SEQ ID NO: 51616 - protein, 452 aa, Homo sapiens
PCEGGARSCLVTESARGGLQFLQQCDREDLVELALPQLAQVVTVYEFLLMKVEKDHLAKPFFPAIYKEFEELHKMVKKMCQDYLSSSGLCSQETLEINNDKVAESLGITEFLRKKEIHPDNLGPKHLSRDMDGEQLEGASSEKREREAAEEGLASVKRPRREALSNDTTESLAANSRGREKPRPLHALPAGFSPPVNVTVSPRSEESHTTTVSGGNGSVFQAGPQLQALANLEARRGSIGAALSSRDVSGLPVYAQSGEPRRLTQAQVAAFPGENALEHSSDQDTWDSLRSPGFCSPLSSGGGAESLPPGGPGHAEAGHLGKVCDFHLNHQQPSPTSVLPTEVAAPPLEKILSVDSVAVDCAYRTVPKPGPQPGPHGSLLTEGCLRSLSGDLNRFPCGMEVHSGQRELESVVAVGEAMALKFPMGAMSYCLRDRSRFLFRLPMGLSCPLQVQ

SEQ ID NO: 51617 - protein, 176 aa, Homo sapiens
ETKTIVKSEDTLRQVSRPAKYTAKAEFIKRDDLADGHLPDSDDDSEVSVEEDQRERQALFDLSSCSLRPKSFKCQTCKKSYIGKWGLAQHFKLNPGHGQLDPEMVLSEKANGSTLRGCTEERTLSLTFPGLSVPAAPREGGARSCLVRESARSGLQKNVDLLARMQRRERLLIHCW

SEQ ID NO: 51618 - protein, 358 aa, Homo sapiens
  misc_feature (1)...(358): Xaa = X or * as defined in Table 2
GRGDWPDILNLTQATASWTPRWCCLRKPVEAPSGGATEERTLSLTSLGLSMPADPCEGGARSCLVTESARGGLQNGQSVDVEETLPSEPENGALLRSERYQGPRRRACSETLAESRTAVLQQRRAAQLPGGPAAAGEQRASPSKARLKEFLQQCDREDLVELALPQLAQVVTVYEFLLMKVAESLGITEFLRKKEIHPDNLGPKHLSRDMDGEQLEGASSEKREREAAEEGLASVKRPRREALSNDTTESLAANSRGREKPRPLHALAAGTIVSQEEDIVTVTDGRGACLRMGPLEGVPLEAVESVVTVEPEPSQXNGVRYXNSSDFIQRRSMASNVYFSNVNIAQMNLLFIKNNVFL

SEQ ID NO: 51619 - protein, 58 aa, Homo sapiens
MACTCVMGHSLHSPTQNQLGQVTCPAEKSKHRCSLLLGIGSNFKKYVPILYSQRQILY

SEQ ID NO: 51620 - protein, 422 aa, Homo sapiens
  misc_feature (1)...(422): Xaa = X or * as defined in Table 2
MVLSEKASGSTLRGCTEERTLSLTSLGLSMPADPCEGGARSCLVTESARGGLQFLQQCDREDLVELALPQLAQVVTVYEFLLMKVAESLGITEFLRKKEIHPDNLGPKHLSRDMDGEQLEGASSEKREREAAEEGLASVKRPRREALSNDTTESLAANSRGREKPRPLHALAAESHTTTVSGGNGSVFQAGPQLQALANLEARRGSIGAALSSRDVSGLPVYAQSGEPRRLTQAQVAAFPGENALEHSSAQDTWDSLRSPGFCSPLSSGGGAESLPPGGPGHAEAGHLGKVCDFHLNHQQPSPTSVLPTEVAAPPLEKILSVDSVAVDCAYRTVPKPGPQPGPHGSLLTEGCLRSLSGDLNRFPCGMEVHSGQRELESVVCLSAETMAFXNFPMGAMSYCLRDRSRFLFRLPMGLSCPLQVQ

SEQ ID NO: 51621 - protein, 37 aa, Homo sapiens
SGPSFLYLTVEKGFDPIIPISVVPLCCLCLLSPSMTS

SEQ ID NO: 51622 - protein, 137 aa, Homo sapiens
MARYLEGYRTLPRNSKTRPESICSVTPSTHDKTLGPGAEEKRRSMRDDTMWQLYEWLQRQFYNKQSTLPRHSTLSSPKTMVNISGQTMHYIPTSRSHGSIGAYQGYSPQRTNRSEVSSPIQRGDVTLDRRHRAHHRK

SEQ ID NO: 51623 - protein, 297 aa, Homo sapiens
  DOMAIN (44)..(70): Nuclear transition protein 2 proteins domain identified by eMATRIX, accession number BL00970B, p-value=8.714e-09, raw score of 10.09
  misc_feature (1)...(297): Xaa = X or * as defined in Table 2
RRAQYRRWWRRWRRRHREPEKEKRRHSRSHSRRRRTLIFXTQSRSRSREXLHCQSRSRXXFKSPRQRRSHSRERGRSTARHYRSTKERQQRRSRSGTRSPKKSRCPKRKLSLSPSPGKHKKKKKDKERNRYERERSTSKKKSKDREKDQERKSESDTDVKVTRVYDEEEQGYDTSQEIEMHADNPAAIQTVVLQRDDLQNGLLSTCRELSRATAELERAWREYDKLEYDVTVTRNQMQEQLDHLGEVQCWCYRTEKYVMERGPEQDPKRAFLDFVQERIQGESAVQSESKFIKTVKK

SEQ ID NO: 51624 - protein, 60 aa, Homo sapiens
CCVKWVSNSSNVGYLAHAIHQVTKYVPGARKQRQPFLVVSGSFLSATVCDTQHLRTCGVY

SEQ ID NO: 51625 - protein, 37 aa, Homo sapiens
CVKWVSNSSNVGYLAHAIHQVTNNVPVFSLHTDNERG

SEQ ID NO: 51626 - protein, 104 aa, Homo sapiens
  DOMAIN (68)..(78): Aminotransferases class-I pyridoxal-phosphate attachment site proteins domain identified by eMATRIX, accession number BL00105A, p-value=3.455e-13, raw score of 10.02
LPTALLRSTMALLHSGRVLPGIAAAFHPGLAAAASARASSWWTHVEMGPPDPILGVTEAFKRDTNSKKMNLGVGAYRDDNGKPYVLPSVRKFVTVQTISGTGAL

SEQ ID NO: 51627 - protein, 130 aa, Homo sapiens
  DOMAIN (61)..(71): Aminotransferases class-I pyridoxal-phosphate attachment site proteins domain identified by eMATRIX, accession number BL00105A, p-value=3.455e-13, raw score of 10.02
STMALLHSGRVLPGIAAAFHPCLAAAASARASSWWTHVEMGPPDPILGVTEAFKRDTNSKKMNLGVGAYRDDNGKPYVLPSVRKAEAQIAAKNLDLLPLLNVVCSLSSHTVSPAAQGGTRKEDILGFACC

SEQ ID NO: 51628 - protein, 101 aa, Homo sapiens
  DOMAIN (4)..(19): ASPARTATE AMINOTRANSFERASE SIGNATURE domain identified by eMATRIX, accession number PR00799B, p-value=5.304e-17, raw score of 11.78
KRNLFALFDMAYQGFASGDGDKDAWAVRHFIEQGINVCLCQSYAKNMGLYECFGVVVPESGIWSRCSQPAIYSLSETAWKHGEDGREGSKRTAPYEARTGL

SEQ ID NO: 51629 - protein, 141 aa, Homo sapiens
  DOMAIN (52)..(73): ASPARTATE AMINOTRANSFERASE SIGNATURE domain identified by eMATRIX, accession number PR00799C, p-value=2.636e-19, raw score of 14.71
  misc_feature (1)...(141): Xaa = X or * as defined in Table 2
RPEXWKEIATVVKKRNLFALFDMAYQGFASGDGDKDAWALHHFIEQGINVCLCQSYAKNMGLYGEHVGAFTVVCKDADEAKRVESQLKILISPMYSNSPLNGAQIASTIPNTPVGLKVWVMGGLHDHPQVMSDEKETTLRA

SEQ ID NO: 51630 - protein, 497 aa, Homo sapiens
  DOMAIN (353)..(396): Aminotransferases class-I pyridoxal-phosphate attachment site proteins domain identified by eMATRIX, accession number BL00105E, p-value=9.561e-28, raw score of 23.45
  DOMAIN (61)..(485): Aminotransferases class-I domain identified by PFam, accession name aminotran_1, E-value=5.5e-115, PFam score of 395.4
  misc_feature (1)...(497): Xaa = X or * as defined in Table 2
HEAGAGSLCVCPARPLLRPAAAHCPSYRSTMAHACTSGRVLPGIAAAFHPGLAAAASARASSWWTHVEMGPPDPILGVTEAFKRDTNSKKMNLGVGAYRDDNGKALPCCPSVRKAEGPRLPQKIWDKEYLPIGGLAEFCKASAELALGENNRSLERVGRFVTVQTHFWELGALRIGASFLQRFFKFSRDVFLPKPTWGETTHPSFRDAGMQLQGYRYYDPKTCGFDFTGAVEDISKIPEQSVLLLHACGHNNPTGVDPRPEQWKEIATVVKKRNLFAFFDMAYQGFASGDGDKDAWAVRHFIEQGINVCLCQSYAKNMGLYGERVGAFTMVCKDADESKRVESQLKILIRPMYSNPPLNGARIAAAILNTPDLRKQWLQEVKGMADRIIGHAGLQLVSNLQGREGSTHNWATHSPTKLGMFCFHRGXKLEQVERLIKEFSIYMTKDGRISVAGVTSSNVGYLAHAIHQVTKYVSLVRGNGDNLSVLSLCLLRASHRQ

SEQ ID NO: 51631 - protein, 61 aa, Homo sapiens
QRAGSKTAGPPCQWSRMASEGTNIPSPVVRQIDKQFLICSICLERYIRDYRLKQNSMWKNQ

SEQ ID NO: 51632 - protein, 61 aa, Homo sapiens
PSYSYIGLKVYRIENDIKNSITRIHSIDDRTFPCHKAKALSLRLCCFQKYNGKCCTFIGTT

SEQ ID NO: 51633 - protein, 117 aa, Homo sapiens
VMEFYCQSCETAMCRECTEGEHAEHPTVPLKDVVEQHKASLQVQLDAVNKRWGTLPKPPTGCLYLRPGLMASCQLTNQKASIVDDIHSTFDELQKTLNVRKSVLLMELEVNYGLKHK

SEQ ID NO: 51634 - protein, 774 aa, Homo sapiens
  DOMAIN (61)..(70): Zinc finger C3HC4 type (RING finger), proteins. domain identified by eMATRIX, accession number BL00518, p-value=9.143e-10, raw score of 12.23
  DOMAIN (524)..(774): NHL repeat domain identified by PFam, accession name NHL, E- value=3.1e-33, PFam score of 123.9
  misc_feature (1)...(774): Xaa = X or * as defined in Table 2
WLHCMQQQRAGSKTAGPPCQWSRMASEGTNIPSLVVGQIDKQFLICSICLERYKNPKVLPCLHTFCERCLQNYIPAHSLTLSCPVCRQTSILPEKGVAALQNNFFITNLMDVLQRTPGSNAEESSILETVTAVAAGKPLSCPNHDGNVMEFYCQSCETAMCRECTEGEHAEHPTVPLKDVVEQHKASLQVQLDAVNKRWGTLPKPPTGCLYLRPGLMASCQLTNQKASIVDDIHSTFDELQKTLNVRKSVLLMELEVNYGLKHKVLQSQLDTLLQGQESIKSCSNFTAQTLNHGTETEVLLVKKQMSEKLNELADQDFPLHPRENDQLDFIVETEGLKKSIHNLGTILTTNAVASETVATGEGLRQTIIGQPMSVTITTKDKDGELCKTGNAYLTAELSTPDGSVADGEILDNKNGTYEFLYTVQKEGDFTLSLSLYDQHIRGSPFKLKVIRSADVSPPTEGVKRRVKSPGSGHVKQKAVKRPASMYSTGKRKENPIEDDLIFRVGTKGRNKGEFTNLQGVAASTNGKILIADSNNQCVQIFSNDGQFKSRFGIRGRSPGQLQRPTGVAVHPSGDIIIADYDNKWVSIFSSDGKFKTKIGSGKLMGPKGVSVDRNGHIIVVDNKACCVFIFQPNGKIVTRFGSRGNGDRQFAGPHFAAVNSNNEIIITDFHNHSVKVFNQEGEFMLKFGSNGEGNGQFNAPTGVAVDSNGNIIVADWGNSRIQVFDGSGSFLSYINTSADPLYGPQGLGPXLQMGHVVVADSGNHCFKVYRYLQ

SEQ ID NO: 51635 - protein, 197 aa, Homo sapiens
LPGKKDLFIEADLMSPLDRIANVSILKCMASYIWGRVPPKIDSKLRFLDERGKLGANLPIHPRARSRQPGLREARPCSRVPTPIAHPRLQPEGRGFSWSDGTRRQSRRGFAPWRGLKFCGAQRLAERLRGVTSPVFAGFRSTPRRDSAAYEENPAFYQKKKRLPRSPGSPFRSQRFAYQEGDGVLKGTFEKRRQRVY

SEQ ID NO: 51636 - protein, 201 aa, Homo sapiens
  misc_feature (1)...(201): Xaa = X or * as defined in Table 2
LEGDQRWINTVSQALHLLSTLYGPFPNCYGIGRCAKMAYELWRNLEEEEDGETKGRRPEIGHIFLLDRGKLCPAFLSSFSPRRHGNMEGVVAKLKSXSXGCESQLXGAWVLGPMESIKAALGHAVXKAGSGRTFMVRDLCFDVDFVTALCSQVVYEGLVDDTFRIKCGKCYGPLHLGKMDGSSALAPATWGRVCGRDPHPE

SEQ ID NO: 51637 - protein, 45 aa, Homo sapiens
NLTQISSPGKITDAFSSLAKRSNFRAISKKLNLVCGTGMVRGDSG

SEQ ID NO: 51638 - protein, 104 aa, Homo sapiens
KAVVPKSMALTSLSINWCCDPVGTVELERLYGLPLGPKICAVFFASAFNSLGYRFIFLTTAVTNSARFMEAMSEVKACCIYRPVLTSSLNTFISEMQASGTQLL

SEQ ID NO: 51639 - protein, 826 aa, Homo sapiens
  DOMAIN (494)..(513): STRUCTURE-SPECIFIC RECOGNITION PROTEIN SIGNATURE domain identified by eMATRIX, accession number PR00887H, p-value=9.280e- 09, raw score of 11.84
  DOMAIN (309)..(826): Sec1 family domain identified by PFam, accession name Sec1, E -value=2.4e-110, PFam score of 380.0
  misc_feature (1)...(826): Xaa = X or * as defined in Table 2
MGPVAAPLGLSLPATDGAHSVRGNSVLVPSGLIPKDYRSLKTQYLQSYGPEHLLTFSNLRRAGLLTEQAPGDTLTAVESKVSKLVTDKAAGKITDAFSSLAKRSNFRAISKKLNLIPRVDGEYDLKVPRDMAYVFGGAYVPLSCRIIEQVLERRSWQGLDEVVRLLNCSDFAFTDMTKEDKASSESLRLILVVFLGGCTFSEISALRFLGREKGYRFIFLTTAVTNSARLMEAMSELPGKKDLFIETDLMSPLDRIANVSLLKQHEVDKLYKVENKPALSSNEQLCFLVRPRIKNMRYIASLVNADKLAGRTRKYKVIFSPQKFYACEMVLEEEGIYGDVSCDEWAFSLLPLDVDLLSMELPEFFRDYFLEGDQRWINTVAQALHLLSTLYGPLSQTCYGIGRCAKMAYEFVEGTWEEEEDGRNPRARREGFGHIFLLDRDVDFVDSTLLPKLVYEGLVDDTFRIKCGSVDFGPEVTSSDKSLKVLLNAEDKVFNEIRNEHFSNVFGFLSQKARNLQAQYDRRRGMDIKQMKNFVSQELKGLKQEHYLLSLHIGACESIMKKKTKQDFQELIKTEHALLEGFNIRESTSYIEEHIDRQVSPIESLRLMCLLSITENGLIPKDYRSLKTQYLQSYGPEHLLTFSNLRRAGLLTEQAPGDNLTAVESKVSKLVTDKAAGKITDALSSLAKRSQFRAISKKLNLIHRGDGEYDLKVPRDMAYSHSGAYVPLSCRIIEQVLERRSWQGLDEVVRLLNCSDFAFTDMTKEDKASSESLRLILVVFWGGCTFSEISALRFLGREKGYRFHFPXRQPVTNSARLMEAMSEVKA

SEQ ID NO: 51640 - protein, 72 aa, Homo sapiens
EKYIEEQLLQRIPEFNMAAFTTTLQHHKDEVAGDIFDMLLTFTDFLAFKEMFLDYRALPRTICGTRSYLQPM

SEQ ID NO: 51641 - protein, 89 aa, Homo sapiens
ELGRGRGWSLLGATAMDALEGESFALSFSSASDAEFDAVVGYLEDIIMDDEFQLLQRNFMDKYYLEFEDTEENKLIYTPMNVCCVLEID

SEQ ID NO: 51642 - protein, 197 aa, Homo sapiens
  misc_feature (1)...(197): Xaa = X or * as defined in Table 2
SGRALHASWAAGGVGAYSGRLRSDALEGESFALSFSSASDAEFDAVVGYLEDIIMDDEFQLLQRNFMDKYYLEFEDTEENKLIYTPIFNEYISLVEKYIEEQLLQRIPEFNMAAFHHNITPSVPVCRHHKDEVAWXQYSAMLAPPFTRFSWAFXRNVFGTYRGRKKEGRGLDLSSGLVVTSLCKSSSLPASQNNLRH

SEQ ID NO: 51643 - protein, 99 aa, Homo sapiens
  DOMAIN (24)..(44): DNAJ PROTEIN FAMILY SIGNATURE domain identified by eMATRIX, accession number PR00625A, p-value=7.300e-15, raw score of 12.84
  DOMAIN (13)..(80): DnaJ domain identified by PFam, accession name DnaJ, E-value= 6.2e-12, PFam score of 53.1
DPAAGIRHEGTRDCYEVLGVSRSAGKAEIARAYRQLARRYHPDRYRPQPGDEGPGRTPQSAEEAFLLVATAYETLKSSCICPRGLGVEWTPAEAPQLFL

SEQ ID NO: 51644 - protein, 472 aa, Homo sapiens
  DOMAIN (60)..(80): DNAJ PROTEIN FAMILY SIGNATURE domain identified by eMATRIX, accession number PR00625A, p-value=7.300e-15, raw score of 12.84
  DOMAIN (49)..(126): DnaJ domain identified by PFam, accession name DnaJ, E-value= 9.6e-13, PFam score of 55.8
  misc_feature (1)...(472): Xaa = X or * as defined in Table 2
MGAPLLSPGWGAGAAGRRWWMLLAPLLPALLLVRPAGALVEGLYCGTRDCYEVLGVSRSAGKAEIARAYRQLARRYHPDRYRPQPGDEGPGRTPQSAEEAFLLVATAYETLKIVFPELKIVKELTTLLMPSRAVWIIWSHKMSGGGAGPELDIGYVPVLLHMPKRIGSGMDTSRSTTVIPVEIRNKELIALLVKAQDRQEEETNYKLRPFNGLSYEVGYLVILQDEETRKDYDYMLDHPEEYYSHYYHYYSRRLAPKVDVRVVILVSVCAISVFQFFSWWNSYNKAISYLATVPKYRIQATEIAKQQGLLKKAKAKSKNNKVQRRNSXEEENIIKNIIKSKIDIKGGYQKPQICDLLLFQIILAPFHLCSYIVWHCRWIYNFNIKGKEYGEEERLYIIRKSMKMSKSQFDSLEDHQKETFLKRELWIKENYEVYKQEQEEELKKKLANDPRWKRYRRWMKNEGPGRLTFVDD

SEQ ID NO: 51645 - protein, 422 aa, Homo sapiens; identical to SEQ ID NO: 37905
  DOMAIN (54)..(75): 90 KD HEAT SHOCK PROTEIN SIGNATURE domain identified by eMATRIX, accession number PR00775A, p-value=1.692e-24, raw score of 9.90
  DOMAIN (52)..(422): Hsp90 protein domain identified by PFam, accession name HSP90, E-value=1e-204, PFam score of 693.5

SEQ ID NO: 51646 - protein, 246 aa, Homo sapiens
  DOMAIN (13)..(58): Heat shock hsp90 proteins family proteins domain identified by eMATRIX, accession number BL00298A, p-value=1.000e-40, raw score of 10.97
  DOMAIN (11)..(246): Hsp90 protein domain identified by PFam, accession name HSP90, E-value=2.1e-131, PFam score of 449.9
MPEEVHLGEKEVETFAFQAEIAQLMSLIINTFYSNKEIFLWELISNASDALDKIRYESLTDPSKLDSGKELKIDIIPNTQEHTLTLVDTGIGMTKADLINNLGTIAKFQDQTEYLEEMQVKEVVEKHSQFLGYPITLYLEKEREKEISDGKAEEEKGEKEEENKDDEEKPKIEDVGSDEEDDSGKDKKKKTKKIKEKYIDQEELNKTKPIWTRNTEDITQEEYGEFYKSLTNDWKDHLAVRYFSVE

SEQ ID NO: 51647 - protein, 142 aa, Homo sapiens
  DOMAIN (38)..(93): Heat shock hsp90 proteins family proteins domain identified by eMATRIX, accession number BL00298G, p-value=1.000e-40, raw score of 24.57
  DOMAIN (14)..(131): Hsp90 protein domain identified by PFam, accession name HSP90, E-value=1.8e-81, PFam score of 284.1
PGISFYRGVVTLGLPLNISREMLQQSKILKVIRKNIVKKCLELFSELAEDKENYKKFYEAFSKNLKLGIHEDSTNRRRLFELLRYHTSQSGDEMTSLSEYVSRMKETQKSIYYITGESKEQVANSAFVERVPLSHLAPPAGV

SEQ ID NO: 51648 - protein, 738 aa, Homo sapiens
  DOMAIN (13)..(58): Heat shock hsp90 proteins family proteins domain identified by eMATRIX, accession number BL00298A, p-value=1.000e-40, raw score of 10.97
  DOMAIN (11)..(738): Hsp90 protein domain identified by PFam, accession name HSP90, E-value=0, PFam score of 1248.7
  misc_feature (1)...(738): Xaa = X or * as defined in Table 2
MPEEVHHGEEEVETFAFQAEIAQLMSLIINTFYSNKEIFLRELISNASDALDKIRYESLTDPSKLDSGKELKIDIIPNPQEPYPGLWVDTGIGMTKADLINNLGTIAKSGTKAFMEALQAGADISMIGQFGDGFYSANLVAKKVVVITKHPDDEQYAWESSAGGSFTVRADHGEPIARGTQVILHLKEDQTEYLEERRVQEVVKKHSQFIGYPITLYLEKEREKEISDDEAEEEKGEKEEEDKDDEEKPKIEDVGSDEEDDSGKDKKKKTKKIKEKYIDQEELNKTKPIWTRNPDDITQEEYGEFYKSLTNDWEDHLAVKHFSVEGQLEFRALLFIPRRAPFDLFENKKKKNNIKLYVRRVFIMDSCDELVPEYLNFIPGVVDSEDLPLNIFRKMLQQNKILWKVIRKNIVKKCLELFSELAEDKENYKKFYEAFSKNLKLGIHEDSTNRRRLSELLRYHTSQSGDEMTSLSEYVSRMKETQMSIYYITGESKEQVANSAFVERVRKRGFEVVYMTEPIDEYCVQQLKEFDGKKLVSVTKEGLELPEDEEEKKKMEESKAKFENLCKLMKEILDKKVEKVTISNRLVSSPCCIGHKHLGAGQALIERDHEKPRALRDHPPQGGIMMGKKAPXESPPDHPHFVETRAGRKADARQVMIRAVKDLWWVLLVXNPPLLSSGFSLEDPQTHTPNRIYRIKLTKLGLGIDEDEVAAEEPNAAVPDEIPPLEGDEDASRMEEVD

SEQ ID NO: 51649 - protein, 142 aa, Homo sapiens
MIEKVRLSAAKLLTEYGVSVLVLEARDRVGGRTYTIRNEHVDYVDVGGAYVGPTQNRILRLSKELGIETYKVNVSERLVQYVKLSSDGHPVSIIVSPYAVLVTILLNLLTRKPERAVLTTCYDTSTVPWLLFDGCSNWKTAI

SEQ ID NO: 51650 - protein, 435 aa, Homo sapiens
  DOMAIN (91)..(113): FLAVIN-CONTAINING AMINE OXIDASE SIGNATURE domain identified by eMATRIX, accession number PR00757C, p-value=1.600e-30, raw score of 13.48
  DOMAIN (1)..(368): Flavin containing amine oxidase domain identified by PFam, accession name Amino_oxidase, E-value=1.2e-112, PFam score of 387.7
NEHVDYVDVGGAYVGPTQNRILRLSKELGIETYKVNVSERLVQYVKWPSQAILTPRMGGSGFPPNAFEGHRGGGGRTARRFAYLFVNINVTSEPHEVSALWFLWYVKQCGGTTRIFSVTNGGQERKFVGGSGQVSERIMDLLGDQVKLNHPVTHVDQSSDNIIIETLNHEHYECKYVINAIPPTLTAKIHFRPELPAERNQLIQRLPMGAVIKCMMYYKEAFWKKKDYCGCMIIEDEDAPISITLDDTKPDGSLPAIMGFILARKADRLAKLHKEIRKKKICELYAKVLGSQEALHPVHYEEKNWCEEQYSGGCYTAYFPPGIMTQYGRVIRQPVGRIFFAGTETATKWSGYMEGAVEAGERAAREVLNGLGKVTEKDIWVQEPESKDVPAVEITHTFWERNLPSVSGLLKIIGFSTSVTALGFVLYKYKLLPRS

SEQ ID NO: 51651 - protein, 906 aa, Homo sapiens
  DOMAIN (350)..(373): AROMATIC-RING HYDROXYLASE (FLAVOPROTEIN MONOOXYGENASE) SIGNATURE domain identified by eMATRIX, accession number PR00420A, p-value=6.750e-16, raw score of 14.78
  DOMAIN (358)..(823): Flavin containing amine oxidase domain identified by PFam, accession name Amino_oxidase, E-value=6.8e-102, PFam score of 351.9
  misc_feature (1)...(906): Xaa = X or * as defined in Table 2
VAVRLGSASQFPSGARPQLPRPPSWSSSIHSPISTTGLSESTDSDSKSGLRGFSAYNPSSRIPKSTTSSNSSDGAVTASNQDTGIPWVLVTGPTPPVNSPVESLQGSAFSSGFSTPRGLVKGPTLPPDSNLTSVSDYTWIFVRGPPIPNDLSQVSIQAPPTPSNTPECQYKGLPHPQCPASPGVWYQDHLYPITFPQCRHKHLLHPITSPQCQGRRLPPPQCLTLRGVQYKNLLHPVILSSCRHKDILNLITLAECQYKGPPRSQCPAPPGYQLKHQLRPWALPEYQQKVPGSPRVSKEGSAPPPGSPGELIEGSFPPFAVPTPVPTTQERVSQSMENQEKASIAGHMFDVVVIGGGISGLSAAKLLTEYGVSVLVLEARDRVGGRTYTIRNEHVDYVDVGGAYVGPTQNRILRLSKELGIETYKVNVSERLVQYVKGKTYPFRGAFPPVWNPIAYLDYNNLWRTIDNMGKEIPTDAPWEAQHADKWDKMTMKELIDKICWTKTARRFAYLFVNINVTSEPHEVSALWFLWYVKQCGGTTRIFSVTNGGQERKFAGGSGQVSERIMDLLRDQVKLNHTVTHVDQQGDNIIIETLNHEHYECKYVINAIPPTLTAKIHFRPELPAERNQLIQRLPMGAVIKCMMYYKEAFWKKRRDYCGCMIHWKMEGWLPISINLGMDTKPDGSLPAFMGLSFLPGKADRLAKLHKEIREERKICEALWPKWLGIPRKLYHPVHYEEKNWVLREQYFSGGCYTAYFPSWGIMDFNIGKGXFRSTPWGRDFSFFGGTETATKWSGYMGRGQFEAGERAAREVLNGLGKVTARKDIWVQEPESKDVPAVEITHTFLGKGTLPSCFWPCLKIIGIFPHRVTAPGGLCLLQIQAPATVFEVSVSYALCFTGFQYHQEEKY

SEQ ID NO: 51652 - protein, 214 aa, Homo sapiens
  misc_feature (1)...(214): Xaa = X or * as defined in Table 2
MLPWLNCITTGVPWTPTSKRWLRNSKVCDCCDKTPSNAFSLLSVPPTTTSPASLAWWSGCARLLDLGSSSLMMSPTMASPACRPWLGQRWRLISGSWAWAIVPVTXVPVPEPSWKNRAGXPGCSSYESPHMRRPTRPSASCLEWAPRASLAMHLMATSFCVLLSSARITSEKAPLSGEGIHKVKNWNPSFPPASPPFPMGSVTTAGPRTWMTLP

SEQ ID NO: 51653 - protein, 100 aa, Homo sapiens
RAQVLPARCYPGSTVSPLGFRGLPLPRGGSEIPRCATAATRPHRMPFLFYLFLQQQHRPHHWHGGAAVPGFWTSAHPACDVTYHGFPSLQALAGPPWQCI

SEQ ID NO: 51654 - protein, 2543 aa, Homo sapiens
  DOMAIN (1093)..(1110): PWWP domain proteins domain identified by eMATRIX, accession number PF00855, p-value=5.605e-18, raw score of 13.75
  DOMAIN (1088)..(1188): PWWP domain identified by PFam, accession name PWWP, E-value= 2.6e-38, PFam score of 140.7
MGVDFDVKTFCHNLRATKPPYECPVETCRKVYKSYSGIEYHLYHYDHDNPPPPQQTPLRKHKKKGRQSRPANKQSPSPSEVSQSPGREVMSYAQAQRMVEVDLHGRVHRISIFDNLDVVSEDEEAPEEAPENGSNKENTETPAATPKSGKHKNKEKRKDSNHHHHHNVSASTTPKLPEVVYRELEQDTPDAPPRPTSYYRYIEKSAEELDEEVEYDMDEEDYIWLDIMNERRKTEGVSPIPQEIFEYLMDRLEKESYFESHNKGDPNALVDEDAVCCICNDGECQNSNVILFCDMCNLAVHQECYGVPYIPEGQWLCRRCLQSPSRAVDCALCPNKGGAFKQTDDGRWAHVVCALWIPEVCFANTVFLEPIDSIEHIPPARWKLTCYICKQRGSGACIQCHKANCYTAFHVTCAQQAGLYMKMEPVRETGANGTSFSVRKTAYCDIHTPPGSARRLPALSHSEGEEDEDEEEDEGKGWSSEKVKKAKAKSRIKMKKARKILAEKRAAAPVVSVPCIPPHRLSKITNRLTIQRKSQFMQRLHSYWTLKRQSRNGVPLLRRLQTHLQSQRNCDQVGRDSEDKNWALKEQLKSWQRLRHDLERARLLVELIRKREKLKRETIKVQQIAMEMQLTPFLILLRKTLEQLQEKDTGNIFSEPVPLSEVTELDEVPDYLDHIKKPMDFFTMKQNLEAYRYLNFDDFEEDFNLIVSNCLKYNAKDTIFYRAAVRLREQGGAVLRQARRQAEKMGIDFETGMHIPHSLAGDEATHHTEDAAEEERLVLLENQKHLPVEEQLKLLLERLDEVNASKQSVGRSRRAKMIKKEMTALRRKLAHQRETGRDGPERHGPSSRGSLTPHPAACDKDGQTDSAAEESSSQETSKGLGPNMSSTPAHEVGRRTSVLFSKKNPKTAGPPKRPGRPPKNRESQMTPSHGGSPVGPPQLPIMSSLRQRKRGRSPRPSSSSDSDSDKSTEDPPMDLPANGFSGGNQPVKKSFLVYRNDCSLPRSSSDSESSSSSSSSAASDRTSTTPSKQGRGKPSFSRGTFPEDSSEDTSGTENEAYSVGTGRGVGHSMVRKSLGRGAGWLSEDEDSPLDALDLVWAKCRGYPSYPALIIDPKMPREGMFHHGVPIPVPPLEVLKLGEQMTQEAREHLYLVLFFDNKRTWQWLPRTKLVPLGVNQDLDKEKMLEGRKSNIRKSVQIAYHRALQHRSKVQGEQSTSTPALWASIPCPRSELRLDLVLPSGQSFRWREQSPAHWSGVLADQVWTLTQTEEQLHCTVYRGDKSQASRPTPDELEAVRKYFQLDVTLAQLYHHWGSVDSHFQEVAQKFQGVRLLRQDPIECLFSFICSSNNNIARITGMVERLCQAFGPRLIQLDDVTYHGFPSLQALAGPEVEAHLRKLGLGYRARYVSASARAILEEQGGLAWLQQLRESSYEEAHKALCILPGVGTKLLALGGANCSAEISAAKLRLPPRAVPRGSPEADHPHPTSSGFARGPPSSHPRQTPLHRIPISWAMSELKDCPLQFHDFKSVDHLKVCPRYTAVLARSEDDGIGIEELDTLQLELETLLSSASRRLRVLEAETQILTDWQDKKGDRRFLKLGRDHELGAPPKHGKPKKQKLEGKAGHGPGPGPGRPKSKNLQPKIQEYEFTDDPIDVPRIPKNDAPNRFWASVEPYCADITSEEVRTLEELLKPPEDEAEHYKIPPLGKHYSQRWAQEDLLEEQKDGARAAAVADKKKGLMGPLTELDTKDVDALLKKSEAQHEQPEDGCPFGALTQRLLQALVEENIISPMEDSPIPDMSGKESGADGASTSPRNQNKPFSVPHTKSLESRIKEELIAQGLLESEDRPAEDSEDEVLAELRKRQAELKALSAHNRTKKHDLLRLAKEEVSRQELRQRVRMADNEVMDAFRKIMAARQKKRTPTKKEKDQAWKTLKERESILKLLDGVPNALQLTFSNTRVERIEKRCLELFGRDYCFSVIPNTNGDICGHYPRHIVFLEYESSEKEKDTFESTVQVSKLQDLIHRSKMARCRGRFVCPVILFKGKVEMEKPSDGGADDAWADVEDVTEEDCALRSGDTHLFDKVRGYDIKLLRYLSVKYICDLMVENKKVKFGMNVTSSEKVDKAQRYADFTLLSIPYPDDDDGGDDVDDGDDDDDDNDAGDYVDAPLSIPDFLTHSLNIDWSQYQCWDLVQQTQNYLKLLLSLVNSDGQTDSKSLVAIRTSVGGALAQTSGNALAYGTKKAQEQSQDGLIHTSLKPTEILYLTVAYDWFLFGHMLVDWLSKGAEIFFFCFNFLKHITSEEFSALKTQRRKSLPARDGGFTLEDICMLRRKDRGSTTSLGSDFSLVMESSPGATGSFTYEAVELVPAGAPTQAAWRKSHSSSPQSVLWNRPQPSEDRLPSQQGLAEARSSSSSSSNHSDNFFRMGSSPLEVPKPRSVDHPLPGSSLSTDYGSWQMVTGCGSIQERAVLHTDSSLPFSFPDELPNSCLLAALSDRETRLQEVRSAFLAAYSSTVGLRAVAPSPSGAIGGLLEQFARGVGLRSISSNAL

SEQ ID NO: 51655 - protein, 80 aa, Homo sapiens
SMAGQCLPTQGWVPSFPQIPPLGKHYSQRWAQEDLLEEQKDGARAAAVADKKKGLMGPLPELDTKGRPLTSLPTPGQDLN

SEQ ID NO: 51656 - protein, 245 aa, Homo sapiens
  misc_feature (1)...(245): Xaa = X or * as defined in Table 2
QAHTRRAGGRAQVLPARCYPGSTVSPLGFRGLPLPRGGSEIPRCATAATRPHRMPFLFYLFLQQQHRPHHWHGGAAVPGFWTSAHPACDVTYHGFPSLQALAGPEVEAHLRKLGLGYRARYVSASARAILEEQGGLRLAAAATRVLIXGGPQGPLHPAWSGHQGGXLHLPDGPRQAPGCARGCPYVAHCPTXLQLAPYHVPGEGTEPPDQQGTGKLFPEPVGTLCWLGPSALSGHHHFYDLSRTP

SEQ ID NO: 51657 - protein, 356 aa, Homo sapiens
  misc_feature (1)...(356): Xaa = X or * as defined in Table 2
QAHTRRAGGRAQVLPARCYPGSTVSPLGFRGLPLPRGGSEIPRCATAATRPHRMPFLFYLFLQQQHRPHHWHGGAAVPGFWTSAHPACDVTYHGFPSLQALAGPEVEAHLRKLGLGYRARYVSASARAILEEQGGLRLAAAATRVLIXGGPQGPLHPAWSGHQGGXLHLPDGPRQAPGCARGCPYVAHCPTXLQLAPYHVPGEGTEPPDQQGTGKLFPEPVGTLCWLGPSGWIRCLLKNYRLLPLDLEGLLGNAFDGHQLLRPLIFCQDHLREGPPIGRGDSQGEELEPQLPSSLSSIPYGFCDHCWTKDVDDPPLVTHPSPGSRDGHMTQAWPVKVVSPLATVIGHVMQASLLAL

SEQ ID NO: 51658 - protein, 527 aa, Homo sapiens
  DOMAIN (241)..(412): HhH-GPD superfamily base excision DNA repair domain identified by PFam, accession name HhH-GPD, E-value=7.6e-48, PFam score of 172.4
TQKNTAVRAHRLWGREKISRKEGAGPTPQESRRIGARSGALMTRKGRGMQEVEELSETGKVVKQHRVGEALRVVVLVWAGSLGDRRGLVLGRRGYYGAVPAVEMPARALLPRRMGHRTLASTPALWASIPCPRSELRLDLVLPSGQSFRWREQSPAHWSGVLADQVWTLTQTEEQLHCTVYRGDKSQASRPTPDELEAVRKYFQLDVTLAQLYHHWGSVDSHFQEVAQKFQGVRLLRQDPIECLFSFICSSNNNIARITGMVERLCQAFGPRLIQLDDVTYHGFPSLQALAGPEVEAHLRKLGLGYRARYVSASARAILEEQGGLAWLQQLRESSYEEAHKALCILPGVGTKVADCICLMALDKPQAVPVDVHMWHIAQRDYSWHPTTSQAKGPSPQTNKELGNFFRSLWGPYAGWAQAGLLGNAFDGHQLLRPLIFCQDHLREGPPIGRGDSQGEELEPQLPSSLSSIPYGFCDHCWTKDVDDPPLVTHPSPGSRDGHMTQAWPVKVVSPLATVIGHVMQASLLAL

SEQ ID NO: 51659 - protein, 707 aa, Homo sapiens
  DOMAIN (394)..(419): Bromodomain proteins domain identified by eMATRIX, accession number BL00633B, p-value=3.348e-20, raw score of 13.82
  DOMAIN (364)..(451): Bromo domain identified by PFam, accession name bromodomain, E-value=6e-35, PFam score of 125.1
  misc_feature (1)...(707): Xaa = X or * as defined in Table 2
WTRMLFAVSCNDGECQNSNVILFCDMCNLAVHQECYGVPYIPEGQWLCRRCLQSPSRAVDCALCPNKGGAFKQTDDGRWAHVVCALWIPEVCFANTVFLEPIDSIEHIPPARWKLTCYICKQRGSGACIQCHKANCYTAFHVTCAQQAGLYMKMEPVRETGANGTSFSVRKTAYCDIHTPPGSARRLPALSHSEGEEDEDEEEDEGKGWSSEKVKKAKAKSRIKMKKARKILAEKRAAAPVVSVPCIPPHRLSKITNRLTIQRKSQFMQRLHSYWTLKRQSRNGVPLLRRLQTHLQSQRNCDQVGRDSEDKNWALKEQLKSWQRLRHDLERARLLVELIRKREKLKRETIKVQQIAMEMQLTPFLILLRKTLEQLQEKDTGNIFSEPVPLSEVPDYLDHIKKPMDFFTMKQNLEAYRYLNFDDFEEDFNLIVSNCLKYNAKDTIFYRAAVRLREQGGAVVRQARRQAEKMGIDFETGMHIPHSLAGDEATHHTEDAAEEERLVLLENQKHLPVEEQLKLLLERLDEVNASKQSVGRSRRAKMIKKEMTALRRKLAHQRETGRDGPERHGPSSRGSLTPHPAACDKDGQTDSAAEESSSQETSKGLGPNMSSTPAHEVGGEPQFCSPKRTRRQHGPPKRPGRPPKNRESQMTPSHGGSPVGPPRAPHHEFPASAQAGXEPQFCSPKRTRRQLDRPRGRAGPPKTGRAR

SEQ ID NO: 51660 - protein, 1173 aa, Homo sapiens
  DOMAIN (1006)..(1023): PWWP domain proteins domain identified by eMATRIX, accession number PF00855, p-value=5.605e-18, raw score of 13.75
  DOMAIN (6)..(190): Chloramphenicol acetyltransferase domain identified by PFam, accession name CAT, E-value=1.1e-132, PFam score of 454.2
  misc_feature (1)...(1173): Xaa = X or * as defined in Table 2
MENKITGYTTVDISQWHRKEHFEAFQSVAQCTYNQTVQLDITAFLKTVKKNKHKFYPAFIHILARLMNAHPEFRMAMKDGELVIWDSVHPCYTVFHEQTETFSSLWSEYHDDFRQFLHIYSQDVACYGENLAYFPKGFIENMFFVSANPWVSFTSFDLNVANMDNFFAPVFTMGKYYTQGDKVLMPLAIQRDSEDKNWALKEQLKSWQRLRHDLERARLLVELIRKREKLKRETIKVQQIAMEMQLTPFLILLRKTLEQLQEKDTGNIFSEPVPLSEVTELDEVPDYLDHIKKPMDFFTMKQNLEAYRYLNFDDFEEDFNLIVSNCLKYNAKDTIFYRAAVRLREQGGAVLRQARRQAEKMGIDFETGMHIPHSLAGDEATHHTEDAAEEERLVLLENQKHLPVEEQLKLLLERLDEVNASKQSVGRSRRAKMIKKEMTALRRKLAHQRETGRDGPERHGPSSRGSLTPHPAACDKDGQTDSAAEESSSQETSKGLGPNMSSTPAHEVGGEPQFCSPKRTRRQHGPPKRPGRPPKNRESQMTPSHGGSPVGPPRAPHHEFPASAQAGXEPVPLSEVTELDEVPDYLDHIKKPMDFFTMKQNLEAYRYLNFDDFEEDFNLIVSNCLKYNAKDTIFYRAAVRLREQGGAVLRQARRQAEKMGIDFETGMHIPHSLAGDEATHHTEDAAEEERLVLLENQKHLPVEEQLKLLLERLDEVNASKQSVGRSRRAKMIKKEMTALRRKLAHQRETGRDGPERHGPSSRGSLTPHPAACDKDGQTDSAAEESSSQETSKGLGPNMSSTPAHEVGRRTSVLFSKKNPKTAGPPKRPGRPPKNRESQMTPSHGGSPVGPPQLPIMSSLRQRKRGRSPRPSSSSDSDSDKSTEDPPMDLPANGFSGGNQPVKKSFLVYRNDCSLPRSSSDSESSSSSSSSAASDRTSTTPSKQGRGKPSFSRGTFPEDSSEDTSGTENEAYSVGTGRGVGHSMVRKSLGRGAGWLSEDEDSPLDALDLVWAKCRGYPSYPALIIDPKMPREGMFHHGVPIPVPPLEVLKLGEQMTQEAREHLYLVLFFDNKRTWQWLPRTKLVPLGVNQDLDKEKMLEGRKSNIRKSVQIAYHRALQHRSKVQGEQSTPDKPPANVPFRGKHEQMEYGRNAQDGRQQLWRPAGRQSEERPLMS

SEQ ID NO: 51661 - protein, 413 aa, Homo sapiens
  DOMAIN (200)..(373): HhH-GPD superfamily base excision DNA repair domain identified by PFam, accession name HhH-GPD, E-value=4.8e-47, PFam score of 169.7
PPKGRGMQEVEELSETGKVVKQHRVGEALRVVVLVWAGSLGDRRGLVLGRRGYYGAVPAVEMPARALLPRRMGHRTLASTPALWASIPCPRSELRLDLVLPSGQSFRWWREQSPAHWSGVLADQVWTLTQTEEQLHCTVYRGDKSQASRPTPDELEAVRKYFQLDVTLAQLYHHWGSVDSHFQEVAQKFQGVRLLRQDPIECLFSFICSSNNNIARITGMVERLCQAFGPRLIQLDDVTYHGFPSLQALAGPEVEAHLRKLGLGYRARYVSASARAILEEQGGLAWLQQLRESSYEEAHKALCILPGVGTKVADCICLMALDKPQAVPVDVHMWHIAQRDYSWHPTTSQAKGPSPQTNKELGNFFRSLWEPYAGWAQATPPSLQVLFSADLRQSRHAQEPPAKRRKGSKGPEG

SEQ ID NO: 51662 - protein, 446 aa, Homo sapiens
  misc_feature (1)...(446): Xaa = X or * as defined in Table 2
SSEHPRELHRIPISWAMSELKDCPLQFHDFKSVDHLKVCPRYTAVLARSEDDGIGIEELDTLQLELETLLSSASRRLRVLEAETQILTDWQDKKGDRRFLKLGRDHEFGAPPKHGKPKKQKLEGKAGHGPGPCPGRPKSKNLQPKIQEYEFTDDPIDVPRIPKNDAPNRFWASVEPYCADITSEEVRTLEELLKPPEDEAEHYKIPPLGKHYSQRWAQEDLLEEQKDGARAAAVADKKKGLMGPLTELDTKDVDALLKKSEAQHEQPEDGCPFGALTQRLLQALVEENIISPMEDSPIPDMSGKESGADGASTSPRNQNKPFSVPHTKSLESRIKEELIAQALLXAGDLLAKDSEDEVLAELRKRQGELKALSAHNRTKKADLLRLAKEEVSRQELRQRVRRAEREGMDAFRKIHGLPGRRKRNSPPKKEKDQAWKNSXKEREEHP

SEQ ID NO: 51663 - protein, 75 aa, Homo sapiens
SRMATLIYVDKENGEPGTRVVAKDGLKLGSGPSIKALDGRSQVSTPRFGKTFDAPPALPKATRKALGTVNRATEK

SEQ ID NO: 51664 - protein, 226 aa, Homo sapiens
  misc_feature (1)...(226): Xaa = X or * as defined in Table 2
NNPEWRTLIYVDKENGEPGTRVVAKDGLKLGSGPSIKALDGRSQVSTPRFGKTFDAPTQPYLKLPRKALGTVNRTTEKSVKDPGDPSNKKQPKLFRPKKDGPEEGLLKAKKPLFPGLQDXCPIPEIRKIPFPFNPSXTLRSFXPCPEEHPDCGTFPLXVGVPLMIPLTRERELXKSWFQLGPPFHLWKDGPLPPWGIPICLQFSFQGISVRTWGVDLPPVCCDIDI

SEQ ID NO: 51665 - protein, 264 aa, Homo sapiens
  DOMAIN (111)..(240): Acetyltransferase (GNAT) family domain identified by PFam, accession name Acetyltransf, E-value=6.6e-09, PFam score of 43.0
  misc_feature (1)...(264): Xaa = X or * as defined in Table 2
RSVKKVGAQRPGSGGGWGGNEGWVPQATAPGWAYTHVLFLYLFVTTPISAALRADGFGDNPFYHCLVAEILPAPGKLLGKSTWPLEVHLSSRPQRSPHRLPEALLPFSLSQGHCVVGYGIYYFIYSTWKGRTIYLEDIYVMPEYRGYWAEAEAGVGAKHPTDPTVIPCPQSPAGVIFXSPSAQTIAIFCLFLSTTGQGIGSKIIKKVAEVALDKGCSQFRLAVLDWNQRAMDLYKALGAQDLTEAEGWHFFCFQGEATRKLAGK

SEQ ID NO: 51666 - protein, 204 aa, Homo sapiens
  misc_feature (1)...(204): Xaa = X or * as defined in Table 2
LPFARPWDFGPRQRGSGWLPCGSREAKEGDCGDILRLIRVKTAGPELAEFEKLFGSGERSVEEALESRLAFGDNPFYHLFWXAEILPAPGESYWGHCVVGYGIYYFIYSTWKGRTIYLEDIYVIAGNIGVQGIGSQKXSKKVAEVALGIRGCSPNFRLARPLDWNPEGPWDLYKAPRSPKIXRKLEGWHFFCFQGEATRKLAGK

SEQ ID NO: 51667 - protein, 88 aa, Homo sapiens
  misc_feature (1)...(88): Xaa = X or * as defined in Table 2
QAGFISARNITWRXANRRSTWRSYRRKSGRTANCPPISPPACSRCSAPIFIPKNGWWRAMVAPLKWPSTGAFNRLFVPLLTWWRSPDR

SEQ ID NO: 51668 - protein, 157 aa, Homo sapiens
  misc_feature (1)...(157): Xaa = X or * as defined in Table 2
HGPGTQQRPRSIWRMPQXARPGGRSLAVGGGPRPRAAGGFPXVASRARRCQRAHGCHCAFSPLSPALLSQDAGLCQSRPLLLGQRRCLSQEVWSGLGNVHFCQPPEDAATTPSCPEALTAQGQQASVCDRVSHRFSTWSMVRCSDRTEGQRLQTLGD

SEQ ID NO: 51669 - protein, 459 aa, Homo sapiens
  DOMAIN (339)..(442): Inward rectifier potassium channel domain identified by PFam, accession name IRK, E-value=0.028, PFam score of 8.9
MRGLCRVYERILFMPRPDYASRYAGEMRGLCRVYERILFMPRPDYASRYGEAWGCGDGCAYQSLPTSRPIPHCCCEPSPPQPGLLEGLLDKNKVAWVLALALWTRAGNMYCIPRRGDTGMTLALSPPFLPVEEALSDEVVRACTSRTIPFPGGALFIRPFMLLLDEPTNHLDLDACVWLEEELKTALFIRPFMLLLDEPTNHLDLDACVRMELEMQMQENRKKEQEKSKEKGKDEKEKKKGKEEKAKKGVRMELEMQMQENRKKEQEKSKEKGKDEKEKKKGKEEKAKKGEVDAVLQVLPSKCIPMICAGHEEYLRKSMLLSAIGKREVPIPEHIDIYHLTREMPPSDKTPLHCVMEVDTERAMLEKEAERLAHEDGKSMLLSAIGKREVPIPEHIDIYHLTREMPPSDKTPLHCVMEVDTERAMLEKEAERLAHEDAECEKLMELYEPWRSWMPTSER

SEQ ID NO: 51670 - protein, 551 aa, Homo sapiens
  DOMAIN (156)..(188): ABC transporters family proteins domain identified by eMATRIX, accession number BL00211B, p-value=7.000e-21, raw score of 13.37
  DOMAIN (38)..(518): ABC transporter domain identified by PFam, accession name ABC_tran, E-value=3.9e-74, PFam score of 259.7
AGVLASHPNSTDVHIINLSLTFHGQELLSDTKLELNSGRRYGLIGLNGIGKSMLLSAIGKREVPIPEHIDIYHLTREMPPSDKTPLHCVMEVDTERAMLEKEAERLAHEDAECEKLMELYERLEELDADKAEMRASRILHGLGFTPAMQRKKLKDFSGGWRMRVALARALFIRPFMLLLDEPTNHLDLDACVWLEEELKTFKRILVLVSHSQDFLNGVCTNIIHMHNKKLKYYTGNYDQYVKTRLELEENQMKRFHWEQDQIAHMKNYIARFGHGSAKLARQAQSKEKTLQKMMASGLTERVVSDKTLSFYFPPCGKIPPPVIMVQNVSFKYTKDGPCIYNNLEFGIDLDTRVALVGPNGAGKSTLLKLLTGELLPTDGMIRKHSHVKIGRYHQHLQEQLDLDLSPLEYMMKCYPEIKEKEEMRKIIGRYGLTGKQQVSPIRNLSDGQKCRVCLAWLAWQNPHMLFLDEPTNHLDIETIDALADAINEFEGGMMLVSHDFRLIQQVAQEIWVCEKQTITKWPGDILAYKEHLKSKLVDEEPQLTKELPTTC

SEQ ID NO: 51671 - protein, 648 aa, Homo sapiens
  DOMAIN (242)..(274): ABC transporters family proteins domain identified by eMATRIX, accession number BL00211B, p-value=7.000e-21, raw score of 13.37
  DOMAIN (123)..(605): ABC transporter domain identified by PFam, accession name ABC_tran, E-value=7.5e-63, PFam score of 222.2
  misc_feature (1)...(648): Xaa = X or * as defined in Table 2
NNSNLPLWVIIMPSDLAKKKAAKKKEAAKARQRPRKGHEENGDVVTEPQVAEKNEANGRETTREVDLLTKELEDFEMKKAAARAVTGVLASHPNSTDVHIINLSLTFHGQELLSDTKLELNSGRRYGLIGLNGIGIGKSMLLFAIGKREVPIPEHIDIYHLTREMPPSDKTPLHCVMEVDTERAMLENEAERLAHEDAECEKLMELYERLEELDADXAEMRASRILHGLGFTPAMQRKKLKDFSGGWRMRVALARALFIRPFMLLLDEPTNHLDLDACVWLEEELKTFKRILVLVSHSQDFLNGVCTNIIHMHNKKLKYYTGNYDQYVKTRLELEENQMKRFHWEQDQIAHMKNYIARFGHGSAKLARQAQSKEKTLQKMMASGLTERVVSDKTLSFYFPPCGKIPPPVIMVQNVSFKYTKDGPCIYNNLEFGIDLDTRVALVGPNGAGKSTLLKLLTGELLPTDGMIRKHSHVKIGRYHQHLQEQLDLDLSPLEYMMKCYPEIKEKEEMRKIIGRYGLTGKQQVSPIRNLSDGQKCRVCLAWLAWQNPHMLFLDEPTNHLDIETIDALADAINEFEGGMMLVSHDFRLIQQVAQEIWVCEKQTITKWPGDILAYKEHLKSKLVDEEPQLTKRTHNVCTLTLASLPRP

SEQ ID NO: 51672 - protein, 95 aa, Homo sapiens
FSLKRSFTSLISWIPRYFILFEAIVNGSSLMIWLSVCLLLVCKNACDFCTLILYPETLLKLLISLRRFWAEMMAFSRYTIMSSANRDNLTSSFPN

SEQ ID NO: 51673 - protein, 89 aa, Homo sapiens
  misc_feature (1)...(89): Xaa = X or * as defined in Table 2
DNPVVFVFGSVYMLDYVYXFSYVEPPLHPWDEAHLIMVDKLFDVLLDSVCQYFIEDFCINVNQGYWSKILFFCCISARLWYQDDAGLIK

SEQ ID NO: 51674 - protein, 50 aa, Homo sapiens
GVNFNLSCFLLWAFSAIHFPLHTALNVSQRFWYVVSLFSLVSKNIFISAF

SEQ ID NO: 51675 - protein, 37 aa, Homo sapiens
CWPHKMSLGGFPLFLLIGIISEGMVPVPPCTSGRIQL

SEQ ID NO: 51676 - protein, 46 aa, Homo sapiens
NLGETQQEEMFRPTFLGTLMQKDSTKCWQSESRSIPISYSTTIRQA

SEQ ID NO: 51677 - protein, 356 aa, Homo sapiens
  DOMAIN (157)..(202): kw TRANSCRIPTASE REVERSE II ORF2 domain identified by eMATRIX, accession number DM01354N, p-value=1.000e-40, raw score of 13.17
MGDFNTPLSILDRSMRQKVNKDIQEFNLSSAPSRPVCREKFIALNAHKRKQERSKIVTLTSQLKELEKQEQTHSKASRRQEITKIRAELKEIETQKTLQKISESRSWFFEKINKIDRPLARLIKKKREKNQIDAIKNDKGDIITTDPTEIQTTIREYYKHLYANKLENLEEMDKFLDTYTLPRLNQKEVESLNRPITGSEIVAIINSLPTTKSPGPDGFTAEFYQRYKEELRITYLGIQLTRDVKDHFKENYKPLLNAIKEDTNKWKNIPCSWVGRINIMKMAILPKVIYRFNAIPIKLPMTFFTELEKTTLKFIWNQKRARIAKSTLSQKNKAGGIMLPDFKLYYKATVTKTAWY

SEQ ID NO: 51678 - protein, 396 aa, Homo sapiens; identical to SEQ ID NO: 41360
  DOMAIN (28)..(83): kw TRANSCRIPTASE REVERSE II ORF2 domain identified by eMATRIX, accession number DM01354Q, p-value=1.000e-40, raw score of 9.23
  DOMAIN (1)..(230): Reverse transcriptase domain identified by PFam, accession name rvt, E-value=9.8e-11, PFam score of 49.1

SEQ ID NO: 51679 - protein, 76 aa, Homo sapiens
GVRKGSSFRFLPMASQISQHHLLNRESFPHCLFLSGLSKIRWLQMCGIVSEGSILFHWSTSLFWYQYHAVLVTIAL

SEQ ID NO: 51680 - protein, 63 aa, Homo sapiens
  misc_feature (1)...(63): Xaa = X or * as defined in Table 2
ICGVISEGSVLFHXSISLFWYQYHAVLVTDSLVVXFEVTXHDASSFVLLAXDRRPEGSSPKSP

SEQ ID NO: 51681 - protein, 214 aa, Homo sapiens
  misc_feature (1)...(214): Xaa = X or * as defined in Table 2
XISDLQPAIGSKVHHQRIRISHRRGHASLIGWQRRSTIWRCCCRWCRGRGGINICLRRRNNRILLRINSWCWRSYGRCLRVGCGSIHRRWRRGRCIRQTVAAAAMDALQVDEWYSRVRRAAPWKDLPRRVFDATLDMLSGRYPSGDFSAFRPKLVWNRETGILTARPGAQLLAVTSGGTIPDRGMYSVLLPEGEEKAGSRRVGELDEEMVYESR

SEQ ID NO: 51682 - protein, 309 aa, Homo sapiens
  DOMAIN (137)..(307): alpha/beta hydrolase fold domain identified by PFam, accession name abhydrolase, E-value=0.0011, PFam score of 14.5
  misc_feature (1)...(309): Xaa = X or * as defined in Table 2
MELTVNPGENVQKLLFNMGMHSVTDRYWRAASQLPAQYQDLTSIYDVYTVVALNTPRADDYHPVMVLCAKTDKAHRNVIHTSKLCFITLTPEISQRSHGKSSKRVFSCFPVFLLLKHRRIVAQKYAELAYDLFHLGFDVLIIDHRGQGRSGRLLADPHLGHVNRFNDYVDDLAAFWQQEVQPGPWRKRYILAHSMGGAISTLFLQRHPGVCDAIALTAPMFGIVIRMPSFMARQILNWAEAHPRFRDGYAIGTGRWRALPFAINVLTHSRQRYRRNLRFYADDPTIRVGGPTYHWVRESILAGEQVLAX

SEQ ID NO: 51683 - protein, 97 aa, Homo sapiens
FSLKRSFTSLVSWIPRYFILFEAIVNGSLLMIWLSVCLLLVYKNACDFCTLIFFLYPETLLKLLISLRRFWAEAVGFSRYTIMSSANRDNLTSSFPN

SEQ ID NO: 51684 - protein, 87 aa, Homo sapiens
  misc_feature (1)...(87): Xaa = X or * as defined in Table 2
CWKFWARANXAGGITLPDFKLYYKATVTKTAWKFHFTMFGVDLKETCTAPSLWKDLALNTVELVCKLCVRQVEGARQIFQLNCTVSE

SEQ ID NO: 51685 - protein, 264 aa, Homo sapiens
  DOMAIN (240)..(263): MITOCHONDRIAL CARRIER PROTEIN SIGNATURE domain identified by eMATRIX, accession number PR00926F, p-value=4.736e-13, raw score of 17.75
  DOMAIN (20)..(72): Helix-turn-helix domain identified by PFam, accession name HTH_3, E-value=1.6e-06, PFam score of 35.1
AMNTEATHDQNEALTTGARLRNAREQLGLSQQAVAERLCLKVSTVRDIEEDKAPADLASTFLRGYIRSYARLVHIPEEELLPGLEKQAPLRAAKVAPMQSFSLGKRRKKRDGWLMTFTWLVLFVVIGLSGAWWWQDRKAQQEEITTMADQSSAELSTPPATVGEVRLGGVDLGGGRTLEGPAGMQAHQPHGGKRACAPQTLINPMEVREHVPRRHASQCFWVKSGRDMGDPSGLVSLSSVTLSTILCQMASYPLTLVRTRMQAQ

SEQ ID NO: 51686 - protein, 183 aa, Homo sapiens
  misc_feature (1)...(183): Xaa = X or * as defined in Table 2
CWFSAGDGGLPGPDYGQDFAAHPAGAGALYKCRDLINDNILRTVSCQSHDDGDIRGMAFARQXQRPVQIDHNMARRGXXAATFQPINKTFSGIHWPHGMRTGGTNPNFENIECTNHIHTLGLPFSEVERNDCDGFNFQLHIFRQTRDLHTAPGRIGRLMLIEELLIDFVDGGKIIQIGDKHGH

SEQ ID NO: 51687 - protein, 127 aa, Homo sapiens
  misc_feature (1)...(127): Xaa = X or * as defined in Table 2
PSSEEFTGGPARGFPERARAQLTGRTPGQRTQLDNDLLTKSTPWRGVMGPTLLPGLLAGPFQPLGHTGPFYPQGFRWQKTHWVRLAQAHWQFXLGQFRGPKTADGGGSKGPGLSASHGAKHHVITYV

SEQ ID NO: 51688 - protein, 45 aa, Homo sapiens
VFCQHGQRRKATNHCRQHRQRDMPQIIGDFLIPRQRIKVSGNQAA

SEQ ID NO: 51689 - protein, 245 aa, Homo sapiens
NCPLCGADSLYTTDKGALRMTTQLEQAWELAKQRFAAMGIDVEEALRQLDRLPVSMHCWQGDDVSGFENPEGSLTGGIQATGNYPGKARNASELRADLEQAMRLIPGPKRRNLHAIYGSKVFAVAGCVVLMTTMPDSCNSWQKCRNKTMNKKIHSLALLVNLGIYGVAQAQEPTDTPVSHDDTIVVTAAEQNLQAPGVSTITADEIRKNPVARDVSKIIRTMPGVNLTGNSTSGQRGNNRQIDIR

SEQ ID NO: 51690 - protein, 469 aa, Homo sapiens
  DOMAIN (238)..(293): Sigma-54 interaction domain proteins ATP-binding region A proteins domain identified by eMATRIX, accession number BL00675B, p -value=1.000e-40, raw score of 24.07
  DOMAIN (152)..(383): Sigma-54 transcription factors domain identified by PFam, accession name sigma54, E-value=2e-146, PFam score of 499.8
MECDASALLRYDSRQFIPLAIDGLAKDVLGRRFALEGHPRLEAIARAGDVVRFPADSELPDPYDGLIPGQESLKVHACVGLPLFAGQNLIGALTLDGMQPDQFDVFSDEELRLIAALAAGALSNALLIEQLESQNMLPGDATPFEAVKQTQMIGLSPGMTQLKKEIEIVAASDLNVLISGETGTGKELVAKAIHEASPRAVNPLVYLNCAALPESVRKSELFGHVKGAFTGAISNRSGKFEMADNGTLFLDEIGELSLALQAKLLRVLQYGDIQRVGDDRCLRVDVRVLAATNRDLREEVLAGRFRADLFHRLSVFPLSVPPLRERGDDVILLAGYFCEQCRLRQGLSRVVLSAGARNLLQHYSFPGNVRELEHAIHRAVVLARATRSGDEVILEAQHFAFPEVTLPTPEVAAVPVVKQNLREATEAFQRETIRQALAQNHHNWAACARMLETDVANLHRLAKRLGLKD

SEQ ID NO: 51691 - protein, 135 aa, Homo sapiens
  misc_feature (1)...(135): Xaa = X or * as defined in Table 2
SLSIRLATAPCWLRYFASSRRFQPTRSAGSVTDSSVTASASSPGXRXNASPCRERSHRSSRGQARRSLHLWDRSDRXTLPCDHGRCCHANDQQVGFAGNYSTAGQTXRWTGFTAGHAGRDINKSADKLPATAGKR

SEQ ID NO: 51692 - protein, 1545 aa, Homo sapiens
  DOMAIN (221)..(260): kw TRANSCRIPTASE REVERSE II ORF2 domain identified by eMATRIX, accession number DM01354X, p-value=2.459e-36, raw score of 13.86
  DOMAIN (1228)..(1362): SIS domain identified by PFam, accession name SIS, E-value= 1.6e-27, PFam score of 104.9
MRVNDFNSSNGKDHHWEITNTFRYRINEHWLPYFELRWLDRNVEPYHREQNQIRIGTNNFGFACVIADCRQLDWRSRVLRQRKKRTMPDATKSKMSVTASPLLSLLALHNTPDGGIPTIGLPGYSAPSAGTAALNHSGKVDIFNKLHLFLFPHCIKRLAAFPELRPDELLHGTGQCERVVGVLYGAAKIRRIPSGEPDVSVSLLVHMRIWHTAQVIYRFNAIPIKLPMTFFTELEKTTFKFIWNQNRARIAKSILSQKNKAGGITLPDFKLYYKAIVTKTVCHTRTRKRTILGNNNRIDTNLGVPCLLADGSLAALLTSYHQVSIPLGIRKAVYNGSRFDVWSSAFIIIGYAIPAFLFAILLIVFFAGGSYFDLFPLRGLVSANFDSLPWYQKITDYLWHITLPVLATVIGGFAALTMLTKNSFLNSEQGQSVPLNTSTTTDPATTSTPPASVDTTATNTQTPAVTAPAPAVDPQQNAVVSPSQANVDTAATPAPTAATCCQQTLTRGETVNGDIFHTIRDPDVHHRWCAELLAKIGRNATAGFAVINPELANAVVGMGKHRHVAHWHYALCPDNCLWPESPRSANLPGFQNRKHHRPASSALKRVNDQVGAAPPRHQSPPPRNAVSLAPRPVPMSFTWENNRQIWFKVQDSQLMKYILYKGFIGIDGISLTVGEVMSSAISSWSRPAIPVQRRSVNDREVHLLVGRVEVNEQIEYLIHNPIRTRARPVNLGDNHHLLLAVRYRARITNLDESDVSAYSESPTGQTASNACGGTVRLWKAPYTIAHRASLSQGPDNFRACSAHGSSSPYYGVCFRKVHDEPLGGMTAPVHNPSVLRSFRNQSVAVPGSATHDPNIELGVAGLIGQIQHAFRCQRQHRRLTLHVVMFRVTWSSGRTGLGKRLFRTPYDNDDTGPYAFNKTHPKDNYTCTVLFIDDMSASGQSLDKAQDNYRQAMKKLSSGRGNVLAQAEAFRGLGVEIKREINPDLAEQAIRLQDCVFDTQETMTTTFTGTVSSANSGNYYTIFNTDTGAAFNNVSLAIGNYVVLAFSASAAQYEDGKQYNHRFRLKTLNYRFAAGALPAVAIKCRSAKFTATLQFPGNVRELEHAIHRAVVLARATRSGDEVILEAQHFAFPEVTLPTPEVAAVPVVKQNLREATEAFQRETIRQALAQNHHNWAACARMLETDVANLHRRAMSEALLNAGRQTLMLELQEASRLPERLGDDFVRAANIILHCEGKVVVSGIGKSGHIGKKIAATLASTGTPAFFVHPAEALHGDLGMIESRDVMLFISYSGGAKELDLIIPRLEDKSIALLAMTGKATSPLGLAAKAVLDISVEREGSRMTYATSAHQPGCGLLPRSMITPTFAARATAPGLLSLIRTHGELKRANSSSATSSATRSTSAKRAPSTWLTTVSAMSAASNDPRSKRGDFQPAHGAPNATTLLQGQQRGVPRAQTRGPKGNTGITPTGRRTRHGAIRDPIGRPEPPCSGAIGKRSSAQVQKVGKARTRPSQDTMFEYIPQRVIVRQHRWSRTKQRIGFDVYLDVNY

SEQ ID NO: 51693 - protein, 298 aa, Homo sapiens
  DOMAIN (110)..(151): kw TRANSCRIPTASE REVERSE II ORF2 domain identified by eMATRIX, accession number DM01354I, p-value=4.375e-39, raw score of 15.55
  misc_feature (1)...(298): Xaa = X or * as defined in Table 2
MGDFNTPLSTLDRSMRQKVNKDTQELNSALHQADLIDIYRTLHPKSTEYTFFSAPHHTYSKIDHILGSKALLSKCKRTEIITNYLSDHSAIKLELRIKNLTQNHSTTWKLNNLLLSDYWVHNEMKAEIKMFFETNENKDTTYQNLWDAFKAVCRGKFIALNAHKRKQERSKIDTLTSQLKELEKQEQTHSKASRRQEITKIRAELKEIETQKTLQKINESRSWFFERINKIDRPLARLIKKKREKNQIDTIKNDKGDITTDPTEYKLPSENTTNTSTQINXKIXKKWINSSTHTLSQD

SEQ ID NO: 51694 - protein, 179 aa, Homo sapiens
  misc_feature (1)...(179): Xaa = X or * as defined in Table 2
TPGLRQSSLSPSAFASQNAGVSGIGGFLVSLTSRMKPWTLAMFRCVWSFFLLVGSWSCWLQEXSCRPSQXVSQFLNSSASGVVCCSCLELFVPPGGFVVSLASRVKLQTFTVSVTAHKGGVDPKSEQQQDLVQKAKEHSFCSVEADLSGLPLLAGAACFYSLMEPHPHPADWSILQRAD

SEQ ID NO: 51695 - protein, 99 aa, Homo sapiens
  DOMAIN (42)..(92): Sodium:neurotransmitter symporter family proteins domain identified by eMATRIX, accession number BL00610A, p-value=8.843e- 24, raw score of 17.73
  DOMAIN (34)..(70): Sodium:neurotransmitter symporter family domain identified by PFam, accession name SNF, E-value=1.9e-26, PFam score of 99.0
GGMDSRVSGTTSNGETKPVYPVMEKKEEDGTLERGHWNNKMEFVLSVAGEIIGLGNVWRFPYLCYKNGGGEMRALVPPHPLLEGGYFHLLHLRPLWGVP

SEQ ID NO: 51696 - protein, 171 aa, Homo sapiens
LSFQIVRSSSCQMVLKPRSLPSSKPFHHSSHCHISREDKSPKEALGWLMGLGAVEQGVVLVGEARAAQEPMEGEGGSGMASCRFRALPHGKAAKAQREIEHSSCWPRLRAFRGGIRGGKDKNKRIWEDIGPGYCPIRLSTLDGSVRSNYSSSPRVQMQYALTRGIPTVESS

SEQ ID NO: 51697 - protein, 603 aa, Homo sapiens
  DOMAIN (66)..(109): Sodium:neurotransmitter symporter family proteins domain identified by eMATRIX, accession number BL00610E, p-value=1.000e- 40, raw score of 20.34
  DOMAIN (12)..(374): Sodium:neurotransmitter symporter family domain identified by PFam, accession name SNF, E-value=5e-184, PFam score of 624.8
PCHSALSSPLPHRDCIALCFLNSGTSFVAGFAIFSILGFMFQEQGVPISEVAESGPGLAFIAYPRAVVMLPFSPLWACCFFFMVVLLGLDSQFVCVESLVTALVDMYPHVFRKKNRREVLILGVSVISFLVGLIMLTEGGMYVFQLFDYYAASGMCLLFVAIFESLCVAWVYGAKRFYDNIEDMIGYRPWPLIKYCWLFLTPAVCTATFLFSLIKYTPLTYNKKYTYPWWGDALGWLLALSSMVCIPAWSLYRLGTLKGPFREVIIPVSIRMTKVAGTAGLSGNVGPRCDLSRIEELPDGGTRCGMDSRVSGTTSNGETKPVYPVMEKKEEDGTLERGHWNNKMEFVLSVAGEIIGLGNVWRFPYLCYKNGGVVGFYNSIKNIPILQRVILFVRIHNMLNKGQGVLAKCDAAKKIEEKEADAGSASVPGDVMRTKKLSFEGAWHPCLLVGLKLSDALELRGGFISARIAGPRAAESDSVGLERELRVCIANKLPGEADAAGPGTTFWKHCSMPITDGADAVEGRNTQEAFFRQLNPEAAFLHFMEMVDTNALHVHGIHTRKNHPGQKEAAHSQHGTFPIRWTLNLLKRTFQKGNRAEPNSPAM

SEQ ID NO: 51698 - protein, 139 aa, Homo sapiens
MKLRTLAVSATALKVARLEFVPFDVRMCSEFLSSGVKLQTFAVSVTALNALRLELFVPPGGLMVSLASGVKLQIFTVSVTAHKSSVDPKTLGCVDGTGRRGAGGGAHRGGLGRTGAHGGGGRLRHGGLQVSSPAPRKGS

SEQ ID NO: 51699 - protein, 539 aa, Homo sapiens
  DOMAIN (42)..(92): Sodium:neurotransmitter symporter family proteins domain identified by eMATRIX, accession number BL00610A, p-value=1.000e- 40, raw score of 17.73
  DOMAIN (34)..(475): Sodium:neurotransmitter symporter family domain identified by PFam, accession name SNF, E-value=5.1e-191, PFam score of 648.0
  misc_feature (1)...(539): Xaa = X or * as defined in Table 2
GGMDSRVSGTTSNGETKPVYPVMEKKEEDGTLERGHWNNKMEFVLSVAGEIIGLGNVWRFPYLCYKNGGGAFFIPYLVFLFTCGIPVFLLETALGQYTSQGGVTAWRKICPIFEGIGYASQMIVILLNVYYIIVLAWALFYLFSSFTIDLPWGGCYHEWNTGNWVDVVEHGGXGEWCGNGSNTPHVCRVTGWTWXSRWLKGMVWEWIQHTPCVQGTGWTWXSTWLKGPGNRVDVVEHVAEGNGVGMDPTHPTCAGNRVDVVEQVAEGNEHCMEFQKTNGSLNGTSENATSPVIEFWDSPPGPQFVCVECLVTASIDMFPRQLRKSGRRELLILTIAVMCYLIGLFLVTEGGMYIFQLFDYYASSGICLLFLSLFEVVCISWVYGADRFYDNIEDMIGYRPWPLVKISWLFLTPGLCLATFLFSLSKYTPLKYNNVYVYPPWGYSIGWFLALSSMVCVPLFVVITLLKTRGPFRKVGGVGESDLLKEGTERGWTWGRTHNWGQGADTNSECGAALQSHRILTRRTLKTSPVAFQKCSEKS

SEQ ID NO: 51700 - protein, 1143 aa, Homo sapiens
  DOMAIN (62)..(107): 2 kw FINGER SMCX SMCY YDR096W domain identified by eMATRIX, accession number DM01930E, p-value=1.000e-40, raw score of 15.41
  DOMAIN (762)..(817): PHD-finger domain identified by PFam, accession name PHD, E- value=2.9e-15, PFam score of 64.1
RRCYCGIWSRYLLKRLWKWISGEGWAEKDSARRRGICTFWLEFEVTCLSWNSLFYAHINVDISGMKVPWLYVGMCFSSFCWHIEDHWSYSINYLHWGEPKTWYGVPSHAAEQLEEVMRELAPELFESQPDLLHQLVTIMNPNVLMEHGVPVYRTNQCAGEFVVTFPRAYHSGFNQGYNFAEAVNFCTADWLPIGRQCVNHYRRLRRHCVFSHEELIFKMAADPECLDVGLAAMVCKELTLMTEEETRLRESVVQMGVLMSEEEVFELVPDDERQCSACRTTCFLSALTCSCNPERLVCLYHPTDLCPCPMQKKCLRYRYPLEDLPSLLYGVKVRAQSYDTWVSRVTEALSANFNHKKDLIELRVMLEDAEDRKYPENDLFRKLRDAVKEAETCASVAQLLLSKKQKHRQSPDSGRTRTKLTVEELKAFVQQLFSLPCVISQARQVKNLLDDVEEFHERAQEAMMDETPDSSKLQMLIDMGSSLYVELPELPRLKQELQQARWLDEVRLTLSDPQQVTLDVMKKLIDSGVGLAPHHAVEKAMAELQELLTVSERWEEKAKVCLQARPRHSVASLESIVNEAKNIPAFLPNVLSLKEALQKAREWTAKVEAIQSGSNYAYLEQLESLSAKGRPIPVRLEALPQVESQVAAARAWRERTGRTFLKKNSSHTLLQVLSPRTDIGVYGSGKNRRKKVKELIEKEKEKDLDLEPLSDLEEGLEETRDTAMVVAVFKEREQKEIEAMHSLRAANLAKMTMVDRIEEVKFCICRKTASGFMLQCELCKDWFHNSCVPLPKSSSQKKGSSWQAKEVKFLCPLCMRSRRPRLETILSLLVSLQKLPVRLPEGEALQCLTERAMSWQDRARQALATDELSSALAKLSVLSQRMVEQAAREKTEKIISAELQKAAANPDLQGHLPSFQQSAFNRVVSSVSSSPRQTMDYDDEETDSDEDIRETYGYDMKDTASVKSSSSLEPNLFCDEEIPIKSEEVVTHMWTAPSFCAEHAYSSASKSCSQVFFGKGSSTPRKQPRKSPLVPRSLEPPVLELSPGAKAQLEELMMVGDLLEVSLDETQHIWRILQATHPPSEDRFLHIMEDDSMEEKPTKSERKGLFREETETEARKGRATFWRRKTEVQGIKRKWTNLGKEGN

SEQ ID NO: 51701 - protein, 1923 aa, Homo sapiens
  DOMAIN (1197)..(1224): SODIUM/NEUROTRANSMITTER SYMPORTER SIGNATURE domain identified by eMATRIX, accession number PR00176C, p-value=1.000e-24, raw score of 10.84
  DOMAIN (298)..(1658): Sodium:neurotransmitter symporter family domain identified by PFam, accession name SNF, E-value=0, PFam score of 2456.9
  misc_feature (1)...(1923): Xaa = X or * as defined in Table 2
MEEKPLKVKGKDSSEKKRKRKLEKVEQLFGEGKQKSKELKKMDKPRKKKLKLGADKSKELNKLAKKLAKEEERKKKKEKAAAAKVELVKESTEKKREKKVLDIPSKYDWSGAEESDDENAVCAAQNCQRPCKDKVDWVQCDGGCDEWFHQVCVGVSPEMAENEDYICINCAKKQGPVSPGSHKAVITVVVKAVSYLKFEEESTSELMWLLAAFSSFWVVGIKALDFVWPLAREEKEIGDNKDLERNKIGVNMVTWQQLCKNKRVGGMDSRVSGTTSNGETKPVYPVMEKKEEDGTLERGHWNNKMEFVLSVAGEIIGLGNVWRFPYLCYKNGGGPVAPPCRCGLCPSWQAAKELNEAEEGGAFFIPYLVFLFTCGIPVFLLETALGQYTSQGGVTAWRKICPIFEAQFCSFPAGIGYASQMIVILLNVYYIIVLAWALFYLFSSFTIDLPWGGCYHEWNTGNRVDVVEPVAEGNGVGMDPTHPTCAGNRVDVVEPVAEGNGVGMDPTQPMCAGNRVDVVEHVAEGAGNRVDVVEHVAEGNGVGMDPTHPTCAGNRVDVVEQVAEGNEHCMEFQKTNGSLNGTSENATSPVIEFWERRVLKISDGIQHLGALRWELALCLLLAWVICYFCIWKGVKSTGKVVYFTATFPYLMLVVLLIRGVTLPGAAQGIQFYLYPNLTRLWDPQTAWRYRLLLPHVHAGYEGSGQALEPNCRSTTRVLEGFQCTFLIVWMDAGTQIFFSFAICLGCLTALGSYNKYHNNCYRDCIALCFLNSGTSFVAGFAIFSILGFMSQEQGVPISEVAESGPGLAFIAYPRAVVMLPFSPLWACCFFFMVVLLGLDSQFVCVESLVTALVDMYPHVFRKKNRREVLILGVSVVSFLVGLIMLTEGGMYVFQLFDYYAASGMCLLFVAIFESLCVAWVYGAKRFYDNIEDMIGYRPWPLIKYCWLFLTPAVCTATFLFSLIKYTPLTYNKKYTYPWWGDALGWLLALSSMVCIPAWSLYRLGTLKGPFREVIIPVSIRMTKVAGTAGLSGNVGPRCDLSRIEELPDGGTRFSVYSLESLALALVILPTQRGFPTHHTAMDGKVAVQECGPPAVSWVPEEGEKLDQEDEDQVKDRGQWTNKMEFVLSVAGEIIGLGNVWRFPYLCYKNGGGAFFIPYFIFFFVCGIPVFFLEVALGQYTSQGSVTAWRKICPLFQGIGLASVVIESYLNVYYIIILAWALFYLFSSFTSELPWTTCNNFWNTEHCTDFLNHSGAGTVTPFENFTSPVMEFWEXRRVLGITSGIHDLGSLRWEMALCLLLAWVICYFCIWKGVKSTGKVVYFTATFPYLMLVILVIRGVTLPGAYQGIIYYLKPDLFRLKDPQVWMDAGTQIFFSFAICQGCLTALGSYNKYHNNCYKDCIALCFLNSATSFVAGFVVFSILGFMSQEQGVPISEVAESGPGLAFIAFPKAVTMMPLSQLWSCLFFIMLIFLGLDSQFVCVECLVTASIDMFPRQLRKSGRRELLILTIAVMCYLIGLFLVTEGGMYIFQLFDYYASSGICLLFLSLFEVVCISWVYGADRFYDNIEDMIGYRPWPLVKISWLFLTPGLCLATFLFSLSKYTPLKYNNVYVYPPWGYSIGWFLALSSMVCVPLFVVITLLKTRGPFRKRLRQLITPDSSLPQPKQHPCLDGSAGRNFGPSPTREGLIAGEKETHLARNLQLAMPEPPSPSMGSCAARASPTSAAPCSRAPSPIDHPRAEKCGRTEPDWEAAPPVAPLKVCKHTNQHPVSSSGFVNAPIHTLYLASLVGTWRTFVSSSGVVNTPIKTLSKRTNQRSVKWTNRLSVKWTNQQDVGGASLATAGADGLSGLRNLLARDWEVTGGECKLPDDATDREGSLLPAKAESLQARVHPQGSALDGASFLPGRLQTFICDTGGHVAHPEEGE

SEQ ID NO: 51702 - protein, 407 aa, Homo sapiens
  misc_feature (1)...(407): Xaa = X or * as defined in Table 2
STSRALSGAQRFGRLIDHGARVPALLLLLLPLVHVSATTPEPRELDDEDFRCVCNFSEPQPDWSEAFQCVSAVEVEIHAGGLNLEPFLKRVDADADPRQYADTVKGFPRVRRASQVGAAQVPAQLLVGALRVLAYSRFKELTLEDLKITGTMPPLPLEATGLALSSLRLRNVSWATGRSWLAELQQWLKPGLKVLSIAQAHSPAFSCEQVRCFPGPSPAXDLSDNPGTGANAELMAALCPHKFPAIQNLALRNTGNGRRPQGVCAALAAAGVQPHSLDVSHNSLRANRNPSAPRCMWSNALNSPQICRFAGAGTGVPKGPAPAKLRVLRSSACNRLNRAPQPWTSLPEVDNLGQLDGNPFPGSPGTGPSPTEGSMNSGVVPSLCNVRTCRVGVSGTLVLLQGARGFA

SEQ ID NO: 51703 - protein, 1388 aa, Homo sapiens
  DOMAIN (1293)..(1318): Ubiquitin carboxyl-terminal hydrolases family 2 proteins domain identified by eMATRIX, accession number BL00972D, p-value= 7.750e-19, raw score of 22.55
  DOMAIN (1290)..(1350): Ubiquitin carboxyl-terminal hydrolase family domain identified by PFam, accession name UCH-2, E-value=1.1e-26, PFam score of 102.0
TITGSSPLAGGHHSTCRGRMDMVENADSLQAQERKDILMKYDKGHRAGLPEDKGPEPVGINSSIDRFGILHETELPPVTAREAKKIRREMTRTSKWMEMLGEWETYKHSSKLIDRVYKGIPMNIRGPVWSVLLNIQEIKLKNPGRYQIMKERGKRSSEHIHHIDLDVRTTLRNHVFFRDRYGAKQRELFYILLAYSEYNPEVGYCRDLSHITALFLLYLPEEDAFWALVQLLASERHSLPGFHSPNGGTVQGLQDQQEHVVPKSQPKTMWHQDKEGLCGQCASLGCLLRNLIDGISLGLTLRLWDVYLVEGEQVLMPITSIALKVQQKRLMKTSRCGLWARLRNQFFDTWAMNDDTVLKHLRASTKKLTRKQGDLPPPAKREQGSLAPRPVPASRGGKTLCKGYRQAPPGPPAQFQRPICSASPPWASRFSTPCPGGAVREDTYPVGTQGVPSLALAQGGPQGSWRFLEWKSMPRLPTDLDIGGPWFPHYDFERSCWVRAISQEDQLATCWQAEHCGEVHNKDMSWPEEMSFTANSSKIDRQKVPTEKGATGLSNLGNTCFMNSSIQCVSNTQPLTQYFISGRHLYELNRTNPIGMKGHMAKCYGDLVQELWSGTQKSVAPLKLRRTIAKYAPKFDGFQQQDSQELLAFLLDGLHEDLNRVHEKPYVELKDSDGRPDWEVAAEAWDNHLRRNRSIIVDLFHGQLRSQVKCKTCGHISVRFDPFNFLSLPLPMDSYMDLEITVIKLDGTTPVRYGLRLNMDEKYTGLKKQLRDLCGLNSEQILLAEVHDSNIKDFSSSPSTNGMFTLTTNGDLPKPIFIPNGMPNTVVPCGTEKNFTNGMVNGHMPSLPDSPFTGYIIAVHRKMMRTELYFLSPQENRPSLFGMPLIVPCTVHTQKKDLYDAVWIQVSWLARPLPPQEASIHAQDRDNCMGYQYPFTLRVVQKDGISCAWCPQYRFCRGCKIDCGEDRAFIGNAYIAVDWHPTALHLRYQTSQERVVDKHESVEQSRRAQAEPINLDSCLRAFTSEEELGESEMYYCSKCKTHCLATKKLDLWRLPPFLIIHLKRFQFVNDQWIKSQKIVRFLRESFDPSAFLVPRDPALCQHKPLTPQGDELSKPRILAREVKKVDAQSSAGKEDMLLSKSPSSLSANISSSPKGSPSSSRKSGTSCPSSKNSSPNSSPRTLGRSKGRLRLPQIGSKNKPSSSKKNLDASKENGAGQICELADALSRGHMRGGSQPELVTPQDHEVALANGFLYEHEACGNGCGDGYSNGQLGNHSEEDSTDDQREDTHIKPIYNLYAISCHSGILSGGHYITYAKNPNCKWYCYNDSSCEELHPDEIDTDSAYILFYEQQGIDYAQFLPKIDGKKMADTSSTDEDSESDYEKYSMLQ

SEQ ID NO: 51704 - protein, 320 aa, Homo sapiens
MGWQRHFQSSAVFMSCAQLFALMRYKPLWWSPADSLVKVCCICQFFYEFAVSIPGCGNLSLKKSDRTPAPMQRQIQDSTAMSWWRNNFWIILAVAIIVVSVGLGLILYCVCKKWEIAKPLKHKQVDEEKMYEFCRGCKIDCGEDRAFIGNAYIAVDWHPTALHLRYQTSQERVVDKHESVEQSRRAQAEPINLDSCLRAFTSEEELGESEMYYCSKCKTHCLATKKLDLWRLPPFLLSKPRILAREVKKVDAQSSAGKEDMLLSKSPSSLSANSSSSPKGSPSSSRKSGTSCPSSKNSSPNSSPRTEKRREKKKHKAKSL

SEQ ID NO: 51705 - protein, 439 aa, Homo sapiens
  DOMAIN (67)..(107): Lysyl oxidase  copper-binding region proteins domain identified by eMATRIX, accession number BL00926G, p-value=2.950e- 09, raw score of 12.21
  DOMAIN (61)..(117): Ubiquitin carboxyl-terminal hydrolase family domain identified by PFam, accession name UCH-2, E-value=7.7e-11, PFam score of 49.4
MRGGSQPELFTPQDHEVALANGFLYEHEACGNGCGDGYSNGQLGNHSEEDSTDDQREDTHIKPIYNLYAISCHSGILSGGHYITYAKNPNCKWYCYNDSSCERTIAKYAPKFDGFQQQDSQELLAFLLDGLHEDLNRVHEKPYVELKDSDGRPDWEVAAELRSQVKCKTCGHISVRFDPFNFLSLPLPMDSYMDLEITVIKLDGTTPVRYGLRLNMDEKYTGLKKQLRDLCGLNSEQILLAEVHDSNIKNFPQDNQKVHLSVSGFLCAFEIPVPSSPISASSPTQIDFSSSPSTNGMFTLTTNGDLPKPIFIPNGMPNTVVPCGTEKNFTNGVQALTPSEAICGHRDEALIQQDQCPCKRKHQKSDSLMLFPSLNAPRKGHLWGHSKKAAVCKPGGEPSPETSQKSANTLISGFQLQNNEKTNFCCVSTPVYGIFVTAA

SEQ ID NO: 51706 - protein, 1131 aa, Homo sapiens
  DOMAIN (66)..(113): Intermediate filaments proteins domain identified by eMATRIX, accession number BL00226D, p-value=5.979e-24, raw score of 19.10
MDTVPGVNLSWILNEMHDQDKKLVEKSYKDAKGCFFSMGEPSLIDPCLEVCYGTQLAQLQGLIRSMEQQLCELCCDAEHQDHEHQVLLDVKTRLEQEIATYSRLLEVEDAQQGPIVMRAMTSECHWCLAPIRSPDCVCVLRQLHTRSGIHKRFCGLKGFLPERHNPGQLIHQNQSGCCSRMYPFDRKLGISVALNIPGGRSYRDLWCLTAVHIHIPGIDHHRLFTLGRMDMVENADSLQAQERKDILMKYDKGHRAGLPEDKGPEPVGINSSIDRFGILHETELPPVTAREAKLIDRVYKGIPMNIRGPVWSVLLNIQEIKLKNPGRYQIMKERGKRSSEHIHHIDLDVRTTLRNHVFFRDRYGAKQRELFYILLAYSEYNPEVGYCRDLSHITALFLLYLPEEDAFWALVQLLASERHSLPAAWAPAALGAHKWADQAQVAASHHPVSPGPTPLPGDDQEAQHPPCSGRSVVASKSGLPFCTLAQEASRGTSSQAPGDVPVPPPQGKGRMISLGLTLRLWDVYLVEGEQVLMPITSIALKVQQKRLMKTSRCGLWARLRNQFFDTWAMNDDTVLKHLRASTKKLTRKQGDLPPPAKREQGSLAPRPVPASRGGKTLCKGYRQAPPGPPAQFQRPICSASPPWASRFSTPCPGGAVREDTYPVGTQGVPSLALAQGGPQGSWRFLEWKSMPRLPTDLDIGGPWFPHYDFEWSCWVRAISQEDQLATCWQAEHCGEVHNKDMSWPEEMSFTANSSKIDRQKVPTEKGATGLSNLGNTCFMNSSIQCVSNTQPLTQYFISGRHLYELNRTNPIGMKGHMAKCYGDLVQELWSGTQKSVAPLKLRRTIAKYAPKFDGFQQQDSQELLAFLLDGLHEDLNRVHEKPYVELKDSDGRPDWEVAAELRSQVKCKTCGHISVRFDPFNFLSLPLPMDSYMDLEITVIKLDGTTPVRYGLRLNMDEKYTGLKKQLRDLCGLNSEQILLAEVHDSNIKNFPQDNQKVQLSVSGFLCAFEIPVPSSPISASSPTQIETTLSLVLRILEKRAKMKIPQAYDAVLIFEFVDFSSSPSTNGMFTLTTNGDLPKPIFIPNGMPNTVVPCGTEKNFTNGMVNGHMPSLPDSPFTGYIIAVHRKMVS

SEQ ID NO: 51707 - protein, 1125 aa, Homo sapiens
  DOMAIN (254)..(272): Ubiquitin carboxyl-terminal hydrolases family 2 proteins domain identified by eMATRIX, accession number BL00972A, p-value= 7.120e-18, raw score of 11.93
  misc_feature (1)...(1125): Xaa = X or * as defined in Table 2
QGSKGTCHPQAQQPWDEGVWQEAPSQSEPWGQSQEPPTMPQRLPHARQHTPLPLGSADYRRVVSVRPQGPHRDPKDSRDAAKREQGSLAPRPVPASRGGKTLCKGYRQAPPGPPAQFQRPICSASPPWASRFSTPCPGGAVREDTYPVGTQGVPSLALAQGGPQGSWRFLEWKSMPRLPTDLDIGGPWFPHYDFERSCWVRAISQEDQLATCWQAEHCGEVHNKDMSWPEEMSFTANSSKIDRQKVPTEKGATGLSNLGNTCFMNSSIQCVSNTQPLTQYFISGRHLYELNRTNPIGMKGHMAKCYGDLVQELWSGTQKSVAPLKLRRTIAKYAPKFDGFQQQDSQELLAFLLDGLHEDLNRVHEKPYVELKDSDGRPDWEVAAEAWDNHLRRNRSIIVDLFHGQLRSQVKCKTCGHISVRFDPFNFLSLPLPMDSYMDLEITVIKLDGTTPVRYGLRLNMDEKYTGLKKQLSDLCGLNSEQILLAEVHGSNIKNFPXDNQKVRLSVSGFLCALEIPVPVSPISASSPTQTDFSFSPSTNEMFTLTTNGDLPRPIFIPNGMPNTVVPCGTDKNFTNGMVNGHMPSLPDSPFTGYIIAVHRKMMRTELYFLSSQKNRPSLFGMPLIVPCTVHTRKKDLYDAVWIQVSRLASPLPPQEASNHAQDCDDSMGYQYPFTLRVVQKDGNSCAWCPWYRFCRGLXIDCGEDRAFIGNAYIAVDWDPTALHLRYQTSQERVVDEHESVEQSRRAQAEPINLDSCLRAFTSEEELGENEMYYCSKCKTHCLATKKLDLWRLPPFLIIHLKRFQFVNDQWIKSQKIVKFPRESFDPSAFLVPRNPALWQHXPLTPQGDELSKPRILAREVKKVDVQSLAGEXDMLLSKSPSSLSANISSSPKGSPSSSRKSGTSCPSSKNSSPNXQPTGFWGRSKGRLRLPQIGSKNKPSSSKKNLDASKENGAGQICELADALSRGHMRGVGSQPELVTPQDHDVSLANGFLCEPEPCGNGCGDGSSNGQLGNPSEEARTDDQREDTHIXPIYNLXAISCHSEILSGGHYITYAKNPNCKWYCYNDSSCEELTRDEIDTDSAYILFYEQQGIDYAQFLPKTDGKKMADTSSTDEDSESGLYKK

SEQ ID NO: 51708 - protein, 85 aa, Homo sapiens [sequence omitted]

SEQ ID NO: 51709 - protein, 167 aa, Homo sapiens
  DOMAIN (115)..(130): G-PROTEIN BETA WD-40 REPEAT SIGNATURE domain identified by eMATRIX, accession number PR00320A, p-value=8.941e-10, raw score of 16.74
RIWTENGNLAITLCQHKGPIFALKWNKKGNYVLSAGVDKTTIIWDAHTGEAKQQFPFHSAPALDVDWQNNMTFASCSTDMCIHVCRLGCDHPVKTFQGHTNEVNAIKWDPSGMLLAVCSDDMTLKIWSMKQEVCIHDLQAHNKEIYTIKWSPTGPATSNPNSNIMLA

SEQ ID NO: 51710 - protein, 584 aa, Homo sapiens
  DOMAIN (430)..(445): G-PROTEIN BETA WD-40 REPEAT SIGNATURE domain identified by eMATRIX, accession number PR00320A, p-value=4.000e-13, raw score of 16.74
  misc_feature (1)...(584): Xaa = X or * as defined in Table 2
CRCHSELSGSSLXCCTRGIGGAIGAVGFRSQAASTLAGQPDGNGVCVHAGNSRIFVPLPVGLEVKGFSHSAFTFGIESHISQSNINGTLVPPSALISILQKGLQYVEAEISINKDGTVFDSRPIESLSLIVAVIPDVVQMRQQAFGEKLTQQQASAAATEASAMAKAATMTPAAISQQNPPKNREATVNGEENGAHEINNHSKPMEIDGDVEIPPNKATVLRGHESEVFICAWNPVSDLLASGSGDSTARIWNLNENSNGGSTQLVLRHCIREGGHDVPSNKDVTSLDWNSDGTLLAMGSYDGFARIWTENAPALDVDWQNNMTFASCSTDMCIHVCRLGCDHPVKTFQGHTFCTCIESICFWGGLRKLTTMTEGKRLRPKTFCSDGGALLPPAGRRPHLLTGPDIFFKRLSALFQNEVNAIKWDPSGMLLASCSDDMTLKIWSMKQDACVHDLQAHSKEIYTIKWSPTGPATSNPNSSIMLASASFDSTVRLWDVEQGVCTHTLMKHQEPVYSVAFSPDGKYLASGSFDKYVHIWNTQSGSLVHSYQGTGGIFEVCWNARGDKVGASASDGSVCILWQLSGKQ

SEQ ID NO: 51711 - protein, 549 aa, Homo sapiens
  DOMAIN (243)..(278): RECEPTOR INTERLEUKIN-1 PRECURSOR domain identified by eMATRIX, accession number PD02870D, p-value=3.202e-09, raw score of 15.74
MVIIQQVPTIIKQSKVQVAFPFDEYFQIECEAKGNPEPTFSWTKDGNPFYFTDHRIIPSNNSGTFRIPNEGHISHFQGKYRCFASNKLGIAMSEEIEFIVPKLEHIEQDERVYMSQKGDLYFANVEEKDSRNDYCCFAAFPRLRTIVQKMPMKLTVNSLKHANDSSSSTEIGSKANSIKQRKPKLLLPPTESGSESSITILKGEILLLECFAEGLPTPQVDWNKIGGDLPKGRETKENYGKTLKIENVSYQDKGNYRCTASNFLGTATHDFHVIVEDNISHELFTLHPEPPRWTKKPQSAVYSTGSNGILLCEAEGEPQPTIKWRVNGSPVDNHPFAGDVVFPREISFTNLQPNHTAVYQCEASNVHGTILANANIDVVDVRPLIQTKDGENYATVVGYSAFLHCEFFASPEAVVSWQKVEEVKPLEGRRYHIYENGTLQINRTTEEDAGSYSCWVENAIGKTAVTANLDIRNATKLRVSPKNPRIPKLHMLELHCESKCDSHLKHSLKLSWSKDGEAFEINGTEDGSICEWEFIHDLALCLPTVGVKE

SEQ ID NO: 51712 - protein, 88 aa, Homo sapiens
MEQNGPGLEYRVTWKPQGAPVEWEEETVTNHTLRVMTPAVYAPYDVKVQAINQLGSGPDPQSVTLYSGEDYPDTAPVIHGVDVINTTY

SEQ ID NO: 51713 - protein, 608 aa, Homo sapiens
MMRLDAIEHGWQKGIMAHRLKSLATESLGGNRLRSDLGKKTGTSGVQKSRKMGKNQEDEYMIISYTKERSKKKPGFGHRRLARRPAAGLMKHLRRGTFANATKKMCLGSADVPGPPEQNNDIITISVTDQTVHKDGNPFYFTDHRIIPSNNSGTFRITNEGHISHFQGKYRCFASNKLGIAMSEEIEFIVPSVSLEKCENKLIRNIGTKKQGTAIRIPENVEAALELRKQQKLEECGGFRRRENAIYEKKKNELGLSQESVADKMGMGQSGVGALFNGINALNAYNAALLAKILKVSVEEFSPSIAREIYEMYEAVSMQPSLRSEYEYPVFSHVQAGMFSPELRTFTKGDAERWAPSQASFTLPQALRAQGLLKEAEHVESQSAETVLTPDECQLLGYLDKGKRKRKEKAAMATTLPGSIRSRELIRDQSGHRASPLLQFGGMDARIAAAGFLDADGFALPVELREVVQPQAAAEPTREGIEPGVGEELQHEIPALEDHPAGVPENDSEAQPFIEGGGWASLGRSFRTPESRSEELVKKAIEGDALRIGSGDTVKHEEAVSPFAAKLFSNITGSQRYVLIAVRHTQPATVDESRKAAIFHHDIRQAGI

SEQ ID NO: 51714 - protein, 170 aa, Homo sapiens
TFEGANNFVGDPIVLPCNPPKGLPPLHIYWMNIELEHIEQDERVYMSQKGDLYFANVGRKRDSRNDYCCFAAFPRIKGLLYRKMPMRNLTVNSSNSIKAKENPKLLLASPLRSGSESSITILKGEILLLECFAEGLPTPQVDWNKIGGDLPKGREAKENYGKTLKIENVY

SEQ ID NO: 51715 - protein, 106 aa, Homo sapiens
  DOMAIN (80)..(100): BETA-3 ADRENERGIC RECEPTOR SIGNATURE domain identified by eMATRIX, accession number PR00563B, p-value=8.826e-09, raw score of 3.98
  misc_feature (1)...(106): Xaa = X or * as defined in Table 2
TYLAAGRTPTLDPWNQERCTMPSGSIWILETTHSSFGWVTVAHLSSDPKGCQFXVGSRIGEGSATDPAFCASCSATWTIRPSRSNGAXGVNGXXVCWLEPLAGPHR

SEQ ID NO: 51716 - protein, 588 aa, Homo sapiens
MNVALTHIDTHHAEFEMALQAALVWNTLRTAGGKKSVHLASALLVHEIIIDGANLTISNVTLEDQGIYCCSAHTALDSAADITQVTVLDVPDPPENLHLSERQNRSVRLTWEAGADHNSNISEYIVEFEGNKEEPGRWEELTRVQGKKTTVILPLAPFVRYQFRVIAVNEVGRSQPSQPSDHHETPPAAPDRNPQNIRVQASQPKEMIIKWEPLKSMEQNGPGLEYRVTWKPQGAPVEWEEETVTNHTLRVMTPAVYAPYDVKVQAINQLGSGPDPQSVTLYSGEDLPEQPTFLKVIKVDKDTATLSWGLPKKLNGNLTGYLLQYQIINDTYEIGELNDINITTPSKPSWHLSNLNATTKYKFYLRACTSQGCGKPITEESSTLGEGSVSLEKCENKLIRNIGTKKQGTAIRIPENVEAALELRKQQKLEECGGFRRRENANEQQGVTEEFKQQNEKLRFLLLKIVILAVAREMTWNGEGRDLSEPSLTVVFADLSSPAYSLHTTMAQEPGPGLFLSLSTIPWPISSIPMIHASVQVSWIPLLRNSLMVHIHSSLEQRNLKVHISKEQKKLNSVDSDLTDNPPTHTVN

SEQ ID NO: 51717 - protein, 480 aa, Homo sapiens
  DOMAIN (160)..(195): RECEPTOR INTERLEUKIN-1 PRECURSOR domain identified by eMATRIX, accession number PD02870D, p-value=3.202e-09, raw score of 15.74
MKHSKGQLPFSMARYLFSELEHIEQDERVYMSQKGDLYFANVEEKDSRNDYCCFAAFPRLRTIVQKMPMKLTVNSLKHANDSSSSTEIGSKANSIKQRKPKLLLPPTESGSESSITILKGEILLLECFAEGLPTPQVDWNKIGGDLPKGRETKENYGKTLKIENVSYQDKGNYRCTASNFLGTATHDFHVIVEDNISHELFTLHPEPPRWTKKPQSAVYSTGSNGILLCEAEGEPQPTIKWRVNGSPVDNHPFAGDVVFPREISFTNLQPNHTAVYQCEASNVHGTILANANIDVVDVRPLIQTKDGENYATVVGYSAFLHCEFFASPEAVVSWQKVEEVKPLEGRRYHIYENGTLQINRTTEEDAGSYSCWVENAIGKTAVTANLDIRNATKLRVSPKNPRIPKLHMLELHCESKCDSHLKHSLKLSWSKDGEAFEINGTEDGRIKSGKTLEEAVIIELSLEVFQQKEREEPSSRREVI

SEQ ID NO: 51718 - protein, 1233 aa, Homo sapiens
  DOMAIN (314)..(349): RECEPTOR INTERLEUKIN-1 PRECURSOR domain identified by eMATRIX, accession number PD02870D, p-value=3.106e-09, raw score of 15.74
  misc_feature (1)...(1233): Xaa = X or * as defined in Table 2
RAMEPLLLGRGLIVYLMFLLLKFSKAIEIPSSVQQVPTIIKQSKVQVAFPFDEYFQIECEAKGNPEPTFSWTKDGNPFYFTDHRIIPSNNSGTFRIPNEGHISHFQGKYRCFASNKLGIAMSEEIEFIVPSVPKFPKEKIDPLEVEEGDPIVLPCNPPKGLPPLHIYWMNIELEHIEQDERVYMSQKGDLYFANVEEKDSRNDYCCFAAFPRLRTIVQKMPMKLTVNSLKHANDSSSSTEIGSKANSIKQRKPKLLLPPTESGSESSITILKGEILLLECFLLKACQLPQVDWTKIGGDFPKGREAKENYGKTLKIENVSYQDKGNYRCTASNFLGTATHDFHVIVEEPPRRTKKPQSAVYSTGSNGILLCEAEGEPQPTIKWRVNGSPVDNHPFAGDVVFNREISFTNLQPNHTAVYQCEASNVHGTILANANIDVVDVRVPLIQTKDGENYALTVVGYSAFPXHCRSSFAFHPEAVVSWQKVEEVKPPEGRRYHISYENGTLQINRTTEEDAGSYSCWVENAIGKTAVTANLDIRNATKLRVSPKNPRIPKLHMLELHCESKCDSHLKHSLKLSWSKDGEAFEINGTEDGRIIIDGANLTISNVTLEDQGIYCCSAHTALDSAADITQVTVLDVPDPPENLHLSERQNRSVRLTWEAGADHNSNISEYIVEFEGNKEEPGRWEELTRVQGKKTTVILPLAPFVRYQFRVIAVNEVGRSQPSQPSDHHETPPAAPDRNPQNIRVQASQPKEMIIKWEPLKSMEQNGPGLEYRVTWKPQGAPVEWEEETVTNHTLRVMTPAVYAPYDVKVQAINQLGSGPDPQSVTLYSGEDYPDTAPVIHGVDVINSTLVKVTWSTVPKDRVHGRLKGYQINWWKTKSLLDGRTHPKEVNILRFSGQRNSGMVPSLDAFSEFHLTVLAYNSKGAGPESEPYIFQTPEGVPEQPTFLKVIKVDKDTATLSWGLPKKLNGNLTGYLLQYQIINDTYEIGELNDINITTPSKPSWHLSNLNATTKYKFYLRACTSQGCGKPITEESSTLGEGSKGIGKISGVNLTQKTHPVEVFEPGAEHIVRLMTKNWGDNDSIFQDVIETRGREYAGLYDDISTQGWFIGLMCAIALLTLLLLTVCFVKRDRGGKYSVKEKEDLHPDPEIQSVKDETFGEYSDSDEKPLKGSLRSLNRDMQPTESADSLVEYGEGDHGLFSEDGSFIGAYAGSKEKGSVESNGSSTATFPLRA

SEQ ID NO: 51719 - protein, 806 aa, Homo sapiens
  DOMAIN (598)..(629): Protein kinases ATP-binding region proteins domain identified by eMATRIX, accession number BL00107A, p-value=3.000e-19, raw score of 18.39
QAGAMASGSVAECLQQETTCPVCLQYFAEPMMLDCGHNICCACLARCWGTAETNVSCPQCRETFPQRHMRPNRHLANVTQLVKQLRTERPSGPGGEMGVCEKHREPLKLYCEEDQMPICVVCDRSREHRGHSVLPLEEAVEGFKEQIQNQLDHLKRVTRLKFTDFLAQGEQARAELLSLTHMEREKIVWEFEQLYHSLKEHEYRLLARLEELDLAIYNSINGAITQFSCNISHLSSLIAQLEEKHQQPTRELLQDIGDTLSKAERIRIPEPWITPPDLQEKIHIFAPKCLFLTESLKQFTEKMQSDMEKIQELREAQLYSGGSIVGGHEPGEPRGIKAGYGTCNCFPEEEKCFCEPEDIQDPLCDELCRTVIAAAVLFSFVVSVLLSAFCIHCYHKFAHKPPISSAEMTFRRPAQAFPVSYSSSGARRPSLDSMENQVSVDAFKILEDPKWEFPRKNLVLGKTLGEGEFGKVVKATAFHLKGRAGYTTVAVKMLKENASPSELRDLLSEFNVLKQVNHPHVIKLYGACSQDGPLLLIVEYAKYGSLRGFLRESRKVGPGYLGSGGSRNSSSLDHPDERALTMGDLISFAWQISQGMQYLAEMKLVHRDLAARNILVAEGRKMKISDFGLSRDVYEEDPYVKRSQGRIPVKWMAIESLFDHIYTTQSDVWSFGVLLWEIVTLGGNPYPGIPPERLFNLLKTGHRMERPDNCSEEMYRLMLQCWKQEPDKRPVFADISKDLEKMMVKRRDYLDLAASTPSDSLIYDDGLSEEETPLVDCNNAPLPRALPSTWIENKLYGRISHAFTRF

SEQ ID NO: 51720 - protein, 717 aa, Homo sapiens
  DOMAIN (445)..(467): Domain in SPla and the RYanodine Receptor domain identified by eMATRIX, accession number PF00622B, p-value=6.786e-14, raw score of 21.00
  misc_feature (1)...(717): Xaa = X or * as defined in Table 2
PSATLSCPTSVAASLGEPAVFPLSLRGHRRRHRPGHSKPSVRGRVWDTGPGGAALRPPGASQEQRTGESAGELGSVQSSAPGPMPVRPRRPGAMASGSVAECLQQETTCPVCLQYFAEPMMLDCGHNICCACLARCWGTEETNVSCPQCRETFPQRHMRPNRHLANVTQLVKQLRTERPSGPGGEMGVCEKHREPLKLYCEEDQMPICVVCDRSREHRGHSVLPLEEAVEGFKEQIQNQLDHLKRVKDLKKRRRAQGEQARAELLSLTQMEREKIVWEFEQLYHSLKEHEYRLLARLEELDLAIYNSINGAITQFSCNISHLSSLIAQLEEKQQQPTRELLQDIGDTLSRAERIRIPEPWITPPDLQEKIHIFAQKCLFLTESLKQFTEKMQSDMEKIQELREAQLYSVDVTLDPDTAYPSLILSDNLRQVRYSYLQQDLPDNPERFNLFPCVLGSPCFIAGETIIWEGRGWGDKAKWTIGVCXRLSCQEKGGVTSAPQNGFWAVSLWYGKEYWALTSPMTALPLRTPFQRVGIFLDYDAGEVSFYNVTERCHTPFTFSSCLPFGGLVRPLLSSLSYSGREKVQLPLINLPPXSGIDGGFLAHVGNHGSFPWKTFPFEGRVNSGPKGLLAVILRPGTRHLVCLANVLSKLGILNHVPRPCSGRHGCPCSLPSFFLPMQIVKCNEMYQDILEIKTRCPPPVFHTFLVLHIAGRDKEYG

SEQ ID NO: 51721 - protein, 356 aa, Homo sapiens
MVAARENEEDKKAESPDKTIRSHETYSLPREQYGGNCPHDSNYLPPGPSHNIMLPAYYMVTCHHMTVACPEITSIFKARKWRKEGALAVSVPLIGKAKAFLEACLANSCSYVIIQNCVICDLLAAKQANKPSLPVLYTLSSQATHEAVHLLCRMLVFDPSKRISAKDALAHPYLDEGRLRYHTCMCKCCFSTSTGRVYTSDFEPVTNPKFDDTFEKNLSSVRQVKGHFTLPTDGVAVCVMPPVGFLYLATAVILVLGSSAEFLVGGGCVVTSLTTAFSSGKCELQTKRSVTDPRDGKRVALKKMPNVFQNLVSCKRVFRELKMLCFFKHDNVLSALDILQPPHIDYFEEMYPNQGM

SEQ ID NO: 51722 - protein, 528 aa, Homo sapiens
  DOMAIN (267)..(294): Receptor tyrosine kinase class V proteins domain identified by eMATRIX, accession number BL00790N, p-value=5.659e-13, raw score of 13.25
  misc_feature (1)...(528): Xaa = X or * as defined in Table 2
MSLCGARANAKMMAAYNGGTSAAAAGHHHHHHHHLPHLPPPHLHHHHHPQHHLHPGSAAAVHPVQQHTSSAAAAAAAAAAAAAMLNPGQQQPYFPSPAPGQAPGPAAAAPAQVQAAAAATVKAHHHQHSHHPQQQLDIEPDRPIGYGAFGVVWSVTDPRDGKRVALKKMPNVFQNLVSCKRVFRELKMLCFFKHDNVLSALDILXPPHIDYFEEIYVVTELMQSDLHKIIVSPQPLSSDHVKVFLYQILRGLKYLHFRLGILHRDIKPGNLLVNSNCVLKICDFGLARVEELDESRHMTQEVVTQYYRAPEILMGSRHYSNAIDIWSVGCIFAELLGRRILFQAQSPIQQLDLITDLLGTPSLEAMRTACEGAKAHILRGPHKQPSLPVLYTLSSQATHXTGHLLFAECGFDPSKRISAKDALSHPYLDEGRLRYHTCMCKCCLSPSTGRVNTSDLEPVTNPKFDDTFEKNLSPVRQVKEIIHQFILEQQKGNRVPLWINPQSAVFKSFISSTVAQPSEMPPSPLVWE

SEQ ID NO: 51723 - protein, 188 aa, Homo sapiens
  DOMAIN (31)..(83): Histone H3 proteins domain identified by eMATRIX, accession number BL00322A, p-value=8.600e-32, raw score of 9.23
  misc_feature (1)...(188): Xaa = X or * as defined in Table 2
SYKSRLARKSTGGKAPRKQLAYKKPASQECGPLTGGVKKPHRYRPGTVAAPXNLDGYQKSTELMIRKLRFQRLVREIAQDFKTDLRFQSAVIRWLCRMASEAYLVWPFLKDTNLVCLSMPKRVTIYAKKTFQLSTPASRGERALRIHSWMGKHFILKKKKKKFLFFLLLVVLNVRYFFFHGVKRYLSI

SEQ ID NO: 51724 - protein, 119 aa, Homo sapiens; identical to SEQ ID NO: 50776

SEQ ID NO: 51725 - protein, 489 aa, Homo sapiens
  misc_feature (1)...(489): Xaa = X or * as defined in Table 2
MRNLRNIQKAKATINLGISFDEGLKGFMWSRIEAAPLPNTRWCLPHGYSGPANSGGCYYITTGMSCWLSDLYPRHDGVHVGLQGKDLEHDIPVDLGSRPTSVDPVSRSAPGPQGPKAPVDSGSRTTPANPGAGPSPVDPSSRPAPVASGFRLIMIDQNTKLIPVPGWPLRLRLKIYLSSRSASLDSGSRFAPVDTNFIPVPTDRGHSHAPEDPVDRLTSVDPTKEKNWMENEFDKLTEVGFRRSVITNFSELKEHVLTHRKEAKNLEKRLDEWLSRITCAEKSLNDLMELKTTVRELREAYTSFMSQFDQAEERISVIEDQINEIKLKSLQAQEDARHRNTDQRSSENRRSEPWSLEERKREQWNSLKQNADQQDTEAMSDYKRYSSETXRRRXLFCLLRKVHSKEGPXKKDQRETRNQKGLGFLRDRPQWVSGKMKQECLQLGTPWPXIIIGQWQYFPRDGMGVRTDFCRIFQRLARMRLCEGCLMNS

SEQ ID NO: 51726 - protein, 860 aa, Homo sapiens
  misc_feature (1)...(860): Xaa = X or * as defined in Table 2
MSPVTLWVRTSSRGEDRCGMCTPGRDTGFAPISGMCSKYRSCTINEDTGLGLAFTMPMSLDTKHIPNFGKVHGYIMRHHKNEDTIPWRRNTKKEEARGTQPLEADDQNPGWEDGKPGSLENEGRRSHRGNPAPDMPQPPKEDLFILPDEYKSCLRHKRSLLRSHRNEELNVETLVVVDKKMMQNHGHENITTYVLTILNMERILKKTSFTIIHPSAMERCPVLNLQIRDSLWNHCFSLATTVHRFHPVGRHALKKMYKLPSAYINVSITKYTQRFALTYISCVFHRNAAFVAVPGEGRCCAGVDVPAPMSLRSPGPHWPQEHGALWISCTVRGMASCLGQLCRVSMRVRANIGKVQKPRLRISNGKGLHTQSELSGSAYLEKGWRGAAPGLDSRNEKGTEGARDSGTPGRQSQTLQRGPPGPVPGSSKIAPQTLTRQGSMTASRKLVLLLPEFCERTGEQSGQLYPPSPLLVEWVMPAGTSSTVDPLLPELCRRWERQALSLCRLYRQRTSVSIKALCDHTETRSVALSTCQGLECNSSPARKQNWMENEFEELTEVGFRKSVITKFSKLKEHILTHRKEAKNLEKRLDEWLTRITSVEKSLNDLMELKTTVRKLHEAYTSFNSRFDQVEERILVIEHQINEIKQEDKVREKRVKRNEQSLQEIWDCVKRPNLCLIGVPESDGENGTKLENTLQDIIQENFPNLARQANIQIQEIQRTPQRYSLRRATPRHLIVRFTKVEMKEKMLRAAREKGRGYLPTKGKPFRLTTADLSAETLQARRTEWGPIFNILKEKNFQPRISYPAKLSFISEGEIKYFIDKQMLRDFVTTRACPXKSSLKEEALKHGKGNNRVPSHLQKFIA

SEQ ID NO: 51727 - protein, 343 aa, Homo sapiens
  DOMAIN (199)..(212): RNA methyltransferase trmA family proteins domain identified by eMATRIX, accession number BL01230B, p-value=6.797e-09, raw score of 11.62
RLCAFNKRMTFQFNFTIEDHLENELTPIRDGALTLDSSKELSVSESQKGEERDRKCSAEQFDLPQDHLWEHKSMENAAPSQDTDSPLSAASSSRNLEPHGKQPSLRAAKEHAMPKDLKKMLENKVIETLPGFQHVKLSVVKTILLKENFPGENIVSKSFSSHSDLITGVYEGGLKIWECTFDLLAYFTKAKVKFAGKKVLDLGCGSGLLGITAFKGGSKEIHFQDYNSMVIDEVTLPNVVANSTLEDEENDVNEPDVKRCRKPKVTQLYKCRFFSGEWSEFCKLVLSSEKLFVKYDLILTSETIYNPDYYSNLHQTFLRLLSKNGRVLLASKAHVQRNSLSRL

SEQ ID NO: 51728 - protein, 394 aa, Homo sapiens
  DOMAIN (206)..(219): RNA methyltransferase trmA family proteins domain identified by eMATRIX, accession number BL01230B, p-value=6.797e-09, raw score of 11.62
  misc_feature (1)...(394): Xaa = X or * as defined in Table 2
RLCAFNKRMTFQFNFTIEDHLENELTPIRDGALTLDSSKELSVSESQKGRKERDRKCSAEQFDLPQDHLWGNISSMGKWQAPSQGHRTSSTSVAASSSRNLEPHGKTALLAGAGQRSMAMPKRFXRRCLENXSPLETLPGFQHVKLSVVKTILLKENFPGENIVSKSFSSHSDLITGVYEGGLKIWECTFDLLAYFTKAKVKFAGKKVLDLGCGSGLLGITAFKGASKEIHFQDYNSMVIDEVTLPNVVANSTLEDGGKMDVKWSPDVEKMPGNPKVTQLYKCRFFSGEWSXVLXALYLSSEKLFVKYDPHSSPSETIYNPDYYSNLHQTFLRLLSKNGRVLLASKAHYFGVGGGVHLFQKFVEERDVFKTRILKIIDEGLKRFIIEITFKFPG

SEQ ID NO: 51729 - protein, 121 aa, Homo sapiens; identical to SEQ ID NO: 38336

SEQ ID NO: 51730 - protein, 125 aa, Homo sapiens; identical to SEQ ID NO: 41924

SEQ ID NO: 51731 - protein, 230 aa, Homo sapiens
MCPSEMKLPEERSGSNICCSAIFAVLQPLLVIPRQTWSGVDLQQTPTDLQLRVLFVRRKTNKQKGHPHQNPICMSQSSKTKARQASIQIQEIQRMPQRYSSSRATPRHIIVRFTKVRMKEKMLRAAREKGRVTHKGKPIRLTVDLSAETLQARREWGPIFNILKEKNFQPRISYPAKLSFISEGEIKSFTNKQMLRDFVTTRPALQELLKEALNMERNNQYQPLQKHAKL

SEQ ID NO: 51732 - protein, 238 aa, Homo sapiens; identical to SEQ ID NO: 42522

SEQ ID NO: 51733 - protein, 512 aa, Homo sapiens; identical to SEQ ID NO: 42050
  DOMAIN (421)..(462): kw TRANSCRIPTASE REVERSE II ORF2 domain identified by eMATRIX, accession number DM01354I, p-value=1.000e-40, raw score of 15.55

SEQ ID NO: 51734 - protein, 255 aa, Homo sapiens
MDNDFDELKEEGFRRLVITNFSELKKDVRTHRKEAENLEKRLDEWLTRINSVEKTLNNLMKLKTMAQELHDACTSFSSRFDQGDGENGTKLENILQDIIQGNFPKLARQANIQIQEIQRMPQRYSSRRATPRHIIVRFTKVEMKEKMLRAAREKGRVTHKGNPIRLTADLSAETLQARIEWGPIFNILKEKNFQPRISYPAKLSFISEGEIKSFTDKQMLRDFVTTRPALQELLKEALTKERNNWYQPLQKRAKL

SEQ ID NO: 51735 - protein, 324 aa, Homo sapiens
MGKKQNRKTGNSKTQSASPPPKERSSLPATEQSWMENDFDELREEGFRRSNYSELREDIQTKGKEVENFEKNLEECITRITNTEKCLKELMELKTKARELQRVSAMEDEMNEMKQEGKFREKRIKRNEQSLQEIWDYVKRPNLRLIGVPESDGENATKLGNTLQDIIQENFPNLARQANNVQIQEIQRTPQRYSSRRATPRHIIVRFTKVEMKEKMLRAAREKGRVTLKGKPIRLTVDLSAETLQARREWGPIFNILKGKNFQPRISYPAKLSFISEGEIKYFTDKQMLRDFVTTRPALKELLKEALNMERNNQYQPLQNHAKM

SEQ ID NO: 51736 - protein, 890 aa, Homo sapiens
  DOMAIN (478)..(526): Guanylate kinase proteins domain identified by eMATRIX, accession number BL00856C, p-value=1.675e-25, raw score of 29.21
VPSESERESVLGLLRGAARGICRERSGGDNASMPVLSEDSGLHETLALLTSQLRPDSNHKEEMGFLRDVFSEKSLSYLMKIHEKLRYYERQSPTPVLHSAVALAEDVMEELQAASVHSDERELLQLLSTPHLRAVLMVHDTVAQKNFDPVLPPLPDNIDEDFDEESVKIVRLVKNKEPLGATIRRDEHSGAVVVARIMRGGAADRSGLVHVGDELREVNGIAVLHKRPDEISQILAQSQGSITLKIIPATQEEDRLKESKVFMRALFHYNPREDRAIPCQEAGLPFQRRQVLEVVSQDDPTWWQAKRVGDTNLRAGLIPSKGFQERLPGRSVLGQRVAVVTSTVGCSPHIFWCVDCETCDCEGYLKGHYVAGLRRSFRLGCRERLGGSQEGKMSSGAESPELLTYEEVARYQHQPGERPRLVVLIGSLGARLHELKQKVVAENPQHFGVAVPRAPWDVKLQWAEDPGSECDKEDEEEENEGARFLEHGEYKENLYGTSLEAIQAVMAKNKVCLVDVEPEALKQLRTSEFKPYIIFVKPAIQEKRKTPPMSPACEDTAAPFDEQQQEMAASAAFIDRHYGHLVDAVLVKEDLQGAYSQLKVVLEKLSKDTHWPPLVIPRQTGSGVDLQQTPTDLQLRVLTVRRKTKKQKGHPHQNPTCTSPSSKTKVGERVSVIEDQMKEMKREKKFREKRVKRNEQSLQEIWDYVKRPNLRLIGVPESDGENGTKLENTLQDIMRENFPNRARQANIQIQEIQRMPQRYSSRRATPRHIIIRFTKVEMKEKMLRAAREKGWVTHKGKPIRLTADLLAETLQARREWEPIFNILKGKNFQPRISYPAKLNFISEGEIKSFTDKQMLRDFVITRPALQELLKEALNLERNNWYQPLQKHAKL

SEQ ID NO: 51737 - protein, 392 aa, Homo sapiens; identical to SEQ ID NO: 36517

SEQ ID NO: 51738 - protein, 275 aa, Homo sapiens; identical to SEQ ID NO: 45790

SEQ ID NO: 51739 - protein, 259 aa, Homo sapiens; identical to SEQ ID NO: 42054

SEQ ID NO: 51740 - protein, 297 aa, Homo sapiens
  DOMAIN (80)..(112): kw TRANSCRIPTASE REVERSE II ORF2 domain identified by eMATRIX, accession number DM01354K, p-value=1.882e-28, raw score of 9.35
  misc_feature (1)...(297): Xaa = X or * as defined in Table 2
IRLKNDHDGELRNKTICINRNLAEIKKFSENYENKETMYLNLWDVAKAVLRGQFIALNARIKKLEKSQVYNLISQLKELENQEQTNPKASRRQEITKIRAELKEVETWKTLKKINESGRGVDCSSDASNGTKPDGEXLXXVDKSRPSEARQANIHIQEIHGTPQRXSLRRATPRHIIVRFTKVEMKEKMLRAARKKGWVTHKGKPIRLTADLLAETLQARREWGPIFNILKEKNFQLRISYPAKLSFIREGEIKAFTEKQILRDFVTTRPALQELLKEALNMERNDRYQPLQKHAKL

SEQ ID NO: 51741 - protein, 420 aa, Homo sapiens; identical to SEQ ID NO: 43256

SEQ ID NO: 51742 - protein, 730 aa, Homo sapiens
  DOMAIN (404)..(442): Chloramphenicol acetyltransferase proteins domain identified by eMATRIX, accession number BL00100D, p-value=5.776e-26, raw score of 17.22
  misc_feature (1)...(730): Xaa = X or * as defined in Table 2
MRVEPHWDHLQTLDQSPRPCGFGAPRLQRPARLTWRLRSRHTMRLLRAPTAQHRRPPLAAPQAGPALCGPAQTRRHRSPLPTLGRKTKKTPMPERRHCTCAERFPSPTPELRFPEGPAATPSWMTSIRMASRRPYAPKPDGRKWPGVTSWLSLSSSDSSSPRLEEQSQIPYTGIQDLQAAGRGFRIHIQVVAAQNTDVDMAGTNVALGHTPEGKLTNTKDIHTKNPSVHHHHQRPKVDKTTKMGKKQNRKTGNSTKQSASPPPKECSSSPATEQSWMENDFDELREEGFRRSNYSELWQDIQTKGKEVENFEKNLEECITRITNTEKCLKELMELKTKARELWEECRSLRSRCDQLEEKVSAMEDEMNEMKREGKFREKRIKRNEQSFQRNRGLCEKTKSTSDWCTMFFVTANPWVSFTSFDLNVANMDNFFAPVFTMGKYYTQGDKVLMPLAIQVHHAVCDGFXGNSYDHDYEFELGTLLLGGLADVGLAVGQGQQEEFAGNELGFCRFRNHHQTGFSPAGANQRGPLAATLSGPGGEGQSAVARLTGEKKNHPGAQYANRLSPRVGRFINAAGTTGFPTGKRAVSATQLMDFADFGTTIKQDFRLLGQTSVDRLLQLSQGQAVKGNQLLPVSLVKRKTTLAPNTQTASPRALADSLMQLARQVSRLESGHDVENGTKLENTLQDIIQENFPNLARQANVQIQEIQRTPQRYSSRRATPSTPNCQIHQS

SEQ ID NO: 51743 - protein, 161 aa, Homo sapiens
  DOMAIN (48)..(100): Ribosomal protein S5 proteins domain identified by eMATRIX, accession number BL00585A, p-value=1.391e-40, raw score of 28.43
RSSLENRRDQLGRLVKDMKIKSLEEIYLFSLPIKESEIIDFFLGASLKDEVLKIMPVQKQTRAGQRTRFKAFVAIGDYNGHVGLGVKCSKEVATAIRGAIILAKLSIVPVRRGYWGNKIGKPHTVPCKVTGRCGSVLGRLIPAPRGTGIVSAPVPKKLLMM

SEQ ID NO: 51744 - protein, 302 aa, Homo sapiens
  DOMAIN (108)..(160): Ribosomal protein S5 proteins domain identified by eMATRIX, accession number BL00585A, p-value=1.000e-30, raw score of 28.43
  misc_feature (1)...(302): Xaa = X or * as defined in Table 2
ASFFSKKTSGFGGWGAGGPGDPGMGNHGGFRGGFSRGIRGWGHSRGQGPGQGRGAHRGKTKDKEWTSIPKLGHLVKDMKIKFLEEIYLFFLAIKEFEIIDFFLGASLKDEVLKIMPVQKQTHASQRTRLKGFIVIGDYNGHVGLGVKCSKEVATAIRGAIILGXLSIVPMCRGYWGSKIGKPHTVPCKVTGHCGSVLVHFIPAPRGTGIVSVPMPKKLLLMAGIYDCYARSCTATLGNFTKATFDAISKTYSYPTPNLWKETVFTKSPYEFRNSGQEFTDYLVKTHIRVSVQRTQAPAVATT

SEQ ID NO: 51745 - protein, 135 aa, Homo sapiens
  DOMAIN (45)..(96): DNA mismatch repair proteins mutL / hexB / PMS1 proteins domain identified by eMATRIX, accession number BL00058A, p-value= 5.615e-39, raw score of 20.73
STISCGGNFPIPRGGSGVASLERAESSSTEPAKAIKPIDRKSVHQICSGPVVPSLSTAVKELVENSLDAGATNIDLKLKDYGVDLIEVSGNGCGVEEENFEGLTLKHHTSKIQEFADLLSDVTISTCHVSAKVGT

SEQ ID NO: 51746 - protein, 43 aa, Homo sapiens
SCPQIIFLSSCLVHRGGACQTPTVGNRQTPTLGIHARPRRRAT

SEQ ID NO: 51747 - protein, 293 aa, Homo sapiens
KQLYTELLQEHGPQGLNELPAFIEMRDLARRFALSFGPQQLQNRDLVVMLHKEGIQFSLSELPPAGSSNQPPNLAFLELLSEFSPRLFHQDKQLLLSYLEKCLQHVSQAPGHPWGPVTTYCHSLSPVENTAETSPQVLPSSKRKRVEGPAKPNREDVSSSQEESLQLNSIPPTPTLTSTAVKSRQPLWGLKEMEEEDGSELDFAQGQPVAGTERSRFLGPQYFQTPHNPSGPGLGNQLMRLSLMEEDEEEELEIQDESNEERQDTDMQASSYSSTSERGLDLLDSTELDIEDF

SEQ ID NO: 51748 - protein, 167 aa, Homo sapiens
  misc_feature (1)...(167): Xaa = X or * as defined in Table 2
LDDLHKWFLSSFLLTAISIGIKFLLKIHISRGSGVLLQLLPGNPSPAAHGTEELEPKFLEQGYLRAVLPGPRVHATAXLEPTVTDQGYARAGLPIQEVEDVLFGVLVVLLHVIGQVAEDRNQVAAQGHHQESCPAQCWGDCTHLEIAGWRGIRRSDANPRSQRKGFG

SEQ ID NO: 51749 - protein, 367 aa, Homo sapiens
  misc_feature (1)...(367): Xaa = X or * as defined in Table 2
WTERRLGSVRGDRLRERSRPAVNRTPRMSRVPSGAPRGTPSRRWWMMKCWDHQPLGXIPAPHVGPLAGIRKKEWSDESEEEPEKELAPEPEETWVVEMLCGLKMKLKQQRVSPILPEHHKDFNSQLAPGVDPSPPHRSFCWKRKREWWDESEESLEEEPRKVLAPEPEEIWVAEMLCGLKMKLKRRRVSLVLPEHHEAFNRLLEDPVIKRFLAWDKDLRVSDKYLLAMVIAYFSRAGLPSWQYQRIHFFLALYLANDMEEDDEDPKQNIFYFLYGKTRSRIPLVRNRRFQLCRCLNPRARKNRSQIALFQKLRFQFFCSMSGRAWVSREELEENTGPRGDVDFQQELYSNANGRQQERGEEPFVQII

SEQ ID NO: 51750 - protein, 508 aa, Homo sapiens
  DOMAIN (94)..(145): DNA mismatch repair proteins mutL / hexB / PMS1 proteins domain identified by eMATRIX, accession number BL00058A, p-value= 5.125e-33, raw score of 20.73
LDWCLITMGESSRKPPTPTPEGPTVSVKQLFSTLPVRHKEFQRNIKKKRACFPFAFCRDCQFLEGSPAMLPVQPAKLTEPAKAIKPIDRKSVHQICSGPVVLSLSTAVKKIVGNSLDAGATNIDLKLKDYGMDLIEVSGNGCGVEEENFEGLSLSALKHHTSKIREFADLTRVETFGFQGKALSSLCALSDVTISTCHVSAKVGTRLVFDHDGKIIKKTPYPHPRGTTVSVKQLFSTLPVRHKEFQRNIKKKRACFPFAFCRDCQFLEGSPAMLPVQPAKLTEPAKAIKPIDRKSVHQICSGPVVLSLSTAVKKIVGNSLDAGATNIDLKLKDYGMDLIEVSGNGCGVEEENFEGLSLSALKHHTSKIREFADLTRVETFGFQGKALSSLCALSDVTISTCHVSAKVGTRLVFDHDGKIIKKTPYPHPRGTTVSVKQLFSTLPVRHKEFQRNIKKKRACFPFAFCRDCQFLEGSPAMLPVQPAKLTVTGELRACRSWKTREGITEAVG

SEQ ID NO: 51751 - protein, 264 aa, Homo sapiens; identical to SEQ ID NO: 30867

SEQ ID NO: 51752 - protein, 293 aa, Homo sapiens; identical to SEQ ID NO: 51747

SEQ ID NO: 51753 - protein, 76 aa, Homo sapiens
  misc_feature (1)...(76): Xaa = X or * as defined in Table 2
GHTASPPPRSPQAQGRAPSVAPPPTTPQICPTTPSSFSSKRTYAGGWDLPQGQADCXSPCGAQGGWVTLAVASASS

SEQ ID NO: 51754 - protein, 68 aa, Homo sapiens
GSSTCGRETERVVLKKRKRSPTHFQYRNSPTAEARPQLEPTQWGRRSHSPRPSAPLPCSCPQKSRKSV

SEQ ID NO: 51755 - protein, 445 aa, Homo sapiens; identical to SEQ ID NO: 30861

SEQ ID NO: 51756 - protein, 208 aa, Homo sapiens
  DOMAIN (19)..(70): DNA mismatch repair proteins mutL / hexB / PMS1 proteins domain identified by eMATRIX, accession number BL00058A, p-value= 1.000e-40, raw score of 20.73
SSTEPAKAIKPIDRKSVHQICSGPVVLSLSTAVKELVENSLDAGATNIDLKLKDYGVDLIEVSDNGCGVEEENFEGLISFTLKHHTCKIQEFADLTEVETFGFQGEALSSLCALSDVTISTCHASVKVGTRLVFDHDGKIIQETPYPHPRGTTVSVKQLFSTLPVRHKEFQRNIKKRACFPFAFCRDCQFPEASPAMLPVQPAELMAV

SEQ ID NO: 51757 - protein, 227 aa, Homo sapiens
  DOMAIN (101)..(152): DNA mismatch repair proteins mutL / hexB / PMS1 proteins domain identified by eMATRIX, accession number BL00058A, p-value= 5.125e-33, raw score of 20.73
GFTWYIGMAQPKQERVARARHQRSETARHQRSETAKTPTLGNRQTPTLGNRQTPRLGIHARPRRRATTSLLTLLRAFGKKTQSSTEPAKAIKPIDRKSVHQICSGPVVLSLSTAVKKIVGNSLDAGATNIDLKLKDYGMDLIEVSGNGCGVEEENFEGLSWDSTGVFDHDGKIIQKTPYPHPRGTTVSVKQLFSTLPVRHKEFQRNIKKPVGEKYMRSVDTQACSCI

SEQ ID NO: 51758 - protein, 440 aa, Homo sapiens
  misc_feature (1)...(440): Xaa = X or * as defined in Table 2
VKSRAALLGPGALSPLEVSRRRPWTERRLGSVRGDRLRERSRPAVNRTPRMSRVPSGAPRGTPSRRWWMMKCWDHQPLGXIPAPHVGPLAGIRKREWSDESEEEPEKELAPEPEETWVVEMLCGLKMKLKQQRVSSILPEHHKDFNSQLAPGVNPSPPHRSFCWKRKMEWWDQSEESLEEEPRKVLAPEPEEIWVAEMLCGLKMKLKRRRVSLVLPEHHEAFNRLLEDPVIKRFLAWDKDLRVSDKYLLAMVIAYFSRAGFPSWQYQRIHFFLALYLANDMEEDDEDSKQNIFHFLYRKNRSRIPLLRKRWFQLGHSMNPRARKNRSRIPLLRKRRFQLYRSTNPRARKNRSRIPLLCKRRFQLYRSMNSRARKNRSQIVLFQKRRFHFFCSMSCRAWVSPEELEENTGPRGDVDFQQELYSNANGRHQAGGEEPFVQII

SEQ ID NO: 51759 - protein, 884 aa, Homo sapiens
  DOMAIN (47)..(98): DNA mismatch repair proteins mutL / hexB / PMS1 proteins domain identified by eMATRIX, accession number BL00058A, p-value= 1.000e-40, raw score of 20.73
  misc_feature (1)...(884): Xaa = X or * as defined in Table 2
RSACGSPAWNFPSPRGGSGVASMERAESSSTEPAKAIKPIDQKSVHQICSGQVVLSLSTAVKELVENSLDAGATNIDLKLKDYGVDLIEVSDNGCGVEEENFEGLTLKHHTSKIHEFADLTQVETFGFRGEALSSLCALSDVTIFTCHASAKVGTRLMFDHNGKIIQKTPYPRPRGTTVSVQQLFSTLPVRHKEFQRNIKKEYAKMVQVLHAYCSFQQASVXVAPISLDKRKRQPVVCTGGSPSIKENIGSVFGQKQLQSLIPFVQLPPSDSVCEEYGLSCSDALHNLFYISGFISQCTHGVGRSSTDRQFFFINRRPCDPAKVCRLVNEVYHMYNRHQYPFVVLNISVDSECVDINVTPDKRQILLQEEKLLLAVLKTSLIGMFDSDVNKLNVSQQPLLDVEGNLIKMHAADLEKPMVEKQDQSPSLRTGEEKKDVSISRLREAFSLRHTTENKPHSPKTPEPRRSPLGQKRGMLSSSTSGAISDKGVLRPQKEAVSSSHGPSDPTDRAEVEKDSGHGSTSVDSEGFSIPDTGSHCSSEYAASSPGDRGSQEHVDSQEKAPETDDSFSDVDCHSNQEDTGCKFRVLPQPTNLATPNTKRFKKEEILSSSDICQKLVNTQDMSASQVDVAVKINKKVVPLDFSMSSLAKRIKQLHHEAQQSEGEQNYRKFRAKICPGENQAAEDELRKEISKTMFAEMEIIGQFNLGFIITKLNEDIFIVDQHATDEKYNFEMLQQHTVLQGQRLIAPQTLNLTAVNEAVLIENLEIFRKNGFDFVIDENAPVTERAKLISLPTSKNWTFGPQDVDELIFMLSDSPGVMCRPSRVKQMFASRACRKSVMIGTALNTSEMKKLITHMGEMDHPWNCPHGRPTMRHIANLGVISQN

SEQ ID NO: 51760 - protein, 58 aa, Homo sapiens
VSPRGICLLKSVQHLPLHSLCLSCSNMARRACFPFAFCRDCQFPEASPATLPVQPAEL

SEQ ID NO: 51761 - protein, 59 aa, Homo sapiens
VSAHGIWVVKKHAAPPASLSLSLLLHHGQKRACFPFAFCRDCQFLEGSPAMLPVQPAKL

SEQ ID NO: 51762 - protein, 1012 aa, Homo sapiens
  DOMAIN (213)..(252): DNA mismatch repair proteins mutL / hexB / PMS1 proteins domain identified by eMATRIX, accession number BL00058B, p-value= 6.586e-36, raw score of 16.83
MDVGWDLGEDCWQEHLHTAFSFDCWPCSQNGDRVPSVNPVGGGAPRSYLQVASAECWAAAPAVHVGEPVHAGGLHTERGADPVIGLYLVHRGGACQTPTVGNRQTPTLGIHARPRRRATTSLLTLLLAFGKNAVRTEPAKAIKPIDRKSVHQICSGPVVPSLSTAVKELVENSLDAGATNIDLKLKDKESGLIKVQANEWGVKEETSKGLLLKHHTSKIQEFADLPQVETFGFRGEALSSLCALSDVTISTCHVSAKVGTRLVFDHYGKIIQKTPYPHPRGMTVSVKQLFSTLPVHHKEFQRNIKKKRACFPFAFCRDCQFPEASPAMLPVQPAELAPLLPGRLCWSPRPLEKNKAMGRPLLLPLLPLLLPPAFLQPSGSTGSGPSYLYGVTQPKHLSASMGGSVEIPFSFYYPWELATAPDVRISWRRGHFHRQSFYSTRPPSIHKDYVNRLFLNWTEGQKSGFLRISNLQKQDQSVYFCRVELDTRSSGRQQWQSIEGTKLSITQGSSAAQASTRSAAPCSTAPGPIDRPRAEECGSKAQNWQAALPAAWSLGCKRKRECLDESDDEPEKELAPEPEETWVAETLCGLKMKAKRRRVSLVLPEYYEAFNRLLAPGVDPSPPRRSLGCKRKRECLDESDDEPEKELAPEPEETWVAETLCGLKMKAKRRRVSLVLPEYYEAFNRLLAPGVDPSPPRRSLGCKRKRECLDESDDEPEKELAPEPEETWVAETLCGLKMKAKRRRVSLVLPEYYEAFNRLLAPGVDPSPPRRSLGCKRKRECLDESDDEPEKELAPEPEETWVAETLCGLKMKAKRRRVSLVLPEYYEAFNRLLEDPVIKRFLAWDKDLRVSDKIPSEPTILGASPKTLPPASRICIRPSNTPPPRNFHMSTVTPMLSYLANDMEEDDEAPKQKIFYFLYGKTHSHIPLRPKHWFQLCRPMNPRARKNCSQIALFQKRRFQFFCSMRCRAWVSPEELEENTGPRGDVDFQQELYSSANGRHQEGGEEPFVQII

SEQ ID NO: 51763 - protein, 74 aa, Homo sapiens
  misc_feature (1)...(74): Xaa = X or * as defined in Table 2
ETGPPGSAPGRLEFTNIKRVVVPQERVELETLLVSYFSPRTPRRTPPPFPHPCSXEDNVITVFSSIKNGPGSSR

SEQ ID NO: 51764 - protein, 743 aa, Homo sapiens
  DOMAIN (147)..(198): DNA mismatch repair proteins mutL / hexB / PMS1 proteins domain identified by eMATRIX, accession number BL00058A, p-value= 8.902e-38, raw score of 20.73
  misc_feature (1)...(743): Xaa = X or * as defined in Table 2
HVSGYDDVPLGTLSLDIWPPALFSVVSFAAFFFTPPIEAVLKSFSCLLVWYIGMAQPKQERVARARHQRSETARHQRSETAKTPTLGNRQTPTLGNRQTPRLGIHARPRRRATTSLLTLLRAFGKKTQSSTEPAKAIKPIDRKSVHQICSGQVVLSLSTAVKKIVENSLDAGATNIDLKLKDYGMDLIEVSGNGCGVEEENFKGLTLKHHTSKIQEFADLTRVETFGFRGEALSSLCALSDVTISTCHVSAKVGTRLVFDHDGKIIQKTPYPHPRGTTVSVKQLFSTLPVRHKEFQRNIKKAQRPQARCYRCSXPNVSPGPGMAAASTLSAXPRSQSSYFISCKAEDNAICPIAEQKAEGKFSSRYRNHDSAENRRDGSMTRPRTDWTLKRACTEKRRPQHASSFEWRGHSLCWDREQRDAETLKMLLDSGLSVQKKTKDRTETRFGEMGQILGKIMMSHQPQPQEEQSPQRSTSGYPLQEVVDDEVSGPSAPGVDPSPPRRSLGWKRKRECLDESDDEPEKELAPEPEETWVAETLCGLKMKAKRRRVSLVLPEYYEAFNRLLEDPVIKRLLAWDKDLRVSDKIPSEPTILGASPKTLPPASRICIRPSNTPPPRNFHMSTVTPMLSYLANDMEEDDEAPKQNIFYFLYEETRSHIPLLRELWFQLCRYMNPRARKNCSQIALFRKYRFHFFCSMRCRAWVSLEELEENTGPRGDVDFQQELYSSANGRHQEGGEEPFVQII

SEQ ID NO: 51765 - protein, 429 aa, Homo sapiens
  DOMAIN (261)..(300): DNA mismatch repair proteins mutL / hexB / PMS1 proteins domain identified by eMATRIX, accession number BL00058B, p-value= 8.448e-36, raw score of 16.83
  misc_feature (1)...(429): Xaa = X or * as defined in Table 2
SCPQIIFLSSCLQVASAECWAAAPAVHVGEPVHAGGLHTERGADPVIGLYLVHRGGACQTPTIGSRQTPTLGIHARPRRRATTSLLTLLLAFGKNAVRCALIGPGSLTSRTRPLTEPLGEKERREVFFPPRPERVEHNVESSRWEPRRRGACGSRGGNFPSPRGGSGVASLERAESSSTEPAKAIKPIDRKSVHQICSGPVVPSLRPNAVKELVENSLDAGATNVDLKLKDYGVDLIEVSGNGCGVEEENFEGLTSLSALKHHTSKIREFADLTRVETFGFRGEALXASLCALSDVTISTCHVSAKVGTLTGVFDHDGKIIPENPPNPHPRGTTVSVKQLFSTLPVRHKEFQRNIKKKRACFPFAFCRDCQFPEASPAMLPVQPAELTPRSTPPHPCSLEDNVITVFSSVKNGPGSSKMICTNGSSPSS

SEQ ID NO: 51766 - protein, 130 aa, Homo sapiens; identical to SEQ ID NO: 50677

SEQ ID NO: 51767 - protein, 54 aa, Homo sapiens; identical to SEQ ID NO: 43361

SEQ ID NO: 51768 - protein, 64 aa, Homo sapiens
FLTLLSILGKNNDLLWEDYEEKLADQAVRTMEIYVAQFSEIKVLNVQNQGWVVDDPSRLENILG

SEQ ID NO: 51769 - protein, 137 aa, Homo sapiens
MPGARTSSSGASENHRARGQGGGPQGVGRMAEGKAGGAAGLFAKQVQKKFSRAQEKVLQKLGKAVETKDERFEQSASNFYQQQAEGHKLYKDLKNFLSAVKVMHESSKRVSETLQEIYSSEWDGHEELKAIVWVRVA

SEQ ID NO: 51770 - protein, 572 aa, Homo sapiens
  misc_feature (1)...(572): Xaa = X or * as defined in Table 2
GPQGVGRMAEGKAGGAAGLFAKQVQKKFSRAQEKVLQKLGKAVETKDERFEQSASNFYQQQAEGHKLYKDLKNFLSAVKVMHESSKRVSETLQFIYYSEWYGHEELKAIVWNNDLLWEDYEEKLADQAVRTMEIYVAQFSEIKERIAKRGRKLVDYDSARHHLEAVQNAKKKDEAKTAKAEEEFNKAQTVFEDLNQELLEELPILYNSRIGCYVTIFQNISNLRDVFYREMSKLNHNLYEVMSKLEKQHSNKVFVVKGLSSSSRRSLVISPGVRTATVSSPLTSPTSPSTLSLKSESESVSATEDLAPDAAQGEDNSEIKELLEEEEIEKEGSEAGSSEEDDPLPACNGPAQAQPSPTTERAKSQEEVLPSSTTPSPGGALSPSGQLSSSATEVVLRTRTASEGSERPKKTASIQRTSAPPRRPPPPRATASPRPCSGNIPSSPTASGGGSATSPRASLGTGTASPRTSLEIXPNPEPPEKPVRTPEAKENENIHNQNPEELCTSPTLMTSQVASEPGEAKKMEDKEKDNKLISADSSEGQDQLQVSMVPENNNLTAPEPQEEVSTSENPQL

SEQ ID NO: 51771 - protein, 510 aa, Homo sapiens
  DOMAIN (251)..(288): LBP / BPI / CETP family proteins domain identified by eMATRIX, accession number BL00400D, p-value=9.065e-13, raw score of 23.26
MAWASRLGLLLALLLPVVGASTPGTVVRLNKAALSYVSEIGKAPLQRALQVTVPHFLDWSGEALQPTRIRILNVHVPRLHLKFIAGFGVRLLAAANFTFKVFRAPEPLELTLPVELLADTRVTQSSIRTPVVSISACSLFSGHANEFDGSNSTSHALLVLVQKHIKAVLSNKLCLSISNLVQGVNVHLGTLIGLNPVGPESQIRYSMVSVPTVTSDYISLEVNAVLFLLGKPIILPTDATPFVLPRHVGTEGSMATVGLSQQLFDSALLLLQKAGALNLDITGQLVARQFPEPMPVVLKVRLGATPVAMLHTNNATLRLQPFVEVLATASNSAFQSLFSLDVVVNLRLQLSVSKVKLQGTTSVLGDVQLTVASSNVGFIDPSPQKSIGQLDKECQLSLQPGDVIGSSATIHPLVSRHAINMPPFYPAVSLSVCRSSASGSLLASPPVGHTTDQVRTLMGTVFEKPLLDHLNALLAMGIALPGVVNLHYVAPEIFVYEGYVVISSGLFYQS

SEQ ID NO: 51772 - protein, 363 aa, Homo sapiens
  DOMAIN (138)..(175): LBP / BPI / CETP family proteins domain identified by eMATRIX, accession number BL00400D, p-value=7.222e-12, raw score of 23.26
  misc_feature (1)...(363): Xaa = X or * as defined in Table 2
HPRDPEAPSGPLWSASLPALYSQGHANEFDGSNSTSHAVLVLVQKHIKAVLSNKLCLSTSSLVQGVNAHLGTLIWPQPRGYLSPRSAIPWFSVPTVTSGLHFPWEVQXLFLLSCWGKAHQSLPQRMPPLLCCQGMWVPEGSMATVGLSQQLFDSALLLLQKAGALNLDITGQLRSDDNLLNTSALGRLIPEVARQFPEPMPVVLKVRLGATPVAHGSTQTTATLRPASPFVGGSWATGPPNSAFPSPSSPCLVVVNLRTPASLSSKGEALREHVCAWWMSQLTVASSNVGFIDTDQVRTLMGTVFEKPLLDHLNGSLGHGELPSLVWVNLHYVAPEIFVYEGYVVISSGTLLPEPEAKTTGRP

SEQ ID NO: 51773 - protein, 570 aa, Homo sapiens
  DOMAIN (439)..(471): Cytochrome P450 cysteine heme-iron ligand proteins domain identified by eMATRIX, accession number BL00086, p-value=7.395e-13, raw score of 20.87
  misc_feature (1)...(570): Xaa = X or * as defined in Table 2
IAPSEVKEHKMVLEMLNPIHYNITSIVPEAMPAATMPVLLLTGLFLLVWNYEGTSSIPGPGYCMGIGPLISHGRFLWMGIGSACNYYNRVYGEFMRVWISGEETLIISKSSSMFHIMKHNHYSSRFGSKLGLQCIGMHEKGIIFNNNPELWKTTRPFLYERLCHAPASVRMVTVCAESLKTHLDRLEEVTTESGLCGTCLTLLRRVHGWDTSNTVFLGIPLEESAIVVKIQGYFDAWQALLIKPDIFFKISWLYKKYEKSVKDLKDAIEVLIAEKRRRISTEEKLEECMDFATELILAEKRGDLTRENVNQCILEMLIAAPDTMSVSLFFMLFLIAKHPNVEEAIIKEIQTVIGERDIKIDDIQKLKVMENFIYESMRYQPVVDLVMAQSLXEGXCXSMGYPVKKGTNIYSWNIGRVHRLXFFPKPNEFTLENFAKNVPYRYFQPFGFGPRGCAGKYLSAMVMMKAILVTLLRTDSTXRTLPGTSVFESIQEGYTTCPWHPDETKNMLEMDLYPKETSDRCLGTLRRKAGQYLTLGAFSPSVCSPTNHPILCPLVFILHSGTLSGPMAFL

SEQ ID NO: 51774 - protein, 83 aa, Homo sapiens
IVCKFSVSTHKNIRAKKPDERLPECGTQIRKDTLKRVRRTVLHYLCPPPSVPEIPAWRGDCSPVGKEGKCTPDLNPNIELRPV

SEQ ID NO: 51775 - protein, 186 aa, Homo sapiens
  misc_feature (1)...(186): Xaa = X or * as defined in Table 2
MQKQIISVTEVEWYPKYNSNMKEYWSTQNHQFEQLSTHKNIRAKKPDERLPECGTQIRKDTLKRPCPLDRPLWPHITAEQGSKPSTWPAPCDPIFXANIHLPSLHTGPCRSKVQAHSSRPGCQASSTCVPRLQDLPCXPRFRLTLVDQDARPAAPVYQGSRTYPADPDSRPAPVDSGCIISGQADW

SEQ ID NO: 51776 - protein, 107 aa, Homo sapiens
  DOMAIN (30)..(54): MYOGLOBIN SIGNATURE domain identified by eMATRIX, accession number PR00613B, p-value=8.200e-31, raw score of 9.02
EDCAMGLSDGEWQLVLNVWGKVEADIPGHGQEVLIRLFKGHPETLEKFDKFKHLKSEDEMKAPPCGMSSPWEPGVALGSLCSAWFGSELIVLSSKSQPNFFQPPNWL

SEQ ID NO: 51777 - protein, 334 aa, Homo sapiens
  DOMAIN (167)..(191): MYOGLOBIN SIGNATURE domain identified by eMATRIX, accession number PR00613B, p-value=2.216e-22, raw score of 9.02
  misc_feature (1)...(334): Xaa = X or * as defined in Table 2
WAFSITERREFQVYYNSCPSSSWIGDARAFSPPDPTGLYPIYSQDTQTFRLWLNYNTDFPGSPACKWQAMELLSPQSPFRVDRGEHLPFLVKGARYTLVPAGQEGALAAWLEALRGQLGRRGAVVSMMDAEGLERSSPDCAMGLSDGEWQLVLNVWGKVEADIPGHGQEVLIRLFKGHPETLEKFDKFTRHLKSEDEMKASEDLKKHMCHTVLTPLGVHILREKGHHXRQRFKPLGTSSHCHPSTKIPPLKVTLEFHLPGIAFIQVLAEQAIPGDFGAECPGAQLKQRPWELFRKNNGLPTYKEAGAFQGARALAGFPTPTHLGPPGFKKRAGV

SEQ ID NO: 51778 - protein, 55 aa, Homo sapiens
FGLLQTVHRQSLTVPELGEWMPQAHLSGPLWLHPDFSPRLQVHCKQLHWNYASYH

SEQ ID NO: 51779 - protein, 324 aa, Homo sapiens
  DOMAIN (70)..(121): SAR1 family proteins domain identified by eMATRIX, accession number BL01020C, p-value=6.400e-15, raw score of 15.35
MSPPGREQGLLLNLLRPSGLDNAGKTTILKKFNGEDIDTISPTLGFNIKTLEHRGFKLNIWDVGGQKSLRSYWRNYFESTDGLIWVVDSADRQRMQDCQRELQSLLVEEVGSSYPLCTWRFFSYLRIEQMYNLVLYRDIQFPDFCFNSNTDWSKGLKTHARFGNTSLHVAHTDSTNTTNFVDVWRGRTKSLACLLQLSSLTCIYTAGKMRLQDRIATFFFPKGMMLTTAALMLFFLHLGIFIRDVHNFCITYHYDHMSFHYTVVLMFSQVISICWAAMGSLYAEMTENKYVCFSALTILMLNGAMFFNRLSLEFLAIEYREEHH

SEQ ID NO: 51780 - protein, 56 aa, Homo sapiens
  misc_feature (1)...(56): Xaa = X or * as defined in Table 2
RKLPLAGLPCINRQHSXSNVNICFLTPVXKIQNXLQSEQFLPYPTIVIITLCFFAV

SEQ ID NO: 51781 - protein, 90 aa, Homo sapiens
  misc_feature (1)...(90): Xaa = X or * as defined in Table 2
GCAGPCLVNQMFGKQYYLGKSHHPSLVSLNRGAHCTVGKPQGPSGPXKLGYYFKVFPPCGXFWKYGPSWGMEERAWTGSPLGPGPPLKKV

SEQ ID NO: 51782 - protein, 212 aa, Homo sapiens
  DOMAIN (52)..(72): CYTOCHROME C1 SIGNATURE domain identified by eMATRIX, accession number PR00603B, p-value=9.877e-09, raw score of 12.08
  misc_feature (1)...(212): Xaa = X or * as defined in Table 2
NQGLRNLGLCRTCLVNKMFTSSILGKSHRHSLVSINQGNNALWKAAGPLPLKAGYCQGFSPCHSLKYGSWDEKDLTVPQPDTLKGSVLRWISKRGKPLAVEIEEGHCLCLPLGTECLGIKPPIVHLFNSEIGENRPYGGRXDMFCSNGCLGXFLXLPLRCLGGEKHKSGLHVHIPVIVPPLELNYDIDSFAHMFFVDLSLIITLLSCYIPFC

SEQ ID NO: 51783 - protein, 27 aa, Homo sapiens
QSPAPFPSNPFVTISAQGWPCWRRPWR

SEQ ID NO: 51784 - protein, 71 aa, Homo sapiens
  misc_feature (1)...(71): Xaa = X or * as defined in Table 2
MTVPSPIPVKSIRDDLCPGLAMLEEALAPMARVQQNRRSFTSACSKEASRPIFVSYAVPQTMQAPLESQEX

SEQ ID NO: 51785 - protein, 336 aa, Homo sapiens
  DOMAIN (134)..(150): PAPAIN CYSTEINE PROTEASE (C1) FAMILY SIGNATURE domain identified by eMATRIX, accession number PR00705A, p-value=6.538e- 18, raw score of 10.55
  misc_feature (1)...(336): Xaa = X or * as defined in Table 2
NMNLSLVLAAFCLGIASAVPKFDQNLDTKWYQWKATHRRLYGANEEGWRRAVWEKNMKMIELHNGEKYSQGKHGFTMAMNAFGDMTNEEFRQMMGCFRNQKFRKGKVFREPLFLDLPKSVDWRKKGYVTPVKNQKQCGSCWAFSATGALEGQMFRKTGKLVSLSEQNLVDCSRPQGNQGCNGGFMARAFQYVKENGGLDSEESYPYVAVDEICKYRPENSVANDTGFTVVAPGKEKALMKAVATVGPISVAMDAGHSSFQFYKSGIYFXPDCISKNLDQGVLVVGYVFEGANSNNSKYWLVKNSWGPEWGSNGYVKIAKDKNNHCGIATAASYPNV

SEQ ID NO: 51786 - protein, 81 aa, Homo sapiens
  misc_feature (1)...(81): Xaa = X or * as defined in Table 2
LWLSFLLMHWHXIPLAAVSVFTVSNPILDFSXIQLKTPKHFGNLGNTGFLGKQLRLLLRSLVSVSRLHCLLGYRRTQMPPL

SEQ ID NO: 51787 - protein, 251 aa, Homo sapiens
MGSWLQGLRAMVFALNYMVTRVRNKKDPPTTSGPQTHQPKKHLTNFKSETKETRFICGPKTPAPLMDWEGSLPLMFNHCRDTSLIIHPCFQGVRPCRDACLSPSPLAASPAFLGKGQVPLNPFFTLSGKSRFSGGGASTPTPSFHVSTPSLLFWGRGKYPSTPSSPLVASPAFLGKGQVPLNPFFTLSGKSRFSGEGAKAPETITDAELRVTLTVEAAVCSTIALSLGWEILPRHWGKEEVTKTIYYPVIP

SEQ ID NO: 51788 - protein, 113 aa, Homo sapiens
TAVFLTQSLFGGLFTRTRMKFGTMTRIRGDLPWEINPLSSCSLLHEKDPPTTSGPQTNQPKKHLTNFKSRKVERTKGLLKTHLTKLSHQLKKAWTILLPLSLLRIQACPRNAT

SEQ ID NO: 51789 - protein, 251 aa, Homo sapiens; identical to SEQ ID NO: 33436

SEQ ID NO: 51790 - protein, 126 aa, Homo sapiens
VVCPNGTHSGSRPVPAGTHRSSDLMLIYSHNYGQLLHGQYHCSGIGRSAPPRVPYRQWRYPRRRHGADELGDGMAFGQGHLCSRSGYRLGISDRGLHLFLPRLLFVRRRELGRRRACRRSANSSSC

SEQ ID NO: 51791 - protein, 147 aa, Homo sapiens
TALLLTQSLFGGLFTRTRMKFGAMTRIGDLPWEINPLSSCSLLCEKHPPTTSGPQTDQPKKHLTNFKSETKETCFIHEPKTLAPVTDWEGSLPLVFNHCRDGLSDHSATFQGCQTMQGCLPWSFTLSGKSRFPGAGASTPQPLLLHP

SEQ ID NO: 51792 - protein, 89 aa, Homo sapiens
  misc_feature (1)...(89): Xaa = X or * as defined in Table 2
TAMLLKQSLFGCLFTRTRMKFGAVTRIGDLPXETNPLSSCSLLRDKDPPTTSSPQTHQPKKHLTNFKSGCSSPGRARSQSFLSLCSSTL

SEQ ID NO: 51793 - protein, 74 aa, Homo sapiens
TAMLLTQSLFGGLFTRTRMKFGAVIRIGDLLWEINPLSSCSLLHEKDPPTTSGPQTDQPKKHLTNFKSSCSSPG

SEQ ID NO: 51794 - protein, 84 aa, Homo sapiens
NLVPRMKFGAVTRIGGDLPWENQSPVLLCSLLREKDPPTTSGPQTDQPKEHLTNFKSDKGDMFYPWTQNSSAGHGLGRQPSLGV

SEQ ID NO: 51795 - protein, 632 aa, Homo sapiens
  DOMAIN (241)..(284): kw TRANSCRIPTASE REVERSE II ORF2 domain identified by eMATRIX, accession number DM01354T, p-value=1.000e-40, raw score of 9.48
  misc_feature (1)...(632): Xaa = X or * as defined in Table 2
MQNALESLSNRIEQVEERNSELEDKFFELTQSNKDKEKRIRKYKQSLKEVWDYVKGPNLRIISVPEEEENSKSLENIFGEIIEENLPSLARHLDNQIQEAQRTLWKLIAKRSLPRHIVIRLSKVKTKERILRAVRQKHQVTHLTCKESYKLKVKGWKRHFMQMDTKNEQGIKNENHLIISIDVEKASDKIQQRFMIKTLSKIGIQGKYLNVIKAIYDKPTANITLNREKLESIPSEKLKAFPLRTGTRQGCPLSPLFFNTVLEVLARAIRQEKEIKGIQIGKEEVKLSLFADDMIMYLENPKDSSRKLLEWIKESNKVSGYKTHVHKSVALLYTKQXQAENQIKNRNPFAIAAKKKKKKKKKKKRNSRIYLTKESKDLYKENYKTLLKEIIDNMNKWKHIPCSWMGRISIVKKLXLQKAIYKLNAILIKIPPLLFTELEKTILKFIWKSNKSRIAKVILSKKNKSGGITLPDFKLYYTIRKINSKWIKDLNLRPETIQILEDNIGKTLLEIGLGKDFMTKNPKANAKKKTKINRWDLIKLKSFCTAKGTVSRVKRTHRVGENLPHYTSIHPTIYTIYTSDKGLISRIYNEFKQIVTRTTCVFLHPPHPKAKTTSYGDQLLGGNRMFPPPIVY

SEQ ID NO: 51796 - protein, 109 aa, Homo sapiens
  misc_feature (1)...(109): Xaa = X or * as defined in Table 2
MHKRASGPAWGWRGKAXSSKPLPPVGSVEPPVSSPSTSQAPLWKAXEARRFSXADLEPWRLSSQCMFWGRWCSQRSSLQXAGVHTGVDXGWPRXCTHLGAPAPIPQCSL

SEQ ID NO: 51797 - protein, 453 aa, Homo sapiens
MSHQPWQNHRPEKEQTSGNLRATVFRGTEATGHSSRQSGSLVPREQSEGQNHFPTGGSHCEASHQVPRPVSPKTRMLSHTEKWRHCFVLRADLEKPAEYSSMVRPICCRTPPMSSLPQGHLGHGLGHTQYGGTGALILQKGEIRVINQTTCENLLPQQITPRMMCVGFLSGGVDSCQVPPGQEGGRQFPLKETNNRKGRLPKRLRPHTWCCYSLECSSYSLRCTEDTWTEDQKVNGLEEGVEFLPVNNVKKVEKHGPGRWVVLAAVLIGLLLVLLGIGFLVWHLQYRDVRVQKVFNGYMRITNENFVDAYENSNSTEFVSLASKVKDALKLLYSGVPFLGPYHKESAVTAFSEGSVIAYYWSEFSIPQHLVEEAERVMAEERVVMLPRGAPLKSFVVTSVVAFPTDSKTVQRTQDTPTPLMPAASAAGDADSVLSLTFRSFDLASCDEPAATW

SEQ ID NO: 51798 - protein, 129 aa, Homo sapiens
  DOMAIN (2)..(37): Apple domain proteins domain identified by eMATRIX, accession number BL00495M, p-value=1.364e-11, raw score of 8.50
PAEYSSMVRPICLPDASHVFPAGKAIWVTGWGHTQYGGTGALILQKGEIRVINQTTCENLLPQQITPRMMCVGFLSGGVDSSSSSSSSSPSSVEADGRIFYAGVVSWGDGCAQRNKPGVYTRLPLFQDW

SEQ ID NO: 51799 - protein, 200 aa, Homo sapiens
  misc_feature (1)...(200): Xaa = X or * as defined in Table 2
GSVIAYYWSEFSIPQHLVEEAERVMAEERVFMLPPRARSLKSFVVTSVVAFRESEGQGWAWDWPPFHGVGLGPGPLQGTGTPRAQCPREKTTCWPGTSLXIIRKQEXGNGLYQEMLYSPSYSSATDSKTVQRTQDNSCSFGLHARGVELMRFTTPGFPDSPYPAHARCQWALRGDADSVLSLTFRSFDLASCDEARSDLV

SEQ ID NO: 51800 - protein, 362 aa, Homo sapiens
FRGTPVQRGGGWADLPGRCGELGRRLRSEEQARRVHKAPSDFGTGLKENTGKVNGLEEGVEFLPVNNVKKVEKHGPGRWVVLAAVLIGLLLVLLGIGFLVWHLQYRDVRVQKVFNGYMRITNENFVDAYENSNSTEFVSLASKVKDALLYSGVPFLGPYHKESAVTAFMWVWREGSVGCTPDWLGVGSGYSVWGTKREMVLEVLDWRAKEGPRCVLLEGSVIAYYWSEFSIPQHLVEEAERVMAEERVVMLPPRARSLKSFVVTSVVAFPTDSKTVQRTQDNSCSFGLHARGVELMRFTTPGFPDSPYPAHARCQWALRGDADSVLSLTFRSFDLASCDERGSDLVTVYNTLSPMEPHALVQ

SEQ ID NO: 51801 - protein, 932 aa, Homo sapiens
  DOMAIN (715)..(733): Kringle domain proteins domain identified by eMATRIX, accession number BL00021B, p-value=5.696e-17, raw score of 13.33
  misc_feature (1)...(932): Xaa = X or * as defined in Table 2
TGALILQKGEIRVINQTTCENLLPQQITPRMMCVGFLSGGVDSCQVPPGQEGGRQFPLKETNNRKGRLPKRLRPHTWCCYSLECSSYSLRCTEDTWTEDQKVNGLEEGVEFLPVNNVKKVEKHGPGRWVVLAAVLIGLLLVLLGIGFLVWHLQYRDVRVQKVFNGYMRITNENFVDAYENSNSTEFVSLASKVKDALKLLYSGVPFLGPYHKESAVTAFSEGSVIAYYWSEFSIPQHLVEEAERVMAEERVVMLPPRARSLKSFVVTSVVAFPTDSKTVQRTQDNSCSFGLHARGVELMRFTTPGFPDRPYPAHARCQRALRGDADSVLSLTFRSFDLASCDERGRHLVTVYNTLSPMEPHALVQLCGTYPPSYNLTFHSSQNVLLITLITNTERRHPGFEATFFQLPRMSSCGGRLRKAQGTFNSPYYPGHYPPQHXTSTWNIEVPNNQHVKVRFKFFYLLEPGVPAGTCPKDYVEINGEKYCGERSQFVVTSNSNKITVRFHSDQSYTDTGFLAEYLSYDSSDPCPGQFTCPHGAVVIRKELRCDGWADCTDHSDELNCSCDAGHQFTCKNKFCKPLFWVCDSVNECGDNSDEQGCICPAQTFRCSNGKCLSKSQQCNGKDDCGDGSDEASCPKVNVVTCTKHTYRCLNGLCLSKGNPECDGKEDCSDGSDEKDCDCGLRSFTRQARVVGGTDADEGEWPWQVSLHALGQGHICGASLISPNWLVSAAHCFIDDRRFMYSNPTQWNRAFLGLHDQSQRRPPWGCRKRRLKRIISHPFFNDFTFDYDIALLELEKPAEYSSMVRPICLPDASHVFPAGKAIWVTGWGHTQYGGTGALILQKGEIRVINQTTCENLLPQQITPRMMCVGFLSGGVDSCQGDSGGPLSSVEADGRIFQAGVVSWEAGCVQRNKPGVYTRLPLFRDWIKENTGV

SEQ ID NO: 51802 - protein, 118 aa, Homo sapiens
GRRTECGLLLDGAPLIAIHKARYYKRKDGLALGPGPFVTALEYATDTKATVVGKPEKTFFLEALRGTGCEPEEAVMIGDDCRDDVGGAQDVGMLGILVKTGKYRASDEEKINPPPYLT

SEQ ID NO: 51803 - protein, 65 aa, Homo sapiens
LLLDGAPLIAIHKARYYKRKDGLALGPGPFVTALEYATDTKATVDCRDDVGGAQDVGMLGILVKT

SEQ ID NO: 51804 - protein, 57 aa, Homo sapiens
  misc_feature (1)...(57): Xaa = X or * as defined in Table 2
EMQSREDXRKXYLXRIVNCVPLRERLGYVCGGLGERSKEGTLWIYQGLQKSQDTGRV

SEQ ID NO: 51805 - protein, 71 aa, Homo sapiens
  misc_feature (1)...(71): Xaa = X or * as defined in Table 2
IVSRSEKGWVMYVEGWEREARREHYGYIKGYKNHRIHMMQSSKALVXLEDLRKHIXIFRCVFSNPQVILML

SEQ ID NO: 51806 - protein, 54 aa, Homo sapiens
MAACRALKAVLVDLSGTLHIEDAAVPGAQEALKRQAILQVQLTNMFVTWCFCNH

SEQ ID NO: 51807 - protein, 265 aa, Homo sapiens
  DOMAIN (37)..(65): PROTOCHLOROPHYLLIDE REDUCTASE PHOTOSYNT domain identified by eMATRIX, accession number PD02181D, p-value=8.445e-09, raw score of 12.85
  misc_feature (1)...(265): Xaa = X or * as defined in Table 2
RMAACRALKAVLVDLSGTLHIEDAAVPGAQEALKRLRGASVIIRFVTNTTKESKQDLFKRLRKLGFDISEDEIFTSLTAARSLLXRKQVTPMLLVDXSGHYLIFKGIQTSDPNAVVMGIGTRTFSLSKFWNQAFRLLLGWSTSDSNSQSQGFQEFKMGLALGPWTILXLLXKYATDTKATVVGKPEKTFFLGSIAGHWLLNLEEAVMIGDDCRGDVGGAQDVGMLGILVKTGKYRASDEEKINPPPYLTCESFPHAVDHILQHLL

SEQ ID NO: 51808 - protein, 56 aa, Homo sapiens
ILKEGLRSEAGIELIIEDHIRPQKQKRKPGSLPKATGSSVSFSQAHVRPGLISNPA

SEQ ID NO: 51809 - protein, 131 aa, Homo sapiens
  misc_feature (1)...(131): Xaa = X or * as defined in Table 2
AGSEMRPGLTWACSLARLLLSPSFIKHWFLESCLLSCSRSGSGYAQWCPPHQSASAAGHCQTPAHAQAYLSSPPQMDHSSVRSLLEACQTYXSASAAGHCQTPAHAQAYLSSPPQMDHSSVRSLLEACQTY

SEQ ID NO: 51810 - protein, 278 aa, Homo sapiens
  DOMAIN (26)..(52): Myb DNA-binding domain proteins repeat proteins proteins domain identified by eMATRIX, accession number BL00037B, p-value= 3.526e-11, raw score of 15.92
DEQLRALVRQFGQQDWKFLASHFPNRTDQQCQYRWLRVLNPDLVKGPWTKEEDQKVTAGTVPCTQWVFTHQCTWGLAQMPSFDRHSSPVSAPLPALSLTHPCPGAEPSTLKGKRTDNAVKNHWNSTIKRKVDTGGFLSESKDCKPPVYLLLELEDKDGLQSAQPTEGQNQGGKLAVLGSCHMFSDQYLDKEENSKIMDVVFQWLTTGDIHLNQIDAEDPEISDYMMLPYTATLSKRNRECLQESDEIPRDFTTLFDLSIFQLDTTSFHSVIESVPVGL

SEQ ID NO: 51811 - protein, 277 aa, Homo sapiens
TEEDLEFYVRKCGDILGVTSKLPKDQQDAKHILEHVFFQVVEFKKLNQSPEREPGRGQDPGCSGRSGPRAALEGVSVSAAPDLDLQGGERDGTRTCAGAKGRTGGRWSQGSRVPGVGPYPVTSSPVLAPGRFVTPDQKYSMDNTPHTPTPFKNALEKYGPLKPLPQTPHLEEDLKEVLRSEAGIELIIEDDIRPEKQKRKPGLRRSPIKKVRKSLALDIVDEDVKLMMSTLPKSLSLVHLEPGCDGSGALTSPAPQRLLLGGVVSFVWRTGERKSQG

SEQ ID NO: 51812 - protein, 548 aa, Homo sapiens
  DOMAIN (178)..(233): ELEMENT INSERTION TRANSPOSABLE SEQUENCE TRANSPOSASE FOR domain identified by eMATRIX, accession number PD02662D, p-value= 3.973e-10, raw score of 21.71
MPIVLVDWSDIREQKRLMVLRASVALHGRSVTLYEKAFPLSEQCSKKAHDQFLADLASILPSNTTPLIVSDAGFKVPWYKSVEKLGWYWLSRVRGKVQYADLGAENWKPISNLHDMSSSHSKTLGYKRLTKSNPISCQILLYKSRSKGRKNQRSTRTHCHHPSPKIYSASAKEPWVLATNLPVEIRTPKQLVNIYSKRMQIEETFRDLKSPAYGLGLRHSRTSSSERFDIMLLIALMLQLTCWLAGVHAQKQGWDKHFQANTVRNRNGSLLTNWPSVPPTIKEEENSEEELAAATTSKEQEPIGTDLDAVRTPEPLEEFPKREDQEGSPPETSLPYKWVVEAANLLIPAVGSSLSEALDLIESDPDAWCDLSKFDLPEEPSAEDSINNSLVQLQASHQQQVLPPRQPSALVPSVTEYRLDGHTISDLSRSSRGELIPISPSTEVGGSGIGTPPSVLKRQRKRRVALSPVTENSTSLSFLDSCNSLTPKSTPVKTLRFSPSQFLNFWNKQDTLELESPSLTSTPVCSQKVVVTTPLHRDKTPLHQKHAA

SEQ ID NO: 51813 - protein, 769 aa, Homo sapiens
  DOMAIN (139)..(165): Myb DNA-binding domain proteins repeat proteins proteins domain identified by eMATRIX, accession number BL00037B, p-value= 5.500e-27, raw score of 15.92
  misc_feature (1)...(769): Xaa = X or * as defined in Table 2
PRPGSRSGLCRRAGERGAVRAGGMSRRTRCEDLDELHYQDTDSDVPEQRDSKCKVKWTHEEDEQLRALVRQFGQQDWKFLASHFPNRTDQQCQYRWLRVLNPDLVKGPWTKEEDQKVIELVKKYGTKQWTLIAKHLKGRLGKQCRERWHNHLNPEVNKSCWTEEEDRIICEAHKVLGNRWAEIAKMLPGRTDNAGKNHWNFTIQKRKGDTGGFLREYKDXKPPVYLPLELEDKDGLQSAQPTEGQRSLLTNWPSVPPTIKEEENSEEELAAATTSKEQEPIGTDLDAVRTPEPLEEFPKREDQEGSPPETDSLPYKWVVEAVNLLIPAVVSSLYEALDLIGSDPDAWCDLSRFDLPEEPSIEDSINNSLVQLQASHQQQILPPRQPSALVPSVTEYRLDGHTISDLSRSSRGELIPISPSTEVGGSGIGTPPSVLKRQRKRRVALSPVTENSTSLSFLDSCNSLTPKSTPVKTLPFSPSQFLNFWNKQDTLELESPLADYPPQVCSQKVVVTTPLHRDKTPLHQKHAAFVTPDQKYSMDNTPHTPTPFKNALEKYGPLKPLPQTPHLEEDLKEVLRSEAGIELIIEDDIRPEKQKRKPGLRRSPIKKVRKSLALDIVDEDVKLMMSTLPKSLSCRTTAPSNSSTLTLSGIKEDNSLLNQGLLAGPSPRKAACVPEGPESHFHGQLAPYVPVPGKTAWACGGDQGTRLFMQEKARQVPGAALKPKPHILGTLILVLESVGGGVNEPISHGFTGGLWGAEGGLVNLRSHSR

SEQ ID NO: 51814 - protein, 231 aa, Homo sapiens
  misc_feature (1)...(231): Xaa = X or * as defined in Table 2
SLPRRLESPGRLAMAARGVIAPVGESLCRYAEVPCSPSAKRPDADVDQQRLVRSLIAVGQGVAALAFAGRYALRIWKPLEQVITETAKGRFQTPRFSSYXXGGFLNIIXLRREAGLILGVSPSAGKAKIRTAHRRVMILESPQIKGGSPYVAAKINEAKDLLETTTKRLMLKDHTEGKKNEGTSKKKKSPAKYSKTWSFLIFYMGFDHSLIFRPLSCITNKMLIVLLFIIF

SEQ ID NO: 51815 - protein, 217 aa, Homo sapiens
  DOMAIN (122)..(158): Enoyl-CoA hydratase/isomerase proteins domain identified by eMATRIX, accession number BL00166D, p-value=7.750e-24, raw score of 22.87
EGYICRHFTGSSALLTRTHITYGVIANVAVVRINSPNSRMLAACKTLQEVTQLSQEAQRIVEKLEKSTKPIVAAINGSCLGGGLEVAISCQYRIATKDRKTVLGTPEVLLGALPGAGGTQRLPKMVGVPAALDMMLTGRSIRADRAKKMGLVDQLVEPLGPGLKPPEERTIEYLEEVAITFAKGLADKKISPKRDKGLVEKLTAYAMTIPFVRQQVY

SEQ ID NO: 51816 - protein, 72 aa, Homo sapiens
  DOMAIN (30)..(57): Enoyl-CoA hydratase/isomerase proteins domain identified by eMATRIX, accession number BL00166C, p-value=1.871e-23, raw score of 18.93
MLAACKTLQEVTQLSQEAQRIVEKLEKSTKPIVAAINGSCLGGGLEVAISCQYRIATKDRRMLSIWLFLVQG

SEQ ID NO: 51817 - protein, 70 aa, Homo sapiens
  DOMAIN (24)..(55): 3-hydroxyacyl-CoA dehydrogenase proteins domain identified by eMATRIX, accession number BL00067A, p-value=8.154e-21, raw score of 21.37
LRQSSTLTEMIKISLPKVISSLPCRHLAILGAGLMGAGIANVSVDKGLKTILKDATLTALDRGQQQVFKG

SEQ ID NO: 51818 - protein, 782 aa, Homo sapiens
  DOMAIN (374)..(405): 3-hydroxyacyl-CoA dehydrogenase proteins domain identified by eMATRIX, accession number BL00067A, p-value=3.793e-25, raw score of 21.37
  misc_feature (1)...(782): Xaa = X or * as defined in Table 2
LQLKMVACRAIGILSRFSAFRILRSRGYICRNFTGSSALLTRTHINYGVKGDVAADRINSPNSKVNTLSKELHSEFSEVMNEIWASDQIRSAVLISSKPGCFIAGADITMLAACKTLQEVTQLSQEAQRIVEKPXKSPQSLIVGCPSNGSCLGRRTLRLPISSPQYRIATKDSKTVIXVPPEVFLGGPLPGRQGGHTKGCPKMGGVCLPAFGHECLTGRSIRADRAKKMGLVDQLVGTPGTQGLKPPEERTIEYLEEVAITFAKGLADKKISPKRDKGLVEKLTAYAMTIPFVRQQVYKKVEEKVRKQTKGLYPAPLKIIDVVKTGIEQGSDAGYLCESQKFGELVMTKESKALMGLYHGQVLCKKNKFGAPQKDVKHLAILGAGLMGAGIAQVSVDKGLKTILKDATLTALDRGQQQVFKGLNDKVKKKALTSFERDSIFSNLTGQLDYQGFXKRPDMGELKAVFEDPXSLSHRVLKGKVGSRXFPDHWYSLPSNTSALPISEIAAVQQKTXEGXLGMHYFSPVDKMQLLEIITTEKTSKDTSASAVAVGLKQGKVIIVVKDGPGLLVTYQGVFAPMMSEVIRILQEGSVDPKKLGFPWTTSFGFPVGAATLVDEVGCGMLAKHVAEDLGKVFGERFGGGNPELLTQMVSKGFLGRKSGEGLLTSSGRVVKRKILNSTMDSIXASLKRPSKFEVSSEEGIQVRPWWQEFGNEAVMCLQEGILPTLPEGDIGAVFGLGFPPCLGGPFRFVGSVWAPRRIVGPGSRKYEAAYGKTVSPPMPSC

SEQ ID NO: 51819 - protein, 89 aa, Homo sapiens
  misc_feature (1)...(89): Xaa = X or * as defined in Table 2
VEDSKEIFSSAXDYLSTHSKHVPASHESYHVNPNLCNPVAPTSGAHSIVXKWPSWLGTVAHSCNPSNFGRPRRADCLSSRSSRPAWPTR

SEQ ID NO: 51820 - protein, 1035 aa, Homo sapiens
  DOMAIN (965)..(1019): Receptor tyrosine kinase class V proteins domain identified by eMATRIX, accession number BL00790K, p-value=7.188e-12, raw score of 9.30
MAAPSEGPVEWLAEPQQPPVKRGRVFLPASGDQYGNAQDGGFGSSIFDVYKCDVFPPQTTALEPAGGFEQLLPSQASPDTLMGTAMVAGAWTLPGRSPAPNSSPHVAGPRLSLEAQLNCFLKEPLQNLSDQESGLSKAHPSHTQIQFQDSELSEAHPSHMQVQFQDSGHSEAHPSHIQVQFQDSGFSEAHPSHTQVQFQDSGLSEAHPSHMQVQFQDSGHSEAHPSHIQVQFQTIQEVAGYVLIALNTVERIPLENLQIIRGNMYYENSYALAVLSNYDANKTGLKELPMRNLQGLWSVVRAATAAWTSLLVFPALSSPEFHPPVHGFFMSVFTDGSAVISNLINKAPRFSPYDPKLPSSVPCFCASTEEACSTVSLHWFHSPAEILHGAVRFSNNPALCNVESIQWRDIVSSDFLSNMSMDFQNHLGSCQKCDPSCPNGSCWGAGEENCQKLTKIICAQQCSGRCRGKSPSDCCHNQCAAGCTGPRESDCLVCRKFRDEATCKDTCPPLMLYNPTTYQMDVNPEGKYSFGATCVKKCPRNYVVTDHGSCVRACGADSYEMEEDGVRKCKKCEGPCRKVCNGIGIGEFKDSLSINATNIKHFKNCTSISGDLHILPVAFRGDSFTHTPPLDPQELDILKTVKEITGFLLIQAWPENRTDLHAFENLEIIRGRTKQHGQFSLAVVSLNITSLGLRSLKEISDGDVIISGNKNLCYANTINWKKLFGTSGQKTKIISNRGENSCKATGQVCHALCSPEGCWGPEPRDCVSCRNVSRGRECVDKCNLLEGEPREFVENSECIQCHPECLPQAMNITCTGRGPDNCIQCAHYIDGPHCVKTCPAGVMGENNTLVWKYADAGHVCHLCHPNCTYGPKIPSIATGMVGALLLLLVVALGIGLFMRRRHIVRKRTLRRLLQERELVEPLTPSGEAPNQALLRILKETEFKKIKVLGSGAFGTVYKGLWIPEGEKVKIPVAIKELREATSPKANKEILDEAYVMASVDNPHVCRLLGICLHLHRAAHHGSFMPFRLPPGTYVR

SEQ ID NO: 51821 - protein, 1241 aa, Homo sapiens
  DOMAIN (837)..(858): Src homology 2 (SH2) domain proteins profile domain identified by eMATRIX, accession number BL50001B, p-value=1.529e- 13, raw score of 17.40
  misc_feature (1)...(1241): Xaa = X or * as defined in Table 2
SGEPERALRGAAMRPSGTAGAALLALLAALCPASRALEEKKVCQGTSNKLTQLGTFEDHFPQPSQRMFNNCEVVLGNLEITLCERNYDLSFLKTIQEVAGYVLIALNTVERIPLENLQIIRGNMYYENSYALAVLFNYDANKTGLKELPMRNLQEILHGAVRFSNNPALCNVESIQWRDIVSSDFLSNMSMDFQNHLGSCQKCDPSCPNGSCWGAGEENCQKLTKIICAQQCSGRCRGKSPSDCCHNQCAAGCTGPRESDCLVCRKFRDEATCKDTCPPLMLYNPTTYQMDVNPEGKYSFGATCVKKCPRNYVVTDHGSCVRACGADSYEMEEDGVRKCKKCEGPCRKVCNGIGIGEFKDSLSINATNIKHFKNCTSISGDLHILPVAFRGDSFTHTPPLDPQELDILKTVKEITGFLLIQAWPENRTDLHAFENLEIIRGRTKQHGQFSLAVVSLNITSLGLRSLKEISDGDVIISGNKNLCYANTINWKKLFGTSGQKTKIISNRGENSCKATGQVCHALCSPEGCWGPEPRDCVSCRNVSRGRECVDKCNLLEGEPREFVENSECIQCHPECLPQAMNITCTGRGPDNCIQCAHYIDGPHCVKTCPAGVMGENNTLVWKYADAGHVCHLCHPNCTYGCTGPGLEGCPTNGPKIPSIATGMVGALLLLLVVALGIGLFMRRRHIVRKRTLRRLLQERELVEPLTPSGEAPNQALLRILKETEFKKIKVLGSGAFGTVYKGLWIPEGEKVKIPVAIKELREATSPKANKEILDEAYVMASVDNPHVCRLLGICLTSTVQLITQLMPFGCLLDYVREHKDNIGSQYLLNWCVQIAKGMNYLEDRRLVHRDLAARNVLVKTPQHVKITDFGLAKLLGAEEKEYHAEGGKVPIKWMALESILHRIYTHQSDVWSYGVTVWELMTFGSKPYDGIPASEISSILEKGERLPQPPICTIDDYMIMVKCWMIDADSRPKFREVIIEFSKMARDPQRYLVIQGDERMHLPSPTDSNFYRALMDEEDMDDVVDADEYLIPQQGFFSSPSTSRTPLLSSLSATSNNSTVACIDRNGAANAVPFKEDSFLQRYSSDPTGALTEDSIDDTFLPVPEYINQSVPKRPAGSVQNPVLFTIQPFEPRPAQQEDPHLPGDPHRHCSGGNPEFFSTLFQPTCVNSTFRTAPAHWGPGKGRPPIXLDNPDYQRDFFPPRKAQAQMGIFXGLPTAXKCRNTLRVAAHKASEFIGSMTHG

SEQ ID NO: 51822 - protein, 74 aa, Homo sapiens
  misc_feature (1)...(74): Xaa = X or * as defined in Table 2
XGQPAHWPRESLVLYHWTQSFSSQKVRLVIAEKGLVCEERDVSLPQSEHKEPWFMRLNLGEEVPVHHPPRQHHQ

SEQ ID NO: 51823 - protein, 32 aa, Homo sapiens
  misc_feature (1)...(32): Xaa = X or * as defined in Table 2
YAKRIYDVYYVHTAYTCTFHAXKIRGMTQXNW

SEQ ID NO: 51824 - protein, 274 aa, Homo sapiens
GLAAFLARARGRRRKELPGSPRPLPQLPAGGPSPRWRAMRPSQRRPPTLPMAASPAHWPRESLVLYHWTQSFSSQKVRLVIAEKGLVCEERDVSLPQSEHNEMPWFMRLNLGEEVPVIIHRDNIIQCTMDQIHLTMWERTFHRERHVGALMPEVGSRAAPRVLQYRELLDALPMDAYTHGCILHPELTTDSMIPKYATAEIRRHLANATTDLMKLDHEEEPQLSEPYLSKQKKLMAKILEHDDVSYLKKILGELAMVLDQIEGGAGRKRKLENE

SEQ ID NO: 51825 - protein, 395 aa, Homo sapiens
  misc_feature (1)...(395): Xaa = X or * as defined in Table 2
KNLSVKLSENGTLKNCVVADSETDIDVYMYTRVYVYIPRIENSWNDTIKLVTGATISAVGGDIDAQGEWAFPLLGIPSLSPGPEWKVRVVIPDKGLVCEERDVSLPQSEPKEPWFMRINLGEEVPVIIHRDNIISDYDQIIDYVERTFTGEHVVALMPEVGSLQHARVLQYRELLDALPMDAYTHGCILHPELTTDSMIPKYATAEIRSDIXPNATTDLMKLDHEEEPQLSEPYLSKQKKLMAKILEHDDVSYLKKILGELAMVLDQIEAELEKRKLENEGQKCELWLCGCAFTLADVSLGATLHRLKFLGLSKKYWEDGSRPNLQSFFERVQRRFAFRKVLGDIHTTLLSAVIPNAFRLVKRKPPSFFRASFLMGSLGGMGYFALHGTSRKKYI

SEQ ID NO: 51826 - protein, 309 aa, Homo sapiens
  DOMAIN (255)..(275): Elongation factor 1 beta/beta'/delta chain proteins domain identified by eMATRIX, accession number BL00824B, p-value=2.080e- 21, raw score of 9.21
  misc_feature (1)...(309): Xaa = X or * as defined in Table 2
MDPSIYFLPSKREGHLQAYIRDSVPEDPLILIFFSASSDQRPWLKAPHLPALRGFRGGGAGGGAQSRTTEDYVAWAKGNSPTSPSPRSRGGCSAKLSGPRRPPRRPGRLFNMAASANSVSRAWRTESPEGLESLHSTSLSAISVSRPEGGAELSDTADTMGFGDLKSPAGLQVPTITWRTRATSRGMCHHKQMWQYLKPCPAHRLPTCVMPYVGYNHIKSYEKEKASLPGVKKALGKYGPADVEDTTGSGATDSKDDDDIDLFGSDDEEESEEAKRLREDTSCTIXIKESQKTCTCCQVFHLTRCETLG

SEQ ID NO: 51827 - protein, 801 aa, Homo sapiens
  DOMAIN (71)..(116): Respiratory-chain NADH dehydrogenase 75 Kd subunit proteins domain identified by eMATRIX, accession number BL00641C, p-value= 1.000e-40, raw score of 21.10
  misc_feature (1)...(801): Xaa = X or * as defined in Table 2
MALRVVRSVRAVLCSLHVACEKVGMQIPRFCYHERLSVAGNCRMCLVEIEKAPKDQSMMFGNDRSRFLEGKRAVEDKNIGPLVKTIMTRCIQCTRCIRFASEIAGVDDLGTTGRGNDMQVGTYIEKMFMSELSGNIIDICPVGALTSKPYAFTARPWETRKTESIDVMDAVGSNIVVSTRTGEVMRILPRMHEDINEEWISDKTRFAYDGLKRQRLTEPMVRNEKGLLTYTSWEDALSRVAGMPPALALQSAEIAASARPPPRLGSEEPLCLAAHRLGCEEPLCLAASLESEERLCPAAIPPGNLRYVFISSAKTDKYSKLAPVEWVTVEKVPENVEVTLELGNRQSRDRVSRIPGNAIVIWFTGFKWKKTVTTLWFLNLAIADFIFLLFLPLYISYVAMNFHWPFGIWLCKANSFTAQLNMFASVFFLTGDQPGPLYPLDPSCLISSASNPQELSDCHYIHLAFGFSNWRSCPVLPGHCGVQXSYSLLXQFSEAXSXPHFDQAPCSDLGEIYHWLSLPFANNEYLLLVSHLQGEEAKHPDLQXAFLDNSGCGCGLCGLLDSLSPVXHLGAHHSPQXLFPPCDAGWNPPLHWFGIPQXLLEPHPLCPNXXEVPSSLPVLSCXDTQVHTVGSQLFWQVLKEAKKPMVVLGSSALQRNDGAAILAAVSSIAQKIRMTSGVTGDWKVMNILHRIASQVAALDLGYKPGVEAIRKNPPKVLFLLGADGGCITRQDLPKDCFIIYQDLVSGAALPTSSLLLPIPEASKPSDNHVSPLGSVPVLVLPDSDQKGGETPTSGDCSRNPA

SEQ ID NO: 51828 - protein, 683 aa, Homo sapiens
  DOMAIN (104)..(149): Respiratory-chain NADH dehydrogenase 75 Kd subunit proteins domain identified by eMATRIX, accession number BL00641C, p-value= 1.000e-40, raw score of 21.10
  misc_feature (1)...(683): Xaa = X or * as defined in Table 2
MLRIPVRKALVGLSKSPKGCVRTTATAASNLIRVFVDGQSLMVEPGTTVLQACERIGMQIPRFCYHERLSVAGNCRMCLVEIEKAPKDQSMMFGNDRSRFLEGKRAVEDKNIGPLVKTIMTRCIQCTRCIRFASEIAGVDDLGTTGRGNDMQVGTYIEKMFMSELSGNIIDICPVGALTSKPYAFTARPWETRKTESIDVMDAVGSNIVVSTRTGEVMRILPRMHEDINEEWISDKTRFAYDGLKRQRLTEPMVRNEKGLLTYTSWEDALSRVAGMLQSFQGKDVAAIAGGLVDAEALVALKDLLNRVDSDTLCTEEVFPTAGAGTDLRSNYLLNTTIAGVEEADVVLLVGTNPRFEAPLFXCXEFRKSWLHNDLKVALIRAVPVDLTYTYDHLGDSPKILQDIASGKSHPFSQVLKEAKKPMVVLGSSALQRNDGAAILAAVSSIAQKIRMTSGVTGDWKVMNILHRIASQVAVLDLGYKPGVEAIRKNPPKVLFLLGADGGCITRQDLPKDCFIIYQGHHGDVGAPIADVILPGAAYTEKSATYVNTEGRAQQTKVAVTPPGLAREDWKIIRALSEIAGMTLPYDTLDQVRNRLEEVSPNLVRYDDIEGANYFQQANELSKLVNQQLLADPLVPPQLTIKDFYMTGEVTEINEALAENPGLVNKSRYEDGWLIKMTLSNPS

SEQ ID NO: 51829 - protein, 761 aa, Homo sapiens
  DOMAIN (183)..(228): Respiratory-chain NADH dehydrogenase 75 Kd subunit proteins domain identified by eMATRIX, accession number BL00641C, p-value= 1.000e-40, raw score of 21.10
  misc_feature (1)...(761): Xaa = X or * as defined in Table 2
ATRPPRGSSWCRQFSRTASAAPGRSNMLRIPVRRALVGLSKSPKGCVRTTATAASNLIEVFVDGQSVMVEPGTTVLQACEKVGMQIPRFCYHERLSVAGNCRMCLVEIEKAPKVVAACAMPVMKGWNILTNSEKSKKAREGVMEFLLANHPLDCPICDQGGECDLQDQSMMFGNDRSRFLEGKRAVEDKNIGPLVKTIMTRCIQCTRCIRFASEIAGVDDLGTTGRGNDMQVGTYIEKMFMSELSGNIIDICPVGALTSKPYAFTARPWETRKTESIDVMDAVGSNIVVSTRTGEVMRILPRMHEDINEEWISDKTRFAYDGLKRQRLTEPMVRNEKGLLTYTSWEDALSRVAGMLQSFQGKDVAAIAGGLVDAEALVALKDLLNRVDSDTLCTEEVFPTAGAGTDLRSNYLLNTTIAGVEEADVVLLVGTNPRFEAPLFNAWIRKSWLHNDLKVALIGSPVDLTYTYDHLGDSPKILQDIASGSHPFSQVLKEAKKPMVVLGSSALQRNDGAAILAAVSSIAQKIRMTSGVTGDWKVMNILHRIASQVAALDLGYKPGVEAIRKNPPKVLFLLGADGGCITRQDLPKDCFIIYQGHHGDVGAPIADVILPGAAYTNKSATYVNTEGXASASIMLAVTTPGLSREDWKIIRALSEIAGMTLFPYDTLDIQVRNQIGKKSSPNLVRYDDIEGANYFRQANELSKLVNQQLLADPLVPPQLTIKDFYMTDSISRALTGQWAQMWSKACPHRVPPAVGGTHPIC

SEQ ID NO: 51830 - protein, 171 aa, Homo sapiens
  misc_feature (1)...(171): Xaa = X or * as defined in Table 2
MRLQGAIFVLLPHLGPILVWLFTRDHMSGWCEGPRMLSWCPFLQSLICLLQTAIYSVVGXVLVSHTWPWYPMGWEQVLYIXITYAVQLTISWTVLVLFFTVHNPGLVRHTVLSSRSNVGEGETTWLQKHILAALLLLPYLAWLTVTSALTYHLWRDSLCPVHQPQPTEKSD

SEQ ID NO: 51831 - protein, 499 aa, Homo sapiens
MSPCSGSTLALLSLPASDLGDVGGVSVTEDIAGSLVEAGTWWTPKQEDEQLLSKGDMLFTEKVYRLMLVNFHTGTNIAVSMQEKGEGAGQIIPCQYLLQPVKHEDREIYPQHLKSLAFSAFTQCRRPLPTSTNVKTLTGFGPGLAMETALRSPDRPECIRLYAPPFILAPVKDKQTELGETFGEAGQKYNVLFVGYCLSHDQRWILASCTDLYGELLETCIINIDVPNRARRKKSSARKFGLQKLWEWCLGLVQMSSLPWRVVIGRLGRIGHGELKDWSCLLSRRNLQSLSKRLKDMCRMCGISAADSPSILSACLVAMEPQGSFVIMPDSVSTGSVFGRSTTLNMQTSQLNTPQDTSCTHILVFPTSASVQVASATYTTENLDLAFNPNNDGADGMGIFDLLDTGDDLDPDIINILPASPTGSPVHSPGSHYPHGGDAGKGQSTDRLLSTEPHEEVPNILQQPLALGYFVSTAKAGPLPDWFWSACPQAQYQCPLFLK

SEQ ID NO: 51832 - protein, 577 aa, Homo sapiens
  DOMAIN (198)..(230): Flocculin repeat proteins domain identified by eMATRIX, accession number PF00624H, p-value=9.565e-09, raw score of 11.41
MPEVELARTDESPEPLPIPTFLLGYDYDYLVLSPFALPYWERLMLEPYGSQRDIAYVVLCPENEALLNGAKSFFRDLTAIYESCRLGQHRPVSRLLTDGIMRVGSTASKKLSEKLVAEWFSQAADGNNEAFSKLKLYAQVCRYDLGPYLASLPLDSSLLSQPNLVAPTSQSLITPPQMTNTGNANTPSATLASAASSTMTVTSGVAISTSVATANSTLTTASTSSSSSSNLNSGVSSNKLPSFPPFGSMNSNAAGSMSTQANTVQSGQLGGQQTSALQTAGISGESSSLPTQPHPDVSESTMDRDKVGIPTDGDSHAVTYPPAIVVYIIDPFTYENTDESTNSSSVWTLGLLRCFLEMGQTLPPHIKSTVSVQTSTVADGSQTLGMNEGAGCRLKKSPAFPFLQSRFCLCVVPPSFPLCIDNPDQQTVIMTECTSLQFVSPFAFEAMQKVDVVCLASLSDPELRLLLPCLVRMALCAPADQSQSWAQDKKLILRLLSGVEAVNSIVALLSVDFHALEQDASKEQQLRHKLGGGSGESILVSQLQHGLTLEFEHSDSPRRLRLVLSELLAIMNKVHFF

SEQ ID NO: 51833 - protein, 2204 aa, Homo sapiens
  DOMAIN (530)..(548): GLYCOSYL HYDROLASE FAMILY 7 SIGNATURE domain identified by eMATRIX, accession number PR00734I, p-value=4.296e-09, raw score of 11.46
  misc_feature (1)...(2204): Xaa = X or * as defined in Table 2
PRSLCFSLWAEAAVLADGGLRRRRRLLRGTMSASFVPNGASLEDCHCNLFCLADLTGIKWXKYVWGGPTSAPILFPVTEEHPILSSSSRCLTAHVLGVRRRDQRPERRELXIFWWGEDPVLLTLFTMTYQKKKMECGRMDFPMNAVLCFSKAVHNLLERCLMNRNFVRIGKWFVKPYEKDEKPINKSEHLSCSFTFFLHGDSNVCTSVEINQHQPVYLLSEEHITLAQQSNSPFQVILCPFGLNGTLTGQAFKMSDSATKKLIGEWKQFYPISCCLKEMSEEKQEDMDWEDDSLAAVEVLVAGVRMIYPACFVLVPQSDIPTPSPVGSTHCSSSCLGVHQVPASTRDPAMSSVTLTPPTSPEEVQTVDPQSVQKWVKFSSVSDGFNSDSTSHHGGKIPRKLANHVVDRVWQECNMNRAQNKRKYSASSGGLCEEATAAKVASWDFVEATQRTNCSCLRHKNLKSRNAGQQGQAPSLGQQQQILPKHKTNEKQEKSEKPQKRPLTPFHHRVSVSDDVGMDADSASQRLVISAPDSQVRFSNIRTNDVAKTPQMHGTEMANSPQPPPLSPHPCDVVDEGVTKTPSTPQSQHFYQMPTPDPLVPSKPMEDRIDSLSQSFPPQYQEAVEPTVYVGTAVNLEEDEANIAWKYYKFPKKKDVEFLPPQLPSDKFKDDPVGPFGQESVTSVTELMVQCKKPLKVSDELVQQYQIKNQCLSAIASDAEQEPKIDPYAFVEGDEEFLFPDKKDRQNSEREAGKKHKVEDGTSSVTVLSHEEDAMSLFSPSIKQDAPRPTSHARPPSTSLIYDSDLAVSYTDLDNLFNSDEDELTPGSKKSANGSDDKASCKESKTGNLDPLSCISTADLHKMYPTPPSLEQHIMGFSPMNMNNKEYGSMDTTPGGTVLEGNSSSIGAQFKIEVDEGFCSPKPSEIKDFSYVYKPENCQILVGCSMFAPLKTLPSQYLPPIKLPEECIYRQSWTVGKLELLSSGPSMPFIKEGDGSNMDQEYGTAYTPQTHTSFGMPPSSAPPSNSGAGILPSPSTPRFPTPRTPRTPRTPRGAGGPASAQGSVKYENSDLYSPASTPSTCRPLNSVEPATVPSIPEAHSLYVNLILSESVMNLFKDCNSDSCCICVCNMNIKGADVGVYIPDPTQEAQYRCTCGFSAVMNRKFGNNSGLFLEDELDIIGRNTDCGKEAEKRFEALRATSAEHVNGGLKESEKLSDDLILLLQDQCTNLFSPFGAADQDPFPKSGVISNWVRVEERDCCNDCYLALEHGRQFMDNMSGGKVDEALVKSSCLHPWSKRNDVSMQCSQDILRMLLSLQPVLQDAIQKKRTVRPWGVQGPLTWQQFHKMAGRGSYGTDESPEPLPIPTFLLGYDYDYLVLSPFALPYWERLMLEPYGSQRDIAYVVLCPENEALLNGAKSFFRDLTAIYESCRLGQHRPVSRLLTDGIMRVGSTASKKLSEKLVAEWFSQAADGNNEAFSKLKLYAQVCRYDLGPYLASLPLDSSLLSQPNLVAPTSQSLITPPQMTNTGNANTPSATLASAASSTMTVTSGVAISTSVATANSTLTTASTSSSSSSNLNSGVSSNKLPSFPPFGSMNSNAAGSMSTQANTVQSGQLGGQQTSALQTAGISGESSSLPTQPHPDVSESTMDRDKVGIPTDGDSHAVTYPPAIVVYIIDPFTYENTDESTNSSSVWTLGLLRCFLEMVQTLPPHIKSTVSVQIIPCQYLLQPVKHEDREIYPQHLKSLAFSAFTQCRRPLPTSTNVKTLTGFGPGLAMETALRSPDRPECIRLYAPPFILAPVKDKQTELGETFGEAGQKYNVLFVGYCLSHDQRWILASCTDLYGELLETCIINIDVPNRARRKKSSARKFGLQKLWEWCLGLVQMSSLPWRVVIGRLGRIGHGELKDWSCLLSRRNLQSLSKRLKDMCRMCGISAADSPSILSACLVAMEPQGSFVIMPDSVSTGSVFGRSTTLNMQTSQLNTPQDTSCTHILVFPTSASVQVASATYTTENLDLAFNPNNDGADGMGIFDLLDTGDDLDPDIINILPASPTGSPVHSPGSHYPHGGDAGKGQSTDRLLSTEPHEEVPNILQQPLALGYFVSTAKAGPLPDWFWSACPQAQYQCPLFLKASLHLHVPSVQSDELLHSKHSHPLDSNQTSDVLRFVLEQYNALSWLTCDPATQDRRSCLPIHFVVLNQLYNFIMNML

SEQ ID NO: 51834 - protein, 216 aa, Homo sapiens
  DOMAIN (115)..(141): Dihydrodipicolinate synthetase proteins domain identified by eMATRIX, accession number BL00665E, p-value=8.200e-19, raw score of 20.33
  misc_feature (1)...(216): Xaa = X or * as defined in Table 2
AVRGMVRNARAVLKTGGTFLSPALEPLVAGGSGGEFSQLGAEERKAIARFAIDHVDRRVPVLIGTGGTNARETIELSQHAQQAGRTASTIDSVAHLRSMIHTVKGAHPHFTVLCGYDDHLFNTLLLGGDGAISASGNFAPQVSVNLLKAWRDGDVAKAAGYHQTASIPDQLIHPYESRLFKCQHVLTRGITSFXLLCPPGSLRRQGISTYHSLLHN

SEQ ID NO: 51835 - protein, 45 aa, Homo sapiens
  misc_feature (1)...(45): Xaa = X or * as defined in Table 2
XAAMTTASTSQVRQNYHQDSEAAINRQINLGALRLLRLPVHVLLL

SEQ ID NO: 51836 - protein, 159 aa, Homo sapiens
  DOMAIN (103)..(124): AAA-protein family proteins domain identified by eMATRIX, accession number BL00674A, p-value=2.636e-17, raw score of 16.91
  misc_feature (1)...(159): Xaa = X or * as defined in Table 2
KSGTNETIRRKARGGKIKMDDLRGPRCQXEPWKRLLMTIMPSCLHLWAQNTTVSILSFVDKDLLEPGCSVLLNHKVHAVIGVLMDDTDPLVTVMKVEKAPQETYADIGGLDNQIQEIKESVELPLTHPEYYEEMGIKPPKGVHPFGPTWPRVKPFCPRQ

SEQ ID NO: 51837 - protein, 275 aa, Homo sapiens
  DOMAIN (88)..(129): Ferritin iron-binding regions proteins domain identified by eMATRIX, accession number BL00540A, p-value=1.900e-36, raw score of 15.06
  misc_feature (1)...(275): Xaa = X or * as defined in Table 2
AIEHCQSGDNPESRRGFLLQQWLGRNPALVPHPGRTGHSQPPVTFHRHPSDCQRSPAGRFKGGPSHRGQPPPFHKSPPMTTASHLARCARTYHQDSEAAINRQINLELYASYVYLSMSYYFDRDDVALKNFAKYFLHQSHEEREHCXENLMKACRTNEGWPNLSFQDIKETKTCDDWESGLNAMECALHFEKKCXIKSLLELHKLATDKNXPPICVDFIXDTFTLNEQVXKAIKRIWGDHVXPKLWRKMGSAPNLGFGEYLFXQSTPWGDSDNES

SEQ ID NO: 51838 - protein, 129 aa, Homo sapiens
PTSPSKSCWPSDSPPLEMLGPRRTFVLSALQPSPTHSSSNTQRLPDRVTGVDTDPHFIIHVPQKEDTLCFNINEEPGGILSLVQDPNTGFSENGQLIGNKAMSPGLHDGTYFGRVGIANPATDFQLEVT

SEQ ID NO: 51839 - protein, 160 aa, Homo sapiens
FQLEVTPQNITLNPGFGGPVFSWRDQAVLRQDGVVVTINKKRNLVVSVDDGGTFEVVLHRVWKGSSVHQDFLGFYVLDSHRMSARTHGLLGQFFHPIGFEVSDIHPGSDPTKPDATMVGLQKDYSKDPWHGAEVSCWFIHNNGAGLIDGAYTDYIVPDIF

SEQ ID NO: 51840 - protein, 507 aa, Homo sapiens
  DOMAIN (495)..(505): INHIBITOR HEAVY CHAIN CHANNEL IN domain identified by eMATRIX, accession number PD01101E, p-value=5.179e-12, raw score of 6.73
TKEALLRILEDMKEEDYLNFILFSGDVSTWKEHLVQATPENLQEARTFVKSMEDKGMDNFLMRKGKTKAKLEERGANQDSRNGSKVRYRRAASHEESESEAAACIRDAMAYSVHHNLRCLVSVDSSVGEGFIDNWEQELPVSAASDYGKLTGPLQQTQRGATTGSQVEKVRCWQGQKINCDSSAVAQIQQPVQGVMSQKARHTYLVAKPPSSGKPLGASGRTMEQFTIHLTVNPQSKVTFQLTYEEVLKRNHMQYEIVIKVKPKQLVHHFETKEALLKILGDMQPGDYFDLVLFGTRVQSWKGSLVQASEANLQAAQDFVRGFSLDEEQELPVSAASDYGKLTGPLQQTQRGATTGSQVEKVSKNAHGEEKENLTARALDLSLKYHFVTPLTSMVVTKPEDNEDERAIADKPGEDSLGPSVVLHGHDLQKVKVHIVAETQVVEREPAPDGVADVLEDLGTATNDLTFTEEVDMKEMEKALQERDYIFGNYIERLWAYLTIEQLLEKR

SEQ ID NO: 51841 - protein, 279 aa, Homo sapiens
  DOMAIN (112)..(132): INHIBITOR HEAVY CHAIN CHANNEL IN domain identified by eMATRIX, accession number PD01101C, p-value=1.237e-16, raw score of 12.69
MLRDLLKNVDLKGFEPDVRILLTKYSNSNGSQSPWMEEQIRDAWGSMVLKNVVRETDEVGKGDPLGDMQPGDYFDLVLFGTRVQSWKGSLVQASEANLQAAQDFVRGFSLDEATNLNGGLLRGIEILNQVQESLPELSNHASILIMLTDGDPTEDPPVFIRDKLMERRNRRTGRTEKARIWEVTDRTVRTWIGEAVAAAAADGVTFSVPVTPHTFRHSYAMHMLYAGIPLKVLQSLMGHKSISSTEVYTKVFALDVAARHRVQFAMPESDAVAMLKQLS

SEQ ID NO: 51842 - protein, 102 aa, Homo sapiens
  misc_feature (1)...(102): Xaa = X or * as defined in Table 2
EVRANLSSQALRMWLDYGFVTPLTSMSIRGMADQDGLKPTIDKPSEDSPPLEMLGPRRTFVLSALQPSPTHSSSNTQRLPDRVTGVDTXVVTXPYVLCWNLC

SEQ ID NO: 51843 - protein, 132 aa, Homo sapiens
MPLPLPSAFVLSALQPSPTHSSSNTQRLPDRVTGGFSVNGQLIGNKARSPGQHDGTYFGRLGIANPATDFQLEVTPQNITLNPGFGGPVFSWRDQAVLRQDGVVVTINKKRNLVVSVDDGGTFEVVLHRVWK

SEQ ID NO: 51844 - protein, 941 aa, Homo sapiens
  DOMAIN (285)..(338): INHIBITOR HEAVY CHAIN CHANNEL IN domain identified by eMATRIX, accession number PD01101B, p-value=1.000e-40, raw score of 21.53
  misc_feature (1)...(941): Xaa = X or * as defined in Table 2
SMDGAMGPRGLLLCMYLVSLLILQAMPALGSATGRSKSSEKRQAVDTAVDGVFIRSLKVNCKVTSRFAHYVVTSQVVNTANEAREVAFDLEIPKTAFISDFAVTADGNAFIGDIKDKVTAWKQYRKAAISXEKAGLVRASGRTMEQFTIHLTVNPQSKVTFQLTYEEMLKRNHMQYEIVIKVKPKQLVHHFEIDVDIFEPQGISKLDAQASFLPKELAAQTIKKSFSGKKTSNGSHSRRFQGHVLFRPTVSQQQSCPTCSTSLLNGHFKVTYDVSRDKICDLLVANNHFAHFFAPQNLTNMNKNVVFVIDISGSMRGQKVKQTKEALLKILGDMQPGDYFDLVLFGTRVQSWKGSLVQASEANLQAAQDFVRGFSLDEATNLNGGLLRGIEILNQVQESLPELSNHASILIMLTDGDPTEGVTDRSQILKNVRNAIRGRFPLYNLGFGHNVDFNFLEVMSMENNGRAQRIYEDHDATQQLQGFYSQVAKPLLVDVDLQYPQDAVLALTQNHHKQYYEGSEIVVAGRIADNKQSSFKADVQAHGEGQEFSITCLVDEEEMKKLLRERGHMLENHVERLWAYLTIQELLAKRMKVDREERANLSSQALQMSLDYGFVTPLTSMSIRGMADQDGLKPTIDKPSEDSPPLEMLGPRRTFVLSALQPSPTHSSSNTQRLPDRVTGVGHRPFNFIHSTCPRKRDTLCFNINEEPGVILEPGYRDPNTGFFSGMGQLIGQQGPGSLGEGIDGHYFGAAGEFANPATELFSWEVTPSEHLRLNPGFGGPVFSWRRDQVFLSGRDGVVVTINKKRNTVVSVDDGGTFEVVLHRVWKGSSVHQDFLGLLMCWDKSIGMSSPGRKGCWGQFFHPIRFLKVSDIPPQGSDPHKSPNATMVVRNPPGLTVTRGLQKDYSKDPWHGAEVSCWFIHNNGAXITDCAYTDYIVPDIF

SEQ ID NO: 51845 - protein, 336 aa, Homo sapiens
MATHPDGFRLEGPLAAAHSPGPCTVLYEGPVRGLCPFAPRNSNTMAAAALAAPSLGFDGVLGVLVADTSLTDMHVVDVELSGPRGPTGRSFAVHTRRENLPSQRGALLMDLETPEEMQARSLGRPIKSSKQYLRQVIAEYEALDRELPCIRKFPTPPASQPLCLCMETLDSLLKTDCEFVKGSVMKSTAHVRGETNGQRKGTLTGARTEDKTSPTNPGGDGSTLDSPLASSLRGRHGTQGPHWLWGLGDVRGEPLVIGSITLRKIKGKKGEPRQPEPLWLRPIAPALGPSGRRGLAPDSRLNPHRSLLGTGNYDVNVIMAALQGLGLAAVWWDRRR

SEQ ID NO: 51846 - protein, 145 aa, Homo sapiens
MADRGPWRVGVVGYGRLAGAEDGMSQAPGAQPSPPTVYHERQRLELCAVHALNNVLQQQLFSQEAADEICKSTTYLGVSVPNHKQIKDCIYRSTGTFPDCTSEQVLYSLLYGFSRPESVWEDLSPVPRLALAQRFPTALNAGSIV

SEQ ID NO: 51847 - protein, 224 aa, Homo sapiens
  misc_feature (1)...(224): Xaa = X or * as defined in Table 2
IRHQGAAAQEGDAETPGSVERRGRRAGAEDGMSQAPGAQPSPPTVYHERQRLELCAVHALNNVLQPAAFSQEAADEICKRLAPDSRLNPHRSLLGTGNYDVNVIMAALQGLGLAAVWWDRRRPLVPSWPCPKGLGXILNLPSPVSLGLLSLPLRRRHLRWPCARLVTVSYYNLDSKLRAPEGPGGLRTELRGLSLAAALAQGLCEVLLVVTKEVEEKGSWLRTD

SEQ ID NO: 51848 - protein, 75 aa, Homo sapiens
  misc_feature (1)...(75): Xaa = X or * as defined in Table 2
ELLSPLLVAPGPSDLTVTGLKSFSSPSLCSLNTLLAGTSRLMVAXLYESLGQGEDLGLLTPGPEFLSISSYCNFM

SEQ ID NO: 51849 - protein, 639 aa, Homo sapiens
  DOMAIN (150)..(186): Ribosomal protein L11 proteins domain identified by eMATRIX, accession number BL00359A, p-value=5.860e-20, raw score of 20.66
MPLKRRSRLQLGSSYLLEVSLTLCSTHVQGQTRGKEDKTQCLSADSFFWDKMKLIILEHYSQASEWAAKYIRNRIIQFNPGPEKYFNLGLPTGAFLDGEGAVDKGGESRQQGPGALSESLSYHTCESKKSFISLIRLQVFISKPEVGDVIRTIVRAGLAMPGPPLGPVLGQRRASINQFCKEFNERTKDIKEGIPLLTKIFVKPDGTFEIKIGQPTVLLSEGRYRPGDNWRVTSYSGLQQRGHGIAQDLMPRLDVDAAGVASVVEEPTLTPHQFPRGASPGTFLHSLFEDLDFTQPVDPNWVREKLELGGFESQWEPVLTEWITAVLQAPLNETGVSLSQLSARNKQVEMEFYLPISEPLIASQLDTLIRQFDPLSAGCPPLEFMQVRGMLKGFIDLVFRHEGRYYLLDYKSNWLGEDSSAYTQQAMAAAMQAHRYDLQYQLIPWRTSAEPQSSALRPCLGPTHRRQPTRPRNALLNRRAASSVLGSCQLSQADPAGATAGIGRTLRSRRGRPCLSGASRRPKAALPARPPSPPLTASLCSQEALFSSSDGAREFEFLPISRGDHEAVVYLGQRLSQQSQPVLRPGYLIPPGNEFGTRIMGPGDFGFLHASSSIESEAKPASLSPLVKRYIQIWPPGSP

SEQ ID NO: 51850 - protein, 569 aa, Homo sapiens
  DOMAIN (439)..(472): PROTEIN INTERGENIC REGION LEUS-G domain identified by eMATRIX, accession number PD02292, p-value=2.753e-11, raw score of 21.23
  misc_feature (1)...(569): Xaa = X or * as defined in Table 2
LPRVLGHSGHRGGLSSRRSQGLVSRFRLRALCGAGSDMWRLPGLLGRALPRTLGPSLWRVTPKSSSPDGPQTTSSTLLVPVPNLDRSGPHGPGTSGGPRSHGWKDAFQWMSSRVSPNTLWDAISWGTLAVLALQLGRHIHFQAFLAAGPKRVEHCSWHSPLDRFFSSPLWHPCSSLRQHILPSPDGPAPRHTGLKENPRLGKEEASAQPRNFSHNSLRGARPQDPSEEGPGDFGFLHASSSIESEAKPAQPQPTGEKEQDKSKTLSLEEAVTSIQQLFQLSVSIAFNFLGNQMDPAPRQEGTENMKSGDHTAAFSYFQKAAARGYSKAQYNAGLCHEHGRGTPRDISKSVXKAGLYYQLAASQGHSLAQYRYARCLLRDPASSWNPERQRAVSLLKQAADSGLREAQAFLGVLFTKEPYLDEQRAVKYLWLAANNGDSQSRYHLGICYEKGLGVQRNLGEALRCYQQSAALGNEAAQERLRALFSMGAASPGAPTNLTVTGLKSFSSPSLCSLNTLLAGTSRLPHASSTGNLGLLCRSGHLGASLEASSRAIPPHPYPLEKNVVRLGFG

SEQ ID NO: 51851 - protein, 192 aa, Homo sapiens
LATPDVRYCYLSTYTSLPNPARRFFLFSLCCKFSHSHKTATVKKYNKSEYPWDLVKAHLQGAFTSNITFDISELQNKILDLNRHTQEFQPSLEDWTEFQEGLESLNPWTYLKYHSNILYVVLGVMLFCLCLLFIVCKIGWTANRRMRAAQPGLTFFQLIHKQGDMQGAEGPWDVTNSAFHWRLYDQTANCLS

SEQ ID NO: 51852 - protein, 122 aa, Homo sapiens
  misc_feature (1)...(122): Xaa = X or * as defined in Table 2
LCIILFKQLSTWRTGCAQPTKRGYTELQTEGPMLKSMFLWLGEQVQILQLHSNCIVILTTLVFCVTNLEXFIVCKIGWTANQKMGAAKPGLTFFLLICKQKGDMXGAKGPWDVINSAFHXRM

SEQ ID NO: 51853 - protein, 103 aa, Homo sapiens
  misc_feature (1)...(103): Xaa = X or * as defined in Table 2
MGAAAYLLVSLIPSNSFRQMFRSTRSLHIPTRDLPLSPDTTVVLHQVYNVLLGLLSRAKLYVDAAVHGTTKLXPYFSXMTYCLISKTEKLMFSTYFMDLWNLX

SEQ ID NO: 51854 - protein, 46 aa, Homo sapiens
MEVPSSFSEDMSNIRSQHAEELQMKITCIFSILPKGQSDNGYVLCN

SEQ ID NO: 51855 - protein, 369 aa, Homo sapiens
  DOMAIN (271)..(318): Intermediate filaments proteins domain identified by eMATRIX, accession number BL00226D, p-value=5.821e-10, raw score of 19.10
  misc_feature (1)...(369): Xaa = X or * as defined in Table 2
IVWLMTTGGQCRYXLSALIKLXDRWFQRLCIHVIQRLRPVHAHLYLQPGMEDGNSFRQMFRSTRSLHIPTRDLPLSPDTTVVLHQVYNVLLGLLSRAKLYVDAAVHGTTKLVPYFSFMTYCLISKTEKLMFSTYFMDLWNLFQPKLSEPAIATNHNKQALLSFWYNVCADCPENIRLIVQNPVVTKNIAFNYILADHDDQDVVLFNRGMLPAYYGILRLCCEQSPAFTRQLASHQNIQWAFKNLTPHASQYPGAVEELFNLMQLFIAQRPDMREEELEDIKQFKKTTISCYLRCLDGRSCWTTLISAFRILLESDEDRLLVVFNRGLILMTEGKDTFMIVCCXTTSFLIISSSIYYAELQSTVKNLLKH

SEQ ID NO: 51856 - protein, 145 aa, Homo sapiens
  DOMAIN (99)..(118): BINDIN PRECURSOR SIGNATURE domain identified by eMATRIX, accession number PR00761E, p-value=7.063e-09, raw score of 14.32
NAHLYLQPGMNDGSDDMDTSVEDIGGRSCVTRFVRTLLLIMEHGVQPHSKHLTEYFAFLYEFATMGEEESQFLLSLQAISTMVHFYMGTKGPENPQVEVLSEEEGEEEEEEEDILSLAEEKYRPAALEKMIALVALLVEQSRSER

SEQ ID NO: 51857 - protein, 46 aa, Homo sapiens
PVLISFQILGVLVAYEGLPLHLALFPKLWTELCQTQSAMSKNCIKL

SEQ ID NO: 51858 - protein, 322 aa, Homo sapiens
  misc_feature (1)...(322): Xaa = X or * as defined in Table 2
DLRALALLLSVHTPKQLNPALIPTLQELLSKCRTCLQQRNSLQEQEAKERKTKALALWTTIITFRVGGGSNTLGVTGLRVVCSAEPPKYKCXKQNXLPTSPPNVILMTFREVSLLACVFTDDEGATPIKRRRVSSDEEHTVDSCISDMKTETREVLTPTSTSDNETRDSSIIDPGTEQDLPSPENSSVKEYRMEVPSSFSEDMSNIRSQHAEEQSNNGRYDDCKEFKDLHCSKDSTLAEEESEFPSTSISAVLSDLADLRSCDGQALPSQDPEVALSLSCGHSRGLFSHMQQHDILDTLCRTIESTIHVVTRISGKGNQAAS

SEQ ID NO: 51859 - protein, 1339 aa, Homo sapiens
  DOMAIN (674)..(721): Intermediate filaments proteins domain identified by eMATRIX, accession number BL00226D, p-value=5.821e-10, raw score of 19.10
  misc_feature (1)...(1339): Xaa = X or * as defined in Table 2
EEENGREYKFDVSSELLEWIWHDNMQFLQDKNIFEHTYFGFMWQLCSCIPSTLPDPKAVSLMTAKLSTSFVLETFIHSKEKPTMLQWIELLTKQFNNSQAACEWFLDRMADDDWWPMQILIKCPNQIVRQMFQRLCIHVIQRLRPVHAHLYLQPGMEDGSDDMDTSVEDIGGRSCVTRFVRTLLLIMEHGVKPHSKHLTEYFAFLYEFAKMGEEESQFLLSLQAISTMVHFYMGTKGPENPQVEVLSEEEGEEEEEEEDILSLAEEKYRPAALEKMIALVALLVEQSRSERHLTLSQTDMAALTGGKGFPFLFQHIRDGINIRQTCNLIFSLCRYNNRLAEHIVSMLFTSIAKLTPEAANPFFKLLTMLMEFAGGPPGMPPFASYILQRIWEVIEYNPSQCLDWLAVQTPRNKLAHSWVLQNMENWVERFLLAHNYPRVRTSAAYLLVSLIPSNSFRQMFRSTRSLHIPTRDLPLSPDTTVVLHQVYNVLLGLLSRAKLYVDAAVHGTTKLVPYFSFMTYCLISKTEKLMFSTYFHGIWGTFSQPXTFXAQAIATNHNKQALLSFWYNVCADCPERNIRLIVQNPVVTKNIAFNYILADHDDQDVVLFNRGMLPAYYGILRLCCEQSPAFTRQLASHQNIQWAFKNLTPHASQYPGAVEELFNLMQLFIAQRPDMREEELEDIKQFKKTTISCYLRCLDGRSCWTTLISAFRILLESDEDRLLVVFNRGLILMTESFNTLHMMYHEATACHVTGDLVELLSIFLSVLKSTRPYLQRKDVKQALIQWQERIEFAHKLLTLLNSYSPPELRNACIDVLKELVLLSPHDFLHTLVPFLQHNHCTYHHSNIPMSLGPYFPCRENIKLIGGKSNIRPPRPELNMCLLPTMVETSKGKDGRLWIRMLLDYFFSYHQFIHLLCRVAINCEKFTETLVKLSVLVAYEGLPLHLALFPKLWTELCQTQSAMSKNCIKLLCEDPVFAEYIKCILMDERTFLNNNIVYTFMTHFLLKVQSQVFSEANCGQFGSALFITNLISQYQNLQSPDFSNRVEISKASASLNGDLRALALLLSVHTPKQLNPALIPTLQELLSKCRTCLQQRNSLQEQEAKERKTKDDEGATPIXKGGRVSSDEEHTVDSCISDMKTETREVLTPTSTSDNETRDSSIIDPGTEQDLPSPENSSVKEYRMEVPSSFSEDMSNIRSQHAEEQSNNGRYDDCKEFTDLHCSKDSTLAEEESEFPSTSISAVLSDLADLRSCDGQALPSQDPEVALSLSCGHSRGLFSHMQQHDILDTLCXGPLESTIHVRSQGISGQRETKAAFLDIRGVGIVLLFKVPHPQPPCCLY

SEQ ID NO: 51860 - protein, 54 aa, Homo sapiens
STPSLIWREEVLALLRAPPRLGAPPPWGAAAGRTRTPAPSPPKPNRFPRRKTKA

SEQ ID NO: 51861 - protein, 332 aa, Homo sapiens
RVPRTWLLPSFCASRSRENEGLSEFGASQTVTPSPASSVQAWEAMEPEFLYDLLQLPKGVEPPAEEELSKGVCKKYLPPTSRKDPKFEELQKVQQEWINATLLPEHIVVRSLEEDMFDGLILHHLFRKWAALKLEAEDIALTATSQKHKLTVVLEAVNRSCSWRSGRPSGAWESTWNKDLLSTLHLLVALAKRFQPDLSLPDHTNVQVEVITIEVAANFVNQKLDRLGLSVQNLDTQVGTGVILLLLIGQLEGFFLHLKEFYLTPNSPAEMVSFVTLALELLIGRGPAQLPCLALKVSATMDAKSTLRVLYGLFCKHTQKAHRDRTPHGAPN

SEQ ID NO: 51862 - protein, 418 aa, Homo sapiens
  misc_feature (1)...(418): Xaa = X or * as defined in Table 2
AAGLLPPGLVPEDPRRTRNLLPFGIQGPPFALSRPLFSCVESGWAWEAMEPEFLYDLLQLPKGVEPPAEEELSKGGKKKYLPPTSRKDPKFEELQKPAVLMEWINATLLPEHIVVRSLEEDMFDGLILHHLFQRLAALKLEAEDIALTATNQKHKLHSWCWRPXTGVCSWRSGRPSGAWESIFNKDLLSTLHLLEALAKRFQPDLSLPTNVQVEVITIESTKSGLKSEKLEEQLTEYSTDKDEPPKDVFDELFKLAPEKLNAVKEAIVNFVNQKLDRLGLSVQNLDTQFADGVILLLLIGQLEGFFLHLKEFYLTPNSPAEMLHNVTLALELLIGRGPAQLPCLALKTIVNKDAKSTLRVLYGLFCKHTHKAHRDRTPPWSPELTLTASKAQSLPVSPAGGPEAAGCPPTVPLFPVHS

SEQ ID NO: 51863 - protein, 29 aa, Homo sapiens
FVHIPGPPGRLNLLSLKCIKDHYRKDPLT

SEQ ID NO: 51864 - protein, 77 aa, Homo sapiens
VNELVQVETYLRSEGVLVRYWYPIDMLERPPAGYRRTATNGLVTLDNTNLQIHRYNWALLSTGSQKSTNFALPHGPC

SEQ ID NO: 51865 - protein, 113 aa, Homo sapiens
  misc_feature (1)...(113): Xaa = X or * as defined in Table 2
GKFRYSPALHSWATRLRTSTAAGHCCMNSSQNKLSSKSWAMTRHALNVKRFTIFQSHQCSLSKKVNLSLFQQGAERLPSQELTHLLLQEVRCEXRDFPPEEATWTGLPVLPSQ

SEQ ID NO: 51866 - protein, 37 aa, Homo sapiens
PTPVSKASPYYSPAVPGGAAPDERKRLWKRGAPTLEL

SEQ ID NO: 51867 - protein, 72 aa, Homo sapiens
FRAPRECFRLFEPACSHLTLPQSPSWLTPALGEACPGALLSMPLHHCQFRPRLFTGKLKSFPMETPMMTPDP

SEQ ID NO: 51868 - protein, 2955 aa, Homo sapiens
  DOMAIN (1846)..(1866): HISTONE H5 SIGNATURE domain identified by eMATRIX, accession number PR00624G, p-value=4.900e-09, raw score of 4.08
  misc_feature (1)...(2955): Xaa = X or * as defined in Table 2
ESSEDVSGGLPFLVDLGFRSVCVSLFHVKNPVQWDQKLPKKKKPVRSYCGSKLLQREVIQPDVMEEMVVSCVIKHLNLVDALQSLINFQYQEEHAEEYDLLCKIMGETFKKLNAMERQLQNKMKELELLCSMKEVSFDGNDLENMVLSLREKFLQEVNSLIQKPSHPLAKTKTLVKSLMNRAELLLHVTIAAQSGLTRSISGTPAETPACKSASETKVISHAVRQPVFLRSMSAPSDLEMIGNEDLEFTRANQRRRHVTSHRSSSFTLLQSLAIEDSRDKPTYSVLLGQLFAFIGTNPDQAVSSSSFLLAAQTRWRRGNTRKQALVHMRELLTAAVRVGGVTHLVGPVTMVLQGGPRIEELTCGGMVEQVQEAFGETMTSVVSLCARYPIACANSIGLLCTIPYTRSEEKCLVRSGLVQLMDRLCSLSNQTESSSSEKQTKKQKVATMAWAAFQVLANRCVEWEKEEETGSYYVAQLCRAALPLMSVEDCGNVELPPWSYSVPSLNSEQEDPSDPASKIASLLLAKLADYVVPGCQTVLSPTASEPDTTLTKTSPKNSLKGDKDPGEESEAVDGKLSIFYPQAGRPVIPMKVLQPLLSSSEGRPFRLGTGANMEKVVKMDRDMTKGGCCEVITEEAAAALRKATKWAQSGLIVSIGPPVESINPETVSGLSTGDKKKTAQTSICRERNSELARTDPVRPFISGHVANSMAAEVIALLHSLLMAPESNAAQIWTTTAEKVLSRALMYIPQLGKYAESILENGSSSGRKLAKLQRIARQAVAALCALGGFKETIKIGSEVQALPLHKLSITEKVVQAVQSMLLPQEGSLSIHTSLPATGDGSAPVMAVVRLLAEIRTRACLVMAQLLEDSLFCEEFIQQCPAAVEVLNLVAQECSAGERLAVVEVQCERLRMLYRDCARPPPPPLQADRRQAPSFYWEIEIVSYGDTDDDTGPIVSFGFTTEAEKRDGAWTNPVGTCLFHNNGRAVHYNGSSLLQWKSVRLDVTLSPGDVAGIGWERTEGTPPPPGQPAKGRVYFTYCGQRLSPYLEDVSGGMWPVVHIQKKAEIKINVSLSKSFIWSPFQNTKTRANFGSRPFAYAEGQAHRNAADLCTDLAEEISANFEALPFAMASDSDNDAGTSIASDPGTHGPPCRIAAVATAQQQYDSDTSCHYKVELSYENFITSGPDPHPPPIADDESDDDDDDDIPQEDHYALLVKAWETKVFPTIRRRFRNEAERKSGLDQIKGALQLGMVDIARQTVEFLYEENGGIPRDLYLPTIEDIKDEANKFTIDKVRKGLTVVTRSPDSNNVASSAVGTALPKFAIRGMLKTFGLHGVVLDVDSVNELVQVETYLRSEGVLVRYWYPIXHVGKGPPAGYRRTATNGLVTLDNTNLQIHRELLRCEAALARLYCRMALLNIFAPKLPHLFTRLFHIPAIRDITLEHLQLLSNQLLAPPLPDGTISSSSILLAQSLQHCIHSQNCSATDLFYQGNSQTVREWLNVAITRTLHQGEESLLELTKQICSFLQTAPEQFPSEEFPISESKVNMDVNFPGAAFVVVSCKESQSGFRKDSSLYKAPWARVLVYGLGHKVKRNGQLNLIEAACYPRDASPANTGLAPPPTADQYPSVVLSTDRVHIKLGVSPPPGAVLVLHSLPLEFPLAMAFAEQLLSWKSEDSEGKSEDEPDTIPTSVLLQVVELLGNFLWTTDMAACVKELVFHLLAELLRTVHTLEQRRHPAGLSSSIALQLNPCLAMLMALQSELHKLYDEETQNWVSGGACGGSGGAAAGDQGRFSTYFHALMEGCLAVAEVTLPTNMSVTASGVTSATAPNLSDSSSSSSSSPGQTPQSPSLLSKRKKVKMKREKASSSGKRQSSRTVDSDPTVLSIGGSKPEDMLWFHRALTLLIILRHLTRKDPQGLGVTSDAIADACQALVGPTAHSRLLVISGIPTHLDEGVVRGAIRKACNAHGGVFKDEIYIPLQEEDTKKPKDKAEGGDGKVEPEKTLAFPGTDSMEVSTSSSLTPAMSISASASTSQASICSSQGISQTVSDLSVDPLPAGLELPIPPGLLEPHAVSSQESLDISLCSTGSLGSLGSLGEPLDNAETASVSDMGSMYTVTSLDNQPLAARPIKGFAVVEIRSRAKIEKIRASLFNNNDLIGLSSLDGEDELMEMSTEEILTVSVVNQSLFDTQGSPGLEDYFNDKSIKGEKLVPGAREVLTEIFKSCAHSEQTLSLTPAKPIRVSDIYLSKEQINSQTPGNLLHLFFTNVRPPKKVLEDQLTQILRKYGVPKPKFDKSKYSKAGKEQHPVKVVSTKRPITKPPAKDKAVLNSVSRTALSEKKPTVKPKSPEKSKPDEKDPEKSPTKKQEVPEEKYLTLEGFHKFVIDRARQDIRSVWRAILSCGYDLHFERCACIDVRHAQKASRKWTLEMDVALVQYINQLCRHLAITPARLHPHEVYLDPADAADPRVACLLNVPIESLRLRFALLQSLNTTLETFFLPLVELRQTPMYTHSIAALLKEAKGLIFYDTKVTVMNRVLNATVQRTADHAAPEITLDPLEIVGGEIRASENSYFCQAARQLASVPSSQLCVKLASGGDPTYAFNIRFTGEEVHGTSGSFRHFLWQVCKELQSSSLSLLLLCPSSAVNKNKGKYILTPSPITYGEEQLLHFLGQLLGIAIRADVPLPLDLLPSFWKTLVGEPLDPEQDLQEADILTYNYVKKFESINDETELEALCAEIASQHLATESPDSPNKPCCRFTYLTMTGEEVELCSRGRHILVAWENKDIYAAAIRSLRLRELQNVECVTAVRAGLGSIIPLQLLTMLSPLEMELRTCGLPYINLEFLKAHTMYQVGLMETDQHIEFFWGALEMFTQEELCKFIKFACNQERIPFTCPCKDGGPDTGHVPPYPMKIAPPDGTAGSPDSRYIRVETXLFMIKLPQYSSLKIMLEKLRCAIHYREDPLSG

SEQ ID NO: 51869 - protein, 119 aa, Homo sapiens
RPRRPAHRRTRVPAHNPLWRFFECKRAVFVRTVAAKAWLITSSRPSTNTLALRVTIISSAASIWTTAAITVVFHARNSRLFAADARQHSVTPYTRIGLDRWSNWTGRMILNVKAMILTV

SEQ ID NO: 51870 - protein, 437 aa, Homo sapiens
  DOMAIN (265)..(284): NADH-Ubiquinone/plastoquinone (complex I) various chains. domain identified by eMATRIX, accession number PF00361B, p-value= 4.600e-11, raw score of 14.16
  misc_feature (1)...(437): Xaa = X or * as defined in Table 2
KPENKKSRTGRNRTKSTPGYRARPAAATARISARSTKXWKNSLAGRWARHICWTLWALIPRITLRHVMAAGFPQRMQKDYRDAIDALCDANRFGQKKRLGFWRYKEDSKGVGLCSYLLIGFYYTDPKNGAAAMKAFVVTRVGDVFLAFALFILYNELGTLNFREMVELAPAHFADGNNMLMWATLMLLGGAVGKSAQLPLQTWLADAMAGPTPVSALIHAATMVTAGVYLIARTHGLFLMTPEVLHLVGIVGAVTLLLAGFAALVQTDIKRVLAYSTMSQIWLRCSSRLACRHGCGGSLECLQHEGIPYSRMGRPHTTSALRRFTSEFGMGSACFTLGYFFMYKQAVILLLMLFTASVSAACTLPIAIDHGTPGPAELLTVALRYNLSSYDAAYLELALRLEIPIAKGSPNFAFRRAATGNEGIKMHFLRNKGILWI

SEQ ID NO: 51871 - protein, 479 aa, Homo sapiens; identical to SEQ ID NO: 48044

SEQ ID NO: 51872 - protein, 63 aa, Homo sapiens
  misc_feature (1)...(63): Xaa = X or * as defined in Table 2
PKTPAGPVEPMHQVPSSKRVPTRDKRTRGDSTRHSGQSKPTKRYNHAYEIXPRIKWFIPDAGC

SEQ ID NO: 51873 - protein, 42 aa, Homo sapiens
PDSPHPPCVLPAPSPYDSPQTRPFWHTALNMPGSIWYELVPS

SEQ ID NO: 51874 - protein, 46 aa, Homo sapiens
  misc_feature (1)...(46): Xaa = X or * as defined in Table 2
GCDPAPGLPAPPHTQPDHXNQRQIGIGXFLTGTVPATHLRQRLAAA

SEQ ID NO: 51875 - protein, 122 aa, Homo sapiens
  misc_feature (1)...(122): Xaa = X or * as defined in Table 2
AALQMRDTSDPADCGEQSVCGYSEPVPEYACFHRIQDLHDTETAACFSHAGSGRTHVXSQSEHAAGSVLWSYRYRCXTGTAGYTDRFSQQRCHVRRGISPRCWPEYQSRSWCRLFPSPESAG

SEQ ID NO: 51876 - protein, 1245 aa, Homo sapiens
  DOMAIN (74)..(129): Sodium:solute symporter family proteins domain identified by eMATRIX, accession number BL00456C, p-value=5.622e-33, raw score of 24.55
MAEASVFQTVDPWRPGFATIPDFLKERYDKTTRIIIDFCFLIATGVCFLPIVLYSGALALNSLFHVGESLQISHGAAIWLLVILLGLAGILYAVIGGLRAMAVADSINGIGLVIGGLMVPVFGLIAMGKGSFMQGIEQLTTVHAEKLNSIGGPTDPLPIGAAFTGLILVNTFYWCTNQGIVQRTLASKSLAEGQKGALLTAVLKMLDPLGLKPDLLAYNTALRALIPQRLIAFDDAVRSTLKEEEKLVNSSDWGYDAQAFARWRPEYVNQIGGKERYFFGNILWQTRALMDRAIGHKLAKGRPEREYLQTGDAVDSWKVIVVEPEKQLTLLFGMKAPGLGRLCFSLEDKGDYRTIDVRAFWHPHGPHWIDAKSGLTHSLVTTAANEHDLNQLGNLLHGEEQFVSADAGYQGAPQREELAEVDVDWLIAERPGKVRTLKQHPRKNKTAINIEYMKASIRARVEHPFRIIKRQFGFVKARYKGLLKNDNQLAMLFTLANLFRADQMIRVGMMILVTGGARSGKSRHAEALIGDSSQLIHPFGEHRKLRLTVRLTQAQMYAHHMNRFSGHRRHNAAVEHAALFRTIDRNIAILIMFNGITRQYGVAVMPFRVYGIATVGKIAPHSVGEKLVVRGIGPVFHMQRMNFVRAHHFLQANNIGADGTHGVAKFRQNEASVKRGKAFVNIDGIPTSTGLSALRQGTDRPLGGFHGCIHEVRINNELQDFKALPPQSLGVSPGCKSCTVCKHGLCRSVEKDSVVCECRPGWTGPLCDQEARDPCLGHRHLEQKPKMIVVSECYWTAAAKHADIVFPITTSFERNDLTMTGDYSNQHIVPMKQAVAPQFEARNDFDVFADLAELLKPGGKEIYTEGKDEMAWLKFFYDAAQKGARAQRVTMPMFNAFWQQNKLIEMRHSEKNEQYVRYGDFRADPVKNALGTPSGKIEIYSKTLEKFGYKDCPAHPTWLAPDEWKAKKPPGSENSLPGAVLFQPQSGFHGVEEIGLVGQSNNIGGMRAIRRNTQLTAAVLRGELEAIQDGVRKFTPETVASLQAEVGTLTKLVDDLHQLSMSDEGALAYQKAPTVLPYLAIADRLMQLFNNLLENSLRYTDSGGSLQISAGQRDKTVRLTFADSAPGVSDDQLQKLFERFYRTEGSRNRASGGSGLGLAICLNIVEAHNGRIIAAHSPFGGHYSRVTAGTGFTERSMTELPIDENTPRILIVEDEPKLGQLLIDYLRAASYAPTLISHGDHFRAL

SEQ ID NO: 51877 - protein, 74 aa, Homo sapiens
  misc_feature (1)...(74): Xaa = X or * as defined in Table 2
WSVENYHRRGYGGHIPLPAASPAVAAQWCDAGRXVPPAARRWHRHQVYLTYLITLDRGLSRARFCIPSAHCSAY

SEQ ID NO: 51878 - protein, 143 aa, Homo sapiens
  misc_feature (1)...(143): Xaa = X or * as defined in Table 2
RLVVDIFHDNRHAFPRRLVSDAAAHNACTQHRGLFRGFNVFGEFLRFAFYILIVKENADQCAGFVGMRQRDKTFVFQVXGFFTTKTGRSFNGFYCGDGGRIMFLPLFVRPSLXRWXSSWWLQSCSVLVVPASADVLLSSRGRR

SEQ ID NO: 51879 - protein, 165 aa, Homo sapiens
  DOMAIN (81)..(122): Orn/Lys/Arg decarboxylases family 1 pyridoxal-P attachment si domain identified by eMATRIX, accession number BL00703G, p-value= 4.375e-34, raw score of 23.28
  misc_feature (1)...(165): Xaa = X or * as defined in Table 2
LPTLPMMVCCTTPTSSRKHWMXNPSTLTHAWVPYTNFSPIYEGKCGMSGARVEGKVIYETQSTHKLLAAFSQASMIHVKGDVNEETFNEAYMMHTAASPHYGIVASTETAAAMMKGNAGKRLINGSIERAIKFRKEIKRLRTESDGWFFDNAAGYIDTITLGGPS

SEQ ID NO: 51880 - protein, 1750 aa, Homo sapiens
  DOMAIN (1424)..(1468): Sigma-54 interaction domain proteins ATP-binding region A proteins domain identified by eMATRIX, accession number BL00675A, p -value=7.400e-19, raw score of 24.86
MDWLAKYWWILVIVFLVGVLLNVIKDLKRVDHKKFLANKPELPPHRDFNDKWDDDDDWPKKDQPKKPGNLSFTSFQSHHHRQAYRHLEYRQYARVHLRLQQCRTGPATSDSGIEVNQNIAVARAGDIVSARFGIPWNATIRIGICIRCPSGKSSHMRGATINITLIGKQQEKEANGLDPEVLAEINREREAFLAAQQGSTSTELFTTIEGNYADAVRLLTTAHSVPFDGKATLFVAERTLQEGMSPERAWSPWIAELDIYRQDCAHVDIISPGTFEKIGPIIRATLNRLYPMSSLNIKQGSDAHFPDYPLASPSNNEIDLLNLISVLWRAKKTVMAVVFAFACAGLLISFILPQKWTSAAVVTPPEPVQWQELEKSFTKLRVLDLDIKIDRTEAFNLFIKKFQSVSLLEEYLRSSPYVMDQLKEAKIDELDLHRAIVALSEKMKAVDDSASKKKDEPSLYTSWTLSFTAPTSEEAQTVLSGMFAQTAGKHYPAPITAVKTIEAAARFGREEALNLENKSFVPLAHTNEARALVGIFLNDQYVKGKAKKLTKDVETPKQAAACRYVMKDINDKSLTLGMTEAAKLLNKQLERGKIDGLKLAGVISTIHPTLDYAGFDRVDIVVEAVVENPKVKKAVLAETEQKVRQDTVLASNTSTIPISELANALERPENFCGMHFFNPVHRMPLVEIIRGEKSSDETIAKVVAWASKMGKTPIVVNDCPGFFVNRVLFPYFAGFSQLLRDGADFRKIDKVMEKQFGWPMGPAYLLDVVGIDTAHHAQAVMAAGFPQRMQKDYRDAIDALFDANRFGQKNGLGFWRYKEDSKGKPKKEEDAAVEDLLAEVSQPKRDFSEEEIIARMMIPMVNEVVRCLEEGIIATPAEADMALVYGLGFPPFHGGAFRWLDTLGSAKYLDMAQQYQHLGPLYEVPEVGVAVGLHGASVQQQKSFCPSVSIYSQPIPGLQQLCAAPPPPGLVHRTAISEGVGMPLHVVNLPPKRFARKRLEPKWVRITWQFADMQDIGKTPLTACRCQQVFSNVTRRHQRPQHRHNATFAPDLPITIELFDYHIPRIVSISSAFSPIIDVASALRRVFSRSGVITACNNQSISCASRVSKTLSRFESVVGVNFATRLHISEDIRTPECIYCLLRVAISNNAVPADGARYREKSVLLGDRVAPSGGERCKRGNGGARKGGRARGGAPRDPKGAARAKANAWPWTEPRECSLIAGEIAIECQRGIGHQDRFQRLITTLRQVLECDASALLRYDSRQFIPLAIDGLAKDVLGRRFALEGHPRLEAIARAGDVVRFPADSELPDPYDGLIPGQESLKVHACVGLPLFAGQNLIGALTLDGMQPDQFDVFSDEELRLIAALAAGALSNALLIEQLESQNMLPGDATPFEAVKQTQMIGLSPGMTQLKKEIEIVAASDLNVLISGETGTGKELVAKAIHEASPRAAKLLRVLQYGDIQRVGDDRCLRVDVRVLAATNRDLREEVLAGDCRDRFVSSPERVSTFGAAAAAVEALRDHLNTLGGEHHDPVQLLNIYYETPDNWLRGHDMGLRIRGENGRYEMTMKVAGRVTGGLHQRPEYNVALSEPTLDLAQLPTEVWPNGELPADLASRVQPLFSTDFYREKWLVAVDGSQIEIALDQGEVKAGEFAEPICELELELLSGDTRAVLKLANQLVSQTGLRQGSLSKAARGYHLAQGNPAREIKPTTILHVAAKADVEQGLEAALELALAQWQYHEELWVRGNDAAKEQ

SEQ ID NO: 51881 - protein, 198 aa, Homo sapiens
  misc_feature (1)...(198): Xaa = X or * as defined in Table 2
LITARGQVADRNLRDLLAPWVPDAPSRALPEMTLDSRVAAAVDLFVARIGHQADGRRYIPQAIAQGVAAIIAEAKDEATDGEIREMHGVPDIYLSQLNELLSALAGRCYHEPSDNLRLVGVTGTNGKTTTTQLLAQWSQLLGEISAVMGTVGNGLLGKKKEKAAIQYNTLCKSCTLTHPKPHNESDHIRCRCXRADFS

SEQ ID NO: 51882 - protein, 742 aa, Homo sapiens
  DOMAIN (46)..(73): PEP-utilizing enzymes phosphorylation site proteins proteins domain identified by eMATRIX, accession number BL00370D, p-value= 4.764e-13, raw score of 22.48
MMRTSGGTRDNESSSDDERERENRLSDEKSNEYANLVGGERYEPDEENPMLGFRGAGRYVSDSFLRLCSSLEIVKARETVALIQGLKHDLLADDTALRALIPQRADRFPMNAVRSTLKEEEKLVNSSDWGYDAQAFARWRPEYGYFAKQAGFTVKTSASLAALWQVVNQIGGKERYFFGNILWQTRALMDRAIGHKLAKGRPEREYLQTGDAVDSWKVIVVEPEKQLTLLFGMKAPGLGRLCFSLEDKGDYRTIDVRAFWHPHGNRAEREKPRFQPYSRRKSFIGQNMLLPMSIMPPVFRRVICPLGVARLGKFRDPVYLVCVFTRQIFRYYTSGDEFLQINTTGGEDIDDIDDIKLFVYEESYGISKESHWREAINAKAMGAMTLNWQEKRWQRFFNSEEPGNIEPVYMLEKVENQNHAKWEVHNFTMGYQRQVTEDTYEYLLLNVVGVPVPDNIHPMTKDEAGVWSWRTPILKGNLYEYFFNVDGVRSIDTGTAMTNPQRQVNSSMILVPGSYLDTRSVAHGDLIAITYHSNALQSERQMYVWTPPGYTGMGEPLPVLYFYHGFGDTGRSAIDQGRIPQIMDNLLAEGKIKPMLVVIPDTETDAKGIIPEDFVPQERRKVFYPLNAKAADRELMNDIIPLISKRFNVRKDADGRALAGLSQGGYQALVSGMNHLESFGWLATFSGVTTTTVPDEGVAARLNDPAAINQQLRNFTVVVGDKDVVTGKDIAGLKTELEREKN

SEQ ID NO: 51883 - protein, 511 aa, Homo sapiens
  misc_feature (1)...(511): Xaa = X or * as defined in Table 2
MDASGHHVRGFASGMGCCRVRRTMKRETGGGRLAGFRLVGTLGQHLGAHRSASKGHQILAAARHVDRLAKLQLANVSCHEVDLSWPDNLPALLQDIDTVYFLVHSMGEGGDFIAQERQVALNVRDALREVPVKQLIFLSSLQAPPHEQSDHLRARQATQEIRSEGNVPVTELRAEIIVGAGSAALEVMRDMVYNLPVLTPPRWVRSRTTPIALENFLHYLVALLDHPASEHRIFEAAGPEVFSYQQQFEHFMAVSGKRRWFDPPSPLPTRWISVWFLNVITSVPPTTARALIQGLKHDLLADDTALRALIPQRLIAFDDAVRSTLKEEEKLVNSSDWGYDAQAFARWRPEYGYFAKQAGFTVKTSASLAALWQVVNQIGGKERYFFGNILWQTRALMDRAIGHKLAKGRPEREYLQTGDAVDSWKMIVVEPEQQRTLLFGMQAPGLGRLCCFSLEDKGDYRTIDVRAFWHPHGMPGLXFXWLLMIPAHLFIFRGMAKQIARLAVPSTDLID

SEQ ID NO: 51884 - protein, 53 aa, Homo sapiens
  misc_feature (1)...(53): Xaa = X or * as defined in Table 2
SLRGSRTAASPCWAVPVHVPGHGAGEPAHHPGHQPXLPPPHPHVLLPLQPVLA

SEQ ID NO: 51885 - protein, 145 aa, Homo sapiens
  misc_feature (1)...(145): Xaa = X or * as defined in Table 2
PFSLPFSLGLTASLFMNTWLAISSNCDGFIPASPACFCSFLLMSSALXRTKAMXIMCXFSGLSGSKGVYIRXASHSLSXNCAGLSSFPXMTSESLLTFVAFXAPLINPSKRASLSRFSLCISSLSCGSNWGSVPGNWVLPYSWGF

SEQ ID NO: 51886 - protein, 61 aa, Homo sapiens
  misc_feature (1)...(61): Xaa = X or * as defined in Table 2
VVTPDSGSSHXKANSFCLSGANLMLKKASFRSKQVNQLSSAGSNPSNMYGLGTVGCKVTVA

SEQ ID NO: 51887 - protein, 193 aa, Homo sapiens
  DOMAIN (43)..(65): OLFACTORY RECEPTOR SIGNATURE domain identified by eMATRIX, accession number PR00245A, p-value=5.950e-19, raw score of 18.03
  DOMAIN (25)..(92): 7 transmembrane receptor (rhodopsin family) domain identified by PFam, accession name 7tm_1, E-value=1.6e-15, PFam score of 51.4
SSEDPERQPVLTGLFLSTCLVMALGNLLIILAISPDSHLHTPMYFFLSNLSLPDISFTSTTVPKMTVDIQSHSRVISYAGCLTQMSLFAIFGGMEDRHTPDLLDAQLYNLIALQMTCFKDVEIPNFFCDPSQLPHLACCDTFNNNIILYFPDAIFGFLPISGTLFSYDKIVSSILRVSSSGGKYKAFSTYGSH

SEQ ID NO: 51888 - protein, 190 aa, Homo sapiens
  DOMAIN (34)..(94): Gag P30 core shell protein domain identified by PFam, accession name Gag_p30, E-value=3.7e-13, PFam score of 49.5
RLRPKTGTQMPLREQRYTGIDKDGHLVERRAFGYQPITCVNLLNWKNNTQNYTEKPQALIDFLQAVIQTHNPTLADWHQLLMFLFNSEERRRVLQAVTKWLEEHAPADYQNPQEYGRTQESVDWELYVDGSSFFNPQGERGAGYAVITLDTVDEDRSLPQATSAQKAELIAFIRALELSEGETVNIYTDS

SEQ ID NO: 51889 - protein, 65 aa, Homo sapiens
  DOMAIN (47)..(59): OLFACTORY RECEPTOR SIGNATURE domain identified by eMATRIX, accession number PR00245D, p-value=5.909e-14, raw score of 10.47
  misc_feature (1)...(65): Xaa = X or * as defined in Table 2
LCVFFVLVSFFLSPLDSQLAVVCXFDGTGIGMYLTSAVSPPPRNGVVASVMYAVVTPMLNLFICS

SEQ ID NO: 51890 - protein, 152 aa, Homo sapiens
  DOMAIN (68)..(142): Integrase core domain identified by PFam, accession name rve, E-value=1.9e-09, PFam score of 36.7
GHQRASTLLGLRNSRADSEARKAASSPFWASGLPQAPDLGPTSSNEEKDFLQHDMRQGLAVLPGIRASGAAPFEGLQVDFTEMSKCGGNKYVVVLGHTYSGWEEAYQTRTEKSREVTPVLLRDLIPRFRRPLGIGSDNGPAFLVALVQKTAK

SEQ ID NO: 51891 - protein, 175 aa, Homo sapiens
  DOMAIN (139)..(151): OLFACTORY RECEPTOR SIGNATURE domain identified by eMATRIX, accession number PR00245D, p-value=4.000e-15, raw score of 10.47
  DOMAIN (71)..(156): 7 transmembrane receptor (rhodopsin family) domain identified by PFam, accession name 7tm_1, E-value=1.4e-09, PFam score of 32.6
  misc_feature (1)...(175): Xaa = X or * as defined in Table 2
PPCTSLRPLHAFSGKMTHLNRGTLSLLDSQLHNLIALQMTCFKDVEIPNFFWEPSVTPSHRNINMYFPAAVFGFLPISGTLFSYCKIVSSILRVSSSGGKYKAFTTCGSHLSVVCXFYGTGVGGYLGSDVSSSPRKRAVASVMYTVVTPMLNPFIYSLRNRDMKSVLRRPHSSAV

SEQ ID NO: 51892 - protein, 46 aa, Homo sapiens
  misc_feature (1)...(46): Xaa = X or * as defined in Table 2
LWTSSLTAESSPMRAAXLRETSIVSAASRAFSAALSSSALRAFSAC

SEQ ID NO: 51893 - protein, 195 aa, Homo sapiens
  misc_feature (1)...(195): Xaa = X or * as defined in Table 2
QGTIILKVLRHLRWTWIPSRASLRTGYCFCLTGWTPGLTSISTGAWLTANPGGLSSAHTLGHRLARAGLISWPGSVKKSLHSSSRGSIRVIMTPVPGNFSSKEPCSVKEIVALSLLSKSLPNKGKGQSGMYKNXXITLCPPIVQVWGKQKACFAETPMAPMMSIVFLDKGATEAVTTECSALVSTRKSMSLPPTV

SEQ ID NO: 51894 - protein, 215 aa, Homo sapiens
  DOMAIN (164)..(181): G-protein coupled receptors proteins domain identified by eMATRIX, accession number BL00237D, p-value=5.821e-10, raw score of 11.23
  DOMAIN (90)..(173): 7 transmembrane receptor (rhodopsin family) domain identified by PFam, accession name 7tm_1, E-value=1.9e-07, PFam score of 25.8
  misc_feature (1)...(215): Xaa = X or * as defined in Table 2
HLSDSKSQVRYQPSADLSFLLGHYNPQSSRRVLSVLDSQLHNLIALQVTCFKDVEIPNFFCDPSQLPHLACCDTFTNKIIMYFPAAIFGFLPISGTLFSYSRIVSSILRVSSSGGKYKAFSTCGSHLSVVCXVYGTGVGGYLSSDDVSSSPRKAAVASVMYTVITSMLNPFIYSLRNRDIKGVLRQPHGSTVQFQYLLICSIPFVVWVKKGSKVK

SEQ ID NO: 51895 - protein, 310 aa, Homo sapiens
  DOMAIN (177)..(193): OLFACTORY RECEPTOR SIGNATURE domain identified by eMATRIX, accession number PR00245C, p-value=5.000e-16, raw score of 7.84
  DOMAIN (33)..(229): 7 transmembrane receptor (rhodopsin family) domain identified by PFam, accession name 7tm_1, E-value=2.6e-21, PFam score of 69.9
ELLLLGLSEDPELQPILALLSLSLSMYLVTVLRNLLSILAVSSDSHLHTPMYFFLSNLCWADIGYTSATVPKMIVDTQSHGRVISHAGCLTQMSFLVLFACIEDMLLTVMAYDCFVAICCPLHYPVIVNPHLCVFFVLVSFFLSLLDSQLHRILLSYCKIVPSILRISTSDGKYKAFSTCGSHLALVCLFYGAGIGVYLTSAVSPPPRNGVVVSVMYTVVTPMLNPFIYSLRNRDIQSTLRRLLSRTVESHDLFHPFSCVGIHCQVSELDAVMSLDTASGAFRWMAFGVEVAAPAYQPSCSCPGSQSSGE

SEQ ID NO: 51896 - protein, 218 aa, Homo sapiens
  DOMAIN (143)..(159): OLFACTORY RECEPTOR SIGNATURE domain identified by eMATRIX, accession number PR00245C, p-value=3.948e-11, raw score of 7.84
  DOMAIN (24)..(197): 7 transmembrane receptor (rhodopsin family) domain identified by PFam, accession name 7tm_1, E-value=1.2e-09, PFam score of 32.8
  misc_feature (1)...(218): Xaa = X or * as defined in Table 2
LRCLSLPFLEAWKRDMLLSVMAYDRFVAICHPLYHSAIMNLCSVGFLVLLSFFFFLSLSDSQLHNLIALQMTCFKDVEIPNFFWEPSQLSHLACCDTFTINIIMYFPTAIFGFLPISGTLFSYYKIVSSILRVSSSGGKYKAFSTCGSHLSVVCXFYGRGVGGYLSSDVSSSPRKGAVAAVMYTVVTSMLNPFIYRLGNRDIKSVLRRPTEHCLISKK

SEQ ID NO: 51897 - protein, 950 aa, Homo sapiens
  DOMAIN (28)..(49): PROTEIN INTERGENIC REGION ABC1 PRECURSOR MITOCHONDRION T domain identified by eMATRIX, accession number PD01823D, p-value= 3.093e-15, raw score of 16.66
  DOMAIN (638)..(935): S-adenosylmethionine synthetase domain identified by PFam, accession name S-AdoMet_synt, E-value=4.3e-274, PFam score of 661.5
MAVGTANRAQVVVLVIKDLPIQMVWSHVPRIHWDLSTERVLLMEFVDGGQVNDRDYMERNKIDVNEDFGDGGAFPEIHVAQYPLDMGRKKKMSNALAIQVDSEGKIKYDAIARQGQSKDKVLVLAVKQLFPEFEFMWLVDEAKKNLPLELDFLNEGRNAEKVSQMLRHFDFLKVIYSKYTDLVPKEVMNADDPDLQRPDEEAIKEITEKTRVALEKSVSQKVAAAMPVRAADKLAPAQYIRPTVLLEPESSTAEGLETCSQTGRFGVRLLAGAPALPPKSCVTVGDLWQCLETFVIVMTWEMLLASSGQRSSVLLDILQCTELAFTTKNCPVPNVNSITVEKPWSIYQVTYYNRSKFCGSGYARENSIKCISNILYKLNKMSKKMQSDKVLNLPAGYFGIVLGTIGMGFAWRYASQVWQVSHWLGDGLVILAMIIWGLLTSAFIARLIRFPHSVLAEVRHPVLSSFVSLFPATTMLVAIGFVPWFRPLAVCLFSFGVVVQLAYAAWQTAGLWRGSHPEEATTPGLYLPTVANNFISAMACGALGYTDAGLVFLGAGVFSWLSLEPVILQRLRSSGELPTALRTSLGIQLAPALVACSAWLSVNGGEGDTLAKMLFGYGLLQLMFMLRLMPWYLSQPFKDPKARVACETYVKTGMVLVGGEITTSAWVDIEEITRNTVREIGYVHSDMGFDANSCAVLSAIGKQSPDINQGVDRADPLEQGAGDQGLMFGYATNETDVLMPAPITYAHRLVQRQAEVRKNGTLPWLRPDAKSQVTFQYDDGKIVGIDAVVLSTQHSEEIDQKSLQEAVMEEIIKPILPAEWLTSATKFFINPTDPSKVDRSAAYAARYVAKNIVAAGLADRCEIQVSYAIGVAEPTSIMVETFGTEKVPSEQLTLLVREFFDLRPYGLIQMLDLLHPIYKETAAYGHFGREHFPWEKTDKAQLLRDAAGLK

SEQ ID NO: 51898 - protein, 559 aa, Homo sapiens
  DOMAIN (301)..(345): Oxysterol-binding protein family proteins domain identified by eMATRIX, accession number BL01013D, p-value=6.419e-09, raw score of 26.81
  misc_feature (1)...(559): Xaa = X or * as defined in Table 2
KKMALTSFLPAPTQLSQDQLEAEEKARSQRSRQPSLVSSRREPPPYGYRKAWIPRLLEDFXDRGAFPEIHVAQYPLDMGRKKKMSNALAIQVDSEGKIKYDAIARQGQSKDKVIYSKYTDLVPKEVMNADDPDWQRPDEEAIIEITEKARVALEKSVSQKVAAAMPVRAAXQIGPLLQYIPIHTISGKGVAIQTSWSXTRRVIRMVEMQKDPMEPPRFKINKKIPRGPPSPPAPVMHSPSRKMTVKEQQEWKIPPCISXLGKMAKGYTIPLDKRLAADGEEGLQDSYTLNGKFSAKLAEALYIADRKAREAVEMRAQVERKMAQKEKEKHEEKLREMAQKARERRAGIKTHVEKVKYFSTVHTEDGEARERDEIRHDRRKERQHDRNLSRAAPDKRSKLQRNENRDISEVIALGVPNPRTSNEVQYDQRLFNQSKGMDSGFAGGEDEIYNVYDQALIGGKYMAQSIYRPSKNLDKDMYGDDLEARIKTNRFVPDKGVFLVQTRRQRGREGPVQFEEDPFGLDKFLEESPTAMGGSKRPSGXPAAPREHGAWKARKRRKE

SEQ ID NO: 51899 - protein, 531 aa, Homo sapiens
  DOMAIN (400)..(421): GLUTELIN SIGNATURE domain identified by eMATRIX, accession number PR00211B, p-value=5.500e-09, raw score of 0.86
  misc_feature (1)...(531): Xaa = X or * as defined in Table 2
CLRRALPGSIESAPTAPPPPPSGEGSQAYISRLPATLIVLILERRQLLGVWRRARCCSLINLAHRRHCGMPTRESPCAILARRYEGRRSPSTVAQPPPPPPPIELAPSTSETPIQATRGAHPAQPSSVPPAPARPPERPPVPEQGPSGTHPDPTPPGPTNAPQRPSAPPNTTNXPTRHMHQLPDAAXTPYPAYGSDYLXARXDATASHQASCTNSPDAAXTPYPAYAKIERAXENPVPSAIKIIGRSSSSGRQASPWGMASPHWRSWRMGPNGSGKRPRRAAERISCCRNAQGRTHSQKAYIQQQPQCCVNVHLQPPDPTPAQPSQTLSPPDSPAPPLPAYPSTQHPTAPPPTSSPMSSRIVKPHPQHCGARPGQGKERDETERKDAKERNRRTATPTTRHTDRLPRTAHGPPPPPPPPPPPPPPPPPPRDSPRRPRRREKPEQQKEGGQTGRTQRKETARRGEERETGRKKTRGAPPPRPAAARRPHETAETKRRPPARQHRPPRRRPSDGTERTRHQLGFIMLGLLSWN

SEQ ID NO: 51900 - protein, 63 aa, Homo sapiens
  misc_feature (1)...(63): Xaa = X or * as defined in Table 2
RVDICSTNYCWWLYPMTSGPSFSYVXGPXEEDVREXMCGRDGLXYLSIGVVCGFICQHHNRAQ

SEQ ID NO: 51901 - protein, 445 aa, Homo sapiens
  DOMAIN (339)..(352): PROTEIN ZINC-FINGER METAL-BINDI domain identified by eMATRIX, accession number PD00066, p-value=5.154e-15, raw score of 13.92
  DOMAIN (61)..(421): Zinc finger, C2H2 type domain identified by PFam, accession name zf-C2H2, E-value=1.3e-40, PFam score of 148.4
  misc_feature (1)...(445): Xaa = X or * as defined in Table 2
GSEMPVTVMLTLGEPGHFMSSLGCWCGVEDEAAPSKQSIYIQRETQVRTPMAGVSPKKAHPCEMCGPILGDILHVADHQGTHHKQKLHRCEAWVNILYDSGNFHRRQNEHIGEKPYRGSVEEALFANRCKLHVSGSHLSSVRVEKDFLLRSGLLQQEATHTGKSNSKTECVSLFHGGKSHYSCGGCMKHFSTKDILSQHERLLPTEEHFVWCECGKSSSKYDSFSNHQGVHTREKPYTCGICGKLFSSKSHLLVHQRIHTGEKPYECEVCQKFFRHKYHLIAHQRVHTGERPYECSDCGKSFTHSSTFRVHKRVHTGQKPYECSECGKSFAESSSLTKHRRVHTGEKPYGCSECEKKFRQISSLRHHQRVHTNERAYECSESSLIKYWRIHTXVRSCDCSKCGKCFTQRSALLGYWRVHTRKSPYKXNKFGQFCSHTSVFLQDYS

SEQ ID NO: 51902 - protein, 117 aa, Homo sapiens
  misc_feature (1)...(117): Xaa = X or * as defined in Table 2
KMTSTQPVKFSLFASHSVPCGQSFPGRRAFAPAMPRRRIPSSDHLPEPGQSHQHVNRQRWACRELIAAFLPSSYRLXLVETGGEIGQRNRASCHSPFPAGSSPGIFQTEIGKPCLLP

SEQ ID NO: 51903 - protein, 125 aa, Homo sapiens
PICADRLSVASPPPAEYAYTRRYSHDGAPQRSMRIFSHGFDSNAPISSSGLRRITAQEPQRKWRPTYRCHPAPDHRTRAFVRRFTETPQVAFKGSGEKKWCGVCIIASCFLSGTSPWSFARTIAW

SEQ ID NO: 51904 - protein, 162 aa, Homo sapiens
AAVGVAEEEHAVSTFGVVGLFQQTVLDLPRDAVDTAHGWQDPQLITHPDIAVRDPHPARPANTLTDMRRQTFGRQPRRLRNTHIRGGIATTVQPQRSMRIFSHGFDSNAANFIQRLTTNHRTGTAEESGVPHIVAILHQTIEQRAFVRRFTETPQVAFKRVR

SEQ ID NO: 51905 - protein, 164 aa, Homo sapiens
  misc_feature (1)...(164): Xaa = X or * as defined in Table 2
RQNQREGDDDTEDQPPRPGTQMTELFFLIQMLCFMANALRQLVHPLMGNVHEYFADLKMPACAVSAFLCAMHRSITSMFEXDNGPGPADADARLDMRIQVFMFCANTLPARVLQRNKNPGQDHPETAERRAESQRIIEKGLKCIQGKGIVNSISMKEGVDAFIH

SEQ ID NO: 51906 - protein, 382 aa, Homo sapiens
  DOMAIN (41)..(96): Respiratory chain NADH dehydrogenase 49 Kd subunit proteins domain identified by eMATRIX, accession number BL00535A, p-value= 1.000e-40, raw score of 22.06
  DOMAIN (94)..(141): Nickel-dependent hydrogenases domain identified by PFam, accession name NiFeSe_Hases, E-value=2.8e-09, PFam score of 31.9
MDWLVFYLKKGRLCPEPTTDSETYPFINEGNSDARVIPVGPLHITSDEPGHFRLFVDGEQIVDADYRLFYVHRGMEKLAETRMGYNEVTFLSDRVCGICGFAHSVAYTNSVENALGIEVPQRAHTIRSILLEVERLHSHLLNLGLSCHFVGFDTGFMQFFRVREKSMTMAELLIGSRKTYGLNLIGGVRRDILKEQRLQTLKLVREMRADVSELVEMLLATPNIGNNALQGQLGISPNPEQEFRPRWNIWRPLEFNPLSPNTGNISKETWFNLLPAGRSVFLPGLNGSGVQEKNACEFRRGASAVGTFLWAPLFEKQNPFVPGQPGVVDDLNGIVDRAVLAAAGDADVASGAARLSARHRSIVISSMGERCCFIRSRITRIC

SEQ ID NO: 51907 - protein, 101 aa, Homo sapiens
AADEIGGIAVETVTEDAHLLCGCTVVAIPPRICVSAGGGAGDRKSSVRFHQNLAQVHITRGVVWTMTNSHIITCCATAFGTTTSPSPTESTGVPCGRRNQH

SEQ ID NO: 51908 - protein, 157 aa, Homo sapiens
  misc_feature (1)...(157): Xaa = X or * as defined in Table 2
SSRNASGAVRKISRGMPDKKWNMALTXHSRXANFSPLPVSGLSRRKICTIPRAQRIRXPICADRLSVASPAACGIAYTRRYSHDGATAEKYAHLQSRFRQQCRQFHPAAYDESPHRNRRRKWRPTYRCHPAPDHRTACLRSAFYGNAPGCVQTERSW

SEQ ID NO: 51909 - protein, 83 aa, Homo sapiens
QARISTSFFRESLPSRHPVPRYRPLEAFWTPCTRGYYRFFFSPARENAEYRTLKHWAKFLLVRASFPGASTLCCKSPGRTISV

SEQ ID NO: 51910 - protein, 198 aa, Homo sapiens
  DOMAIN (99)..(143): ATP-dependent serine proteases lon family, serine active sit. domain identified by eMATRIX, accession number BL01046C, p-value= 2.875e-09, raw score of 17.03
  misc_feature (1)...(198): Xaa = X or * as defined in Table 2
EDNYSGSSLYCFDDVASVQMPGSNGNCRRXCAGKTSGTWRNSLVRQWLLTAQKKTLLHAVSNLPKTWAQILFSKQRVLRSPLNRHLIWXCAAVKLXLLVLYPAIRQSISSKSIAKSLSRRYFRLPIGDSMXNRWXRIFTIIGMYIGTALXSDGAIVVCRLCENLPGSFHQRHQRCDAASLAGGSEPIAFSRAGRTPGP

SEQ ID NO: 51911 - protein, 440 aa, Homo sapiens
  DOMAIN (331)..(364): NLP/P60 family domain identified by eMATRIX, accession number PF00877A, p-value=4.900e-25, raw score of 23.40
  DOMAIN (58)..(240): FAD binding domain identified by PFam, accession name FAD_binding, E-value=6.5e-74, PFam score of 259.0
MGACVRRRGRSGQNYGYSRRSHWENSFYPYWVSVEHIGEVVLEKISFLAVPQACAVASRHRKITGRNSEKDVRHIEIDLGDSGMRYQPGDALGVWYQNDPALVKELVELLWLKGDEPVTVEGKTLPLNEALQWHFELTVNTANIVENYATLTRSETLLPLVGDKAKLQHYAATTPIVDMVRFSPAQLDAEALINLLRPLTPRLYSIASSQAEVENEVHVTVGVVRYDVEGRARAGGASSFLADRVEEEGEVRVFIEHNDNFRLSANPEDPVIMIGPSTGFLAERDSIYQNNWTVSTVPDQHTVASQDEFENLVRNVDVKSRIMDQYADWKGVRYRLGGSTKKGIDCSGFVQRTFREQFGLELPRSTYEQQEMGKSVSRSNLRTGDLVLFRAGSTGRHVGIYIGNNQFVHASTSSGVIISSMNEPYWKKRYNEARRVLSRS

SEQ ID NO: 51912 - protein, 220 aa, Homo sapiens
  misc_feature (1)...(220): Xaa = X or * as defined in Table 2
IDNAPPDQTTVHAFAANSENHSPPQLPYETPDDADPTHQAFSRWRHRPQAYSADALLRERLPPTHRHRGQSPDSLTSLPYWRGRRKYRAAPALTXTPPDTLFDSPPXPAVPPPVAKELPVTAQRQVHNAMSANSFVIFHPVKIRNNIVLQPAIAIQRRNGHGVTRCAAALHSRHGSLSVARHRVHLPVCRQADDKPAPAPLRPARYCLCPNQSAAVRYLR

SEQ ID NO: 51913 - protein, 205 aa, Homo sapiens
  misc_feature (1)...(205): Xaa = X or * as defined in Table 2
SSRNASGAVRKISRGMPDKKWNMALTXHSRXANFSPLPVSGLSRRKICTIPRAQRIRXPICADRLSVASPAACGIAYTRRYSHDGATAEKYAHLQSRFRQQCRQFHPAAYDESPHRNRRRKWRPTYRCHPAPDHRTACLRSAFYGNAPGCVQTGPVRRSGAASASSPAVFLSGTSPWSFARTIALVRGRSRKSTRTRLWHISAHC

SEQ ID NO: 51914 - protein, 23 aa, Homo sapiens
PVCAKLTARPGKSLVLPLMIRPM

SEQ ID NO: 51915 - protein, 170 aa, Homo sapiens
  misc_feature (1)...(170): Xaa = X or * as defined in Table 2
RLASKLFTTVTPRGGVGELQATTRNAAVAGIKRKRSNRGRPAEEPELTADRGQGENEITEAATAAKARRTMRPKTGNQNPDKHRTRGLQICHTFNANGNRARCSAANAMAATISGLSSGLSGTGWQETIRPPLAAIFXSSCASNDIHLPKSFLALPNGTAPLNGLPSIAS

SEQ ID NO: 51916 - protein, 139 aa, Homo sapiens
  misc_feature (1)...(139): Xaa = X or * as defined in Table 2
GSAPRQRHLAGRRPVTTRPKHVSHHGPQENSAHRLSHVDNESTCIVCGTLRLQHSARYFPPSLPETLFLAPVNHSVEYNWQAAVPKXIYXHQTFPGRDCQHLLFHFVRKFGVRESIAQVVAVRAATSAWRYSRSSAITL

SEQ ID NO: 51917 - protein, 68 aa, Homo sapiens
GQWSLELSPFPETLDDVEFCQWLTQEHGVAAIPLSVFCADPFPHKLISLCFAKKESTLLAAAERLRQL

SEQ ID NO: 51918 - protein, 141 aa, Homo sapiens
  misc_feature (1)...(141): Xaa = X or * as defined in Table 2
RRRLPSPYCRAAAGSSPSYECFAHQRSVASSRGHTGTRQFYREHWFLRCIRRLSGTRLLAYHRCFQPHLACSGKRAVSASSTRSADVAAWYRVCAKPFSSSSXVQEDLSYLRFSASXPXTVILXPACRKPCRKRRGQRRWR

SEQ ID NO: 51919 - protein, 425 aa, Homo sapiens
  DOMAIN (109)..(154): 3-BISPHOSPHOGLYCERATE-INDEPENDENT PHOSPHOGLYCER domain identified by eMATRIX, accession number PD02407G, p-value=1.000e- 40, raw score of 23.38
  DOMAIN (174)..(290): Metalloenzyme superfamily domain identified by PFam, accession name Metalloenzyme, E-value=1e-52, PFam score of 188.6
VEKAYDLLTLAQGEFQADTAVAGLQAAYARDENDEFVKATVIRAEGQPDAAMEDGDALIFMNFRADRAREITRAFVNADFDGFARKKVVNVDFVMLTEYAADIKTAVAYPPASLVNTFGEWMAKNDKTQLRISETEKYAHVTFFFNGGVEESFKGEDRILINSPKVATYDLQPEMSSAELTEKLVAAIKSGKYDTIICNYPNGDMVGHTGVMEAAVKAVEALDHCVEEVAKAVESVGGQLLITADHGNAEQMRDPATGQAHTGHTNLPVPLIYVGDKNVKAVEGGKLSDIAPTMLSLMGMEIPQEMTVQLSIQPASKLPIAGLRIPNRDDIFWAKNIRKIVVNEEVGDTGRYNFGQKCVFWAAIIFLVLLLWQLIVVIMVHIYAALWVKGTITAMVEGWVTSAWAKKHHPRWYREVRKTTEKKAE

SEQ ID NO: 51920 - protein, 816 aa, Homo sapiens
  DOMAIN (44)..(78): PHOSPHATE TRANSPORT TRANSMEMBRAN domain identified by eMATRIX, accession number PD02681C, p-value=6.625e-36, raw score of 17.44
  DOMAIN (1)..(111): Phosphate transporter family domain identified by PFam, accession name PHO4, E-value=2.5e-27, PFam score of 87.2
MAAFFNFFGVLLGGLSVAYAIVHMLPTDLLLNMGSTHGLAMVFSMLLAAIIWNLGTWFFGLPASSSHTLIGAIIGIGLTNALLTGSSVMDALNLREVTKIFSSLIVSPIVGLSVVALDNVNFTLNKGEVRALLGKNGAGKSTLIRMLTGSERPDSGLVKMRACINNQQIRHHNKCVILELLYRLKRANKSTLARLAQISIPAVSNILQELESEKRVVNIDDESQTRGHSSGTWLIAPEGDWTLCLNVTPTSIECQVANACLSPKGEFEYLQIDAPTPQALLSEIEKCWHRHRKLWPDHTINLALAIHGQVDPVTGVSQTMPQAPWTTPVEVKYLLEEKLGIRVMVDNDCQLHYCKTAILNWSRKMALSRQKFTFERLRRFTLPEGKKQTFLWDADVTTLACRATSGAKAFVFQSVYAGKTLRMTIGNINDWKIDDARAEARRLQTLIDTGIDPRIAKAVKIAEAESLQAESRKTKVTFSVAWEDYLQELRTGISAKTKRPYSTRYIADHINLSSRGGESPGLGLLLAFTLFGKGMSKRSAPGAMIIHFLGGIHELYFPYVLMKPLTIIAMIAGGMSGTWMFNLLDGGLVAGPSPGSIFAYLALTPKGSFLATIAGVTVGTLVSFAITSLILKMEKTVETESEDEFAQSANAVKAMKQEGAFSLSRVKRIAFVCDAGMGSSAMGATTFRKRLEKAGLAIEVKHYAIENVPADADIVVTHASLEGRVKRVTINHYMVQLLSSSLGEIMTTLTAQQIACVYAWLAQLFSRELDDEQLTQIASAQMAEWFSLLKNEPPLTAAVNELENRIATLTVRRARD

SEQ ID NO: 51921 - protein, 556 aa, Homo sapiens
  DOMAIN (1)..(384): Aminotransferases class-I domain identified by PFam, accession name aminotran_1, E-value=2.3e-15, PFam score of 64.5
  misc_feature (1)...(556): Xaa = X or * as defined in Table 2
PNTPLTSKLPLLTHPLTLLTPSASGWQKTTKLSCVFPETEKYAHERLAHHVAQGANQYAPMTGVQALREAIAQKTERLYGYQPDADSDITVTAGATEALYAAITALVRNGDEVICFDPSYDSYAPAIALSGGIVKRMALQPPHFRVDWQEFAALLSERTRLVILNTPHNPSATVWQQADFAALWQAIAGHEIFVISDEVYEHINFSQQGHASVLAHPQLRERAVAVSSFGKTYHMTGWKVGYCVAPAPISAEIRKVHQYLTFSVNTPAQLALADMLRAEPEHYLALPDFYRQKRDILVNALNESRLEILPCEGTYFLLVDYSALSTLDDVEFCXSLTQEHGVAAIPLSVFCADPFPHKLIRLIQTAAINLLVNHERRANAVINVDHAEIPFLRIILPFLRQRQHHAVIIDHHPNAELLFQQIFHLHRRCPRRFRHGLRHAGHRINLTVDFQRQVDGMVRPQFTVAMPAIFRFRTAAPSASVHQSGVRLPYQFMALIASDNFCCWVHGGYITLAVNGNDAIGSVFNNQIVKCPRFTQCLGEVINTLTDLPHFTGQLW

SEQ ID NO: 51922 - protein, 52 aa, Homo sapiens
  misc_feature (1)...(52): Xaa = X or * as defined in Table 2
XQCYELTTNEYVYRLCPFKLVSQKPKLGGSPTSLGTWGSWIGPDHDKFSAMN

SEQ ID NO: 51923 - protein, 124 aa, Homo sapiens
  DOMAIN (61)..(102): Tropomyosins proteins domain identified by eMATRIX, accession number BL00326D, p-value=1.505e-09, raw score of 8.76
RHSASPRCRLPPTEPVSGLKASGEMLLPLLLLLPMCWAVEAPPPLSPPQPASPAEEDKMPPYDEQTQAFIDAAQEARNKFEEAERSLKDMEESIRNLEQEISFDFGPNGEFAYLYSQCYELTTN

SEQ ID NO: 51924 - protein, 600 aa, Homo sapiens
  DOMAIN (399)..(440): Tropomyosins proteins domain identified by eMATRIX, accession number BL00326D, p-value=1.505e-09, raw score of 8.76
  misc_feature (1)...(600): Xaa = X or * as defined in Table 2
REDTAHLPAVGFLPQNPFRAIRASGEMLLPLLLLLPMCWAVEVKRPRCVSLTNHHFYRESKPFTCLDGSATIPFDQGQRLTYCDCKDGSXRSQATAACPNGQAFHCHQTLGLXSPLXXSPSKPGSNDGVCDCCDGTDEYNSGVICENTCKEEGPVRRRESLQQMAEVTREGFRLEEDPLFEGLGKKAREEKQKKLIELQAGKKSLEDQVEMLRTVKEEAEKPEREAKEQHQKLWEEQLAGFQGPNREQDARAADAFKELDDDMDGTVSVTELQTHPELDTDGDGALSEAEAQALLSGDTQTDATSFYDRVWAAIRDKYRSEALPTDLPAPSAPDLTEPKEEQPPVPSSPTEEEEEEEEEEEEEAEEEEEEEDSEVQGEQPKEAPPPLSPPQPASPAEEDKMPPYDEQTQAFIDAAQEARNKFEEAERSLKDMEESIRNLEQEISFDFGPNGDVFAYLYSQCARDLTTNEYVYTRLCPFQVLFFAGNPNSGVFPTSLGHLGASWVLGPDHGQVSVAMKFXARHGACWQGPNPLQHPXRFWFGKETMVTKHPQXPSRCEYLHGSXXTPAACPEPPALKQPQPKDDHDEVLSWMGAREPQRKA

SEQ ID NO: 51925 - protein, 100 aa, Homo sapiens
  misc_feature (1)...(100): Xaa = X or * as defined in Table 2
LLRIGNDWCIPKGITPTTHIIKLPIGEIRQPNATLDLSQSVDNEYYCLLLAKELGLNVPDAEIIKAGNGARVSGRTFXQALECXANGFTSLATGGYVSDI

SEQ ID NO: 51926 - protein, 341 aa, Homo sapiens
  DOMAIN (276)..(297): Bacterial extracellular solute-binding proteins family 3 sig. domain identified by eMATRIX, accession number BL01039A, p-value= 2.565e-09, raw score of 10.25
  misc_feature (1)...(341): Xaa = X or * as defined in Table 2
MSIAVTTTDPTNTGVSTTSSSSLTGSNAADLQSSFLTLLVAQLKNQDPTNPMENNELTSQLAQISTVSGIEKLNTTLGSISGQIDNSQSLQASNLIGHGVMIPGTTVLAGTGSEEGAVTTTTPFGVELQQAADKVTATITDKNGAVVRTIDIGELTAGVHSFTWDGTLTDGSTAPNGSYNVAISASNGGTQLVAQPLQFALVQGVIRGNSDITTFGVNMKLAHLGRQALMGVMAVALVAGMSVKSFADEGLLNKVKERGTLLVGLEGTYPPFSFQGDDGKLTGFEVEFAQQXFAHGQQRRRFTKQFSDFAGGAAEKPGPDQSNGKQRADVAIGTNQHGQRD

SEQ ID NO: 51927 - protein, 779 aa, Homo sapiens
MSGGQTEKQAQLIRDFQPDMIMVTPSYCLNLIEELERQLGGDASGCSLRVGVFGAEPWTQAMRKEIERRLGITALDIYGLSEVMGPGVAMECLETTDGPTIWEDHFYPEIVNPHDGTPLADGEHGELLFTTLTKEALPVIRYRTRDLTRLLPGTARTMRRMDRISGRSDDMLVLRRRHLCRPSACQLCRPPSLPATDRVLELFAQSGAQWLVILGDVLNHGPRNALPEGYAPAKVAERLNEVAHKVIAVRGNCDSEVDQMLLHFPITAPWQQVLLEKQRLFLTHGHLFGPENLPALNQNDVLVYGHTHLPVAEQRGEIFHFNPGSVSIPKGGNPASYGMLDNDVLSVIALNDQSIIAQVAINPAPEKEGFLIMEQRRLASTEWVDIVNEENEVIAQASREQMRAQCLRHRATYIVVHDGMGKILVQRRTETKDFLPGICATSKVRKLLCKSAALLPVSELLLVLLTPVFVGSAVIGKLGAFAIHIDGITVKRRLVRNTVLQFCGRSRQPLEYVSAGDTGPVLRALKRMMAMRHYMRSQTVKGVTDTRAIDEVALSVAQVEEMYRYLAIANYEDRFVIPTSHREMAGDAFAERNGCGFTFGDGCHGSDSKFNLFNSSRIDAINITEILKVIGLLMEYPDELLWECKEDALALIRRDAPMLTDFTHNLLNAPLLDKQAEWCEVFDRGRTTSLLLFEHVHAESRDRGQAMVDLLAEYEKVGLQLDCRELPDYLPLYLEYLSVLPVRSGERRIAQCCADPRPWAKATAGTGARAVRDAANPDP

SEQ ID NO: 51928 - protein, 80 aa, Homo sapiens
ADIRRHFPAGAEAPHRRGRFCPVTAVGAGEDERQRAGQGDVGFTGKDLCTEQGIDRMAGRHSAGAHRTGHAGGGTNAHPG

SEQ ID NO: 51929 - protein, 190 aa, Homo sapiens
  misc_feature (1)...(190): Xaa = X or * as defined in Table 2
LMQLHNGLPVAGLRQFCQQLVIQRLYFFTTATAHQCTRHMCHRHRSLLTAHRQMALCFQYVDDLHHAFADVLINNACYPLLMGEQGVFIYNGTQQLLHWVIIDSRQDHGFGGLXKSRIVCERRRLXSQHGQFVFRHHVPDHRIDIAFNNALXTLVIREISSVPASVGVGIDFPGGAATWAGPVVIKPGQS

SEQ ID NO: 51930 - protein, 412 aa, Homo sapiens
  DOMAIN (188)..(241): Tryptophan synthase beta chain pyridoxal-phosphate attachment domain identified by eMATRIX, accession number BL00168B, p-value= 1.000e-40, raw score of 16.42
  DOMAIN (158)..(411): Pyridoxal-phosphate dependent enzyme domain identified by PFam, accession name PALP, E-value=9.4e-56, PFam score of 198.6
  misc_feature (1)...(412): Xaa = X or * as defined in Table 2
MPNVDVVGEMVNTMSASRSYQANVEVLNTEKAMSIAVTTTDPTNTGVSTTSSSSLTGEQRRRFTKQFSDFAGGAAEKPRPDQSNGKQRADVAIGTNQHDAARILRKGTMTTLLNPYFGEFGGMYVPQILMPALRQLEEAFVSAQKDPEFQAQFNDLLKNYAGRPTALTKCQNITAGTNTTLYLKREDLLHGGAHKTNQVLGQALLAKRMGKTEIIAETGAGQHGVASALASALLGLKCRIYMGAKDVERQSPNVFRMRLMGAEVIPVHSGSATLKDACNEALRDWSGSYETAHYMLGTAAGPHPYPTIVREFQRMIGEETKAQILEREGRLPDAVIACVGGGSNAIGMFADFINETNVSVGPQHAYLNSSVRADXVSITDDEDLQAFKTLTASYKTTPAAAKTSLHVPSHES

SEQ ID NO: 51931 - protein, 581 aa, Homo sapiens
  DOMAIN (489)..(509): Trehalase proteins domain identified by eMATRIX, accession number BL00927F, p-value=9.379e-22, raw score of 11.40
  DOMAIN (305)..(581): Trehalase domain identified by PFam, accession name Trehalase, E-value=4.6e-150, PFam score of 511.9
  misc_feature (1)...(581): Xaa = X or * as defined in Table 2
WDARVFSHSGWVLYLIRQYCSISAVSSCGSTTGSACSATSWATATSDSVTHLRLFSYRGSDHFRMRRFNHFRLRFGNLNGGFYDTGHFFNNWRANNRFDSGGDRDLSHHRLHMYFFLFALLFNLYILRTYNWIADPDFARGQFRRRARYGQRHWRLGWITLVTIATTTLTTYAQVTRRAARTTRHATVVTVISIVLFLLFWCSLRYDWHYCILILRSTPSVLSQYPVGNELRRRRLVHLHLLCTYSDDDSRDPRYRQESRTRNGVVPVIVNIDVHRFGQTGDQHGAMIIPVIFLLNVAMHERASGHIPNGNRTYYLSRSQPPVFALMVELFEEDGVAVARYLDHLKMEYAFWMDGAESLIPNQAYRHVVRMPDGSLLHRYWCDCHTSCDXSWLEDVETAKHSGRPPNEVYRDLRAGAASGWDYSSRWLRDTGRLASIRTTQFIPIDLNAFLFKLESAIANISALKGEKETEALFRQKASARPMREYETGEQWDKPNGWAPLQWMAIQGFKMYGDDLLGDEIARSWLKTVNQFYLEQHKLIEKYHIADGVPREGGGGEYPLQDGFGWTNGVVRRLIGLYGEP

SEQ ID NO: 51932 - protein, 1510 aa, Homo sapiens
  DOMAIN (152)..(204): ELEMENT TRANSPOSABLE INSERTION PROTEIN TRANSPOSITION DNA domain identified by eMATRIX, accession number PD02455C, p-value= 1.000e-40, raw score of 29.23
  DOMAIN (497)..(1279): Sigma-54 transcription factors domain identified by PFam, accession name sigma54, E-value=1.3e-147, PFam score of 503.8
  misc_feature (1)...(1510): Xaa = X or * as defined in Table 2
MKTLIARHKAGEHIGICSVCSAHPLVIEAALAFDRNSTRKVLIEATSNQVNQFGGYTGMTPADFREFVFTIADKVGFARERIILGGDHLGPNCWQQENADAAMEKSVELAVVIDLWSRAVIGWSMSPRMTAQLACDALQMALWRRKRPRNVIVHTDRGGQYCSADYQAQLKRHNLRGSMSAKGCCYDNACVESFFHSLKVECIHGEHFISREIMRATVFNYIECDYNRWRRHSWINSLLSQKRNTQGRIEDGRQHDKWVAERNRIEDPRLVTVREGEAREVVLAKMHEKRVEKALVAALVVALLISGGILTWAGFNDPQEINGTLSADATPAEAISPVADQDWPAYGRNQEGQRFSPLKQINADNVHNLKEAWVFRTGDVKQPNDPGEITNEVTPIKVGDTPLLCTAHQRLFALDAEMDGIATLKEIKALNPAIPVLIMTAYSSVETAVEALKTGALDYLIKPLDFDNLQATLEKALAHTHSIDAETPAVTASQFGMVGKSPAMQHLLSEIALVAPSEATVLIHGDSGTGKELVARAIHASSARSEKPLVTLNCAALNESLLESELFGHEKGAFTGADKRREGRFVEADGGTLFLDEIGDISPMMQIIPFIAKEKAASSVRDSRGSPEREEIRAGLSAKMSIRAIATALNRSPSTISREVQRNRGRRYYKAVDANNRANRMAKRPKPCLLDQNLPLRKLVLEKLEMKWSPEQISGWLRRTKPRQKTLRISPETIYKTLYFRSREALHHLNIQHLRRSHSLRHGRRHTRKGERGTINIVNGTPIHERSRNIDNRRSLGHWEGDLVSGTKNSHIATLVDRKSRFYDPSIRLXGQYCSADYQAQLKRHNLRGSMSAKGCCYDNACVESFFHSLKVECIHGEHFISREIMRATVFNYIECDYNRWRRHSWINSLLSQKRNTQGRIEDGRQHDKWVAERNRIEDPRLVTVREGEAREVVLAKMHEKRVEKALVAALVVALLISGGILTWAGFNDPQEINGTLSADATPAEAISPVADQDWPAYGRNQEGQRFSPLKQINADNVHNLKEAWVFRTGDVKQPNDPGEITNEVTPIKVGDTPLLCTAHQRLFALDAEMDGIATLKEIKALNPAIPVLIMTAYSSVETAVEALKTGALDYLIKPLDFDNLQATLEKALAHTHSIDAETPAVTASQFGMVGKSPAMQHLLSEIALVAPSEATVLIHGDSGTGKELVARAIHASSARSEKPLVTLNCAALNESLLESELFGHEKGAFTGADKRREGRFVEADGGTLFLDEIGDISPMMQIIPFIAKEKAASSVRDSRGSPEREEIRAGLSAKMSIRAIATALNRSPSTISREVQRNRGRRYYKAVDANNRANRMAKRPKPCLLDQNLPLRKLVLEKLEMKWSPEQISGWLRRTKPRQKTLRISPETIYKTLYFRSREALHHLNIQHLRRSHSLRHGRRHTRKGERGTINIVNGTPIHERSRNIDNRRSLGHWEGDLVSGTKNSHIATLVDTKITILRSIDSTLGATDSCLQ

SEQ ID NO: 51933 - protein, 509 aa, Homo sapiens
  DOMAIN (77)..(128): Domain of Unknown Function 2 domain identified by eMATRIX, accession number PF00563A, p-value=1.000e-40, raw score of 30.25
  DOMAIN (352)..(502): Integrase core domain identified by PFam, accession name rve, E-value=1.8e-33, PFam score of 119.8
MIVFLQNGNSSQKSIQGSLQSDITFWRDIFFQYNPEIISATGSNSHRYINDNHYHHIVTPEAISLALENHEFKPWIQPVFCAQTGVLTGCEVLVRWEHPQTGIIPPDQFIPLAESSGLIVIMTRQLMKQTADILMPVKHLLPDNFHIGINVSAGCFLAAGFEKECLNLVNKLGNDKIKLVLELTERNPIPVTPEARAIFDSLHQHNITFALDDFGTGYATYRYLQAFPVDFIKIDKSFVQMASVDEISGHIVDHIVELAPVLEKLEMKWSPEQISGWLRRTKPRQKTLRISPETIYKTLYFRSREALHHLNIQHLRRSHSLRHGRRHTRKGERGTINIVNGTPIHERSRNIDNRRSLGHWEGDLVSGTKNSHIATLVDRKSRYTIIVRLRGKDSVSVNQALTDKFLSLPSELRKSLTWDRGMELARHLEFTVSTGVKVYFCDPQSPWQRGTNENTNGLIRQYFPKKTCLAQYTQHELDLVAAQLNNRPRKTLKFKTPKEIIARGVALTD

SEQ ID NO: 51934 - protein, 270 aa, Homo sapiens
  misc_feature (1)...(270): Xaa = X or * as defined in Table 2
HCLSARRYELVCQPKXAFVRXLLRXIAVLRHLNIQHLRRSHSLRHGRRHTRKGERGTINIVNGTPIHERSRNIDNRRSPSPYIRKRGAHTELRSDHPLLINQHWHHFAGMVAVTNGRIVAVIRHHDQAIIWLHRLNKPGKVTVNDLQTFGITCDVFCMTSEVGFLNVGANKRRRMGVKFVEGDIHNPLAIHQILPAHAIRIVDDICHLTHQHGWHACFIQFLWHLHFFIDAIAHMHDLETVVISARTRRIDTNKAPFFAFCGIENALTVG

SEQ ID NO: 51935 - protein, 508 aa, Homo sapiens
  DOMAIN (437)..(463): Transposases IS30 family, proteins. domain identified by eMATRIX, accession number BL01043D, p-value=9.654e-33, raw score of 9.58
  DOMAIN (353)..(503): Integrase core domain identified by PFam, accession name rve, E-value=1.7e-33, PFam score of 119.9
  misc_feature (1)...(508): Xaa = X or * as defined in Table 2
LSQQTVNTLQAGHQTIHFFMGVIHGQRRPTHRRDVVIGHQWHCAVMSGTHSNAVIIEKTANIIGVVFTEIKSNNAKPVLWAIESNAAATDGEIVFDGEILKSACEINDSDKKIEVALGHYNAEQFRNIGERSPKIPFTIPLVNCPMTGEIANILGSKPGTIFTMLRDTGGIKPHERKRAVAHLTLSEREEIRAGLSAKMSIRAIGYWRXIASPSTFSREVQRKGGHRYYKAVDANIRANRMAKRPKPCLLDQNVPLRKLVLEKLEMKWSPEQISGWLRRTKPRQKTLRISPETIYKTLYFRSREALHHLNIQHLRRSHSLRHGRRHTRKGERGTINIVNGTPIHERSRNIDNRRSLGHWEGDLVSGTKNSHIATLVDRKSRYTIIVRLRGKDSVSVNQALTDKFLSLPSELRKSLTWDRGMELARHLEFTVSTGVKVYFCDPQSPWQRGTNENTNGLIRQYFPKKTCLAQYTQHELDLVAAQLNNRPRKTLKFKTPKEIIERGVALTD

SEQ ID NO: 51936 - protein, 40 aa, Homo sapiens
  misc_feature (1)...(40): Xaa = X or * as defined in Table 2
IITNSISRPGDPPMSDPHSXSPASSSAKTETKSLFNAFLV

SEQ ID NO: 51937 - protein, 970 aa, Homo sapiens
  DOMAIN (771)..(816): kw TRANSCRIPTASE REVERSE II ORF2 domain identified by eMATRIX, accession number DM01354N, p-value=1.000e-40, raw score of 13.17
KGLLTSFHYIKTPEVPNLCVEGGTRLQIWPACSSTGSGGTCWKAPPQPPRPPTSSSPSPAPPSEAFVLSAGAMQLEAGAYSLVIIKESKNNVGVDVIKRKHFCTAGGNVNQYNHYGKHCVLSCSGPASGAQPLYRMAQPPSPPNMAAGIPPAARISSSITSPLLKPSWLHLLAHPVLQAHLTEEGLGRSHHVQRGQCLVSKSVFTNACWEMQNVKRFTDFIPLHKNTRGPEPLCRRRNQAPNMACMQQHWQRRNMLESSASATEAAHLVFTLTAPPQPPRPPTSSSPSQLRLSHRGGPPRSSPSELCPRHQGRPPRLHPQSSTSATEAAHLVFTLTRRYSHSHRGRPPRLHPHTSASATEAAHLVFTLTAPPQSPRPPTSSSPSQLRLSHRGRPPRLHPHSSASATEAAHLVFTLTAPLQSQPPRPPTSSSRQPSAARLLLCGPWCLSHSHPASLQQGLSWQLVSSAHPLLPPSAEALTFPSVAQGPSASALPVQNAECQAHPGAQERGLGADRTQWLWCLEASSLAVRASDIPGPCPLVPSRPTALPKTLSSTPSSVKLESPWKLQPQDNSERIPAAAWAGLSMPAHAPVTLHSLVHHGPTLSQNNYPGITRVRTSLVHNKMKAEIKMFFETNENKDTTYQNLWDTFKAVCRGKFTALNAHKRKQERSKINTLMSQLKQLEKQERTHSKASRRQEITKIRAELKEIETQKTLQKINESRSWFFEKINKIDRLLARLIKKKREKNQIDAIKKDKGDITTDPTEIQTTIREYYKHLYVYKLENLEEMDKFLNTYTVPRLNQEEVDSLNRPVTGSEIVAIINSLPTKKSPGPNGFTAEFYQRHKEKLVTFLLKLFQSIEKDGILTNSFYEASIILIPKPGRDTTEKENFTPISLMSIDAKILNKILANRIQQHIKKLIHHDQVGFIPGMQGWFNICKSINVIQHINRTKDKNHMIISIDAEKAFDKIQQPSC

SEQ ID NO: 51938 - protein, 68 aa, Homo sapiens
  misc_feature (1)...(68): Xaa = X or * as defined in Table 2
KPGKQHSMLKXSALLPSAHGPTSCKEARCHPVQILPPELLFXMPKKICPPLCYLWTVKAWETTFHAEV

SEQ ID NO: 51939 - protein, 62 aa, Homo sapiens
  misc_feature (1)...(62): Xaa = X or * as defined in Table 2
PRRLRAAPPDLGGFRLLPRLPEASGCSPXSQRLFQKAPSPAPCSWRRSRFCVKTCVLPMGGQ

SEQ ID NO: 51940 - protein, 134 aa, Homo sapiens
  misc_feature (1)...(134): Xaa = X or * as defined in Table 2
ITCLHAHVTWCQILPYLMLPAPLLRPLPTPLTVAGVGQSLPEIQLSVTLPLQPGRNQGSLESRHLVSWAEPPXDPAVSALPLQPGRNQGSLESRHLVSWAEPPXDPAVSALPLQPGRNQGSLESRHLVSWAEPP

SEQ ID NO: 51941 - protein, 241 aa, Homo sapiens
  DOMAIN (83)..(128): PROTEIN OXIDOREDUCTASE NAD INTERGENIC RE domain identified by eMATRIX, accession number PD01311A, p-value=5.219e-29, raw score of 30.23
  DOMAIN (27)..(237): Oxidoreductase family domain identified by PFam, accession name GFO_IDH_MocA, E-value=2.4e-36, PFam score of 134.2
FRLHGHLERGPFYFLSPLAVQSSQSCLRRFTTRYHLPYVLNRKNSWHVAHIFRRHAKPEEQAPIYSHIHFTSDLDEVLNDPDVKLVVVCTHADSHFEYAKRALEAGKNVLVEKPFTPTLAQAKELFALAKSKGLTVTPYQNRRFDSCFLTAKKAIESGKLGEIVEVESHFDYYRPVAETKPGLPQDGAFYGLGALFTNQQGFFKSSLLSIFADSSSSVAGRSPHNLVKKRGGIVAISAFAG

SEQ ID NO: 51942 - protein, 222 aa, Homo sapiens
MPGEPGFAADDSVGVLEYVNDEGVTVREEMKPEMGDYGRVYDALYQTITHGAPNYVKESEVLTNLEILERGFEQASPSTVTLAKQIGSTLSPSKSFRGRIQMIYLRKANERGHANHGWLDSWHTFSFANYYDPNFMGFSALRVINDDVIEAGQGFGTHPHKDMEILTYVLEGTVEHQDSMGNKEQVPAGEFQIMSAVGYRPQVNQATGVACSFERVVSRWVY

SEQ ID NO: 51943 - protein, 434 aa, Homo sapiens
  DOMAIN (153)..(198): PROTEIN OXIDOREDUCTASE NAD INTERGENIC RE domain identified by eMATRIX, accession number PD01311A, p-value=5.219e-29, raw score of 30.23
  DOMAIN (91)..(330): Oxidoreductase family domain identified by PFam, accession name GFO_IDH_MocA, E-value=4.3e-41, PFam score of 149.9
  misc_feature (1)...(434): Xaa = X or * as defined in Table 2
MRVYMDGRLIVSTRQRKVLAAGPMLYAATRAPAFTMSGDNLVRSHASIYMTSCHTLLGEQAGYAVFGALLPAITLLHLNSACCIVYVSCLLADAGHRDSLQQAGDKWTTTDSYSSSCTSETLGSACVRYAHSSRNHVRFALSDLDEVLNDPDVKLVVVCTHADSHFEYAKRALEAGKNVLVEKPFTPTLAQAKELFALAKSKGLTVTPYQNRRFDSCFLTAKKAIESGKLGEIVEVESHFDYYRPVAETKPGLPQDGAFYGLGVHTMDQIISLFGRPDHVRLXHPGALRNKSPIWTNPFEAQLFYGDLKAIVKTSHLVKIDYPKFIVHGKKGSFIKYGIDQQETSLKANIMPGEPGFAADDSVGVLEYVNDEGVTVREEMKPEMGDYGRVYDALYQTITHGAPNYVKESEVLTNLEILERGFEQASPSTVTLAK

SEQ ID NO: 51944 - protein, 169 aa, Homo sapiens
  misc_feature (1)...(169): Xaa = X or * as defined in Table 2
SHDVCRINADRQRDRNNRRQRRSLRVYKLGNQQQNNGIGPRILFHHFTQYALNFRHMRTEHGFCHPCDTVHRHDGDHTGTEDFVFWRXTRDWFWSGXYQRPGQQHKHLNNQYHRQRFAAEGWTQVRISTKKGDYSDCPEENPHCQPVAGRYHYSLVGRVSNATLARLIR

SEQ ID NO: 51945 - protein, 71 aa, Homo sapiens
  misc_feature (1)...(71): Xaa = X or * as defined in Table 2
SRAVCWQVGTRLWAIFGVSXELQRHVLVVFAGFWIVKNSRNLFLVCRAEHKRSVVKGLLRQQGAGLLVPLS

SEQ ID NO: 51946 - protein, 30 aa, Homo sapiens
VSNCFYPDQFIRHFPSWRPWPQELYLAQDR

SEQ ID NO: 51947 - protein, 431 aa, Homo sapiens; identical to SEQ ID NO: 48434

SEQ ID NO: 51948 - protein, 456 aa, Homo sapiens
  DOMAIN (327)..(382): COMPONENT PHOSPHOTRANSFERASE SYST domain identified by eMATRIX, accession number PD02963D, p-value=1.000e-40, raw score of 24.36
  misc_feature (1)...(456): Xaa = X or * as defined in Table 2
MCPIEETASSFGGKPLSMVLVIQMFMLLTGALIIILTKTNPASISKNEVFRSGMIAIVAVYGIAWMAETMFAPACYGYYILPTYPSDLAAIQFDRSGTTHIGRFVINHSFILPGLIGVSVSCVFGWIFAAIKRDAAAGRAKENVIFHHFPFQSVKADIATNPFKRPGGAFIRITQTFRTVQTFRLSAYRLDFAGDRLRISTPRAKMRTAFKKDHLRQRRRCIRQRAPPARHNLVGAVALPATVAGVNFTFSNVPLDSSVLSSLLTDFSTAVGSIVMLAVIMGLMLAFDMGGPVNKVAYAFMLICVAQGVYTVVAIAAVGICIPPLGMGLATLIGRKNFSAEERETGKAALVMGCVGVTEGAIPFAAADPLRVIPSIMVGSVCGAVTAALVGAQCYAGWGGLIVLPVVEGKLGYIAAVAVGAVVTLFVXTCXKVWRVKMGLRLMKKKTTWIWILKLI

SEQ ID NO: 51949 - protein, 52 aa, Homo sapiens
HKTRQRHQTGCGVKCLIRIKLPQDTLGIYHVTISKTFEAIDALFWRPRSIRH

SEQ ID NO: 51950 - protein, 53 aa, Homo sapiens
  misc_feature (1)...(53): Xaa = X or * as defined in Table 2
RRGRNRYPALQXTMFLPADGPARCLSRQAAILKESVLPKXGRPDVVFSPAYPY

SEQ ID NO: 51951 - protein, 228 aa, Homo sapiens
  misc_feature (1)...(228): Xaa = X or * as defined in Table 2
LHRTGQRPAAQRTETHHPFFNHFARLQVDTVVINHHQHTVAFQNRTFRSEIXRNNVDIFQPDVLPDILLGPVREREDADAFAFVNLPVVVVPQLRALIFRIPAMEAVTERVNSLFSAGFLFVTARTTEGGIKTVFVQRLFQAFSFHNIGMFRAAVHEWINPHRHAFRVFMHQQFAAVGFSSTIAELIHLAEFPAGIDMQQRERQRTWIKRLARQMQHDAGIFTDRVEH

SEQ ID NO: 51952 - protein, 884 aa, Homo sapiens
  DOMAIN (207)..(242): Bacterial microcompartiments proteins domain identified by eMATRIX, accession number BL01139, p-value=5.655e-32, raw score of 16.27
  DOMAIN (557)..(812): Delta-aminolevulinic acid dehydratase domain identified by PFam, accession name ALAD, E-value=2e-186, PFam score of 632.7
MLAAYVFPGRNLSLTVDADPQAEISSKETLAENLTSLTLSNGARVILAKSAGEEQKLQIIAVSNKGDLSFPAQQKSLIALANKAVSGSGVGELSSSSLKRWSAENSVTMSSKVSGMNTLLSVSARTNNPEPGFQLINQRITHSTINDNIWASLQNAQIQALKTLDQRPAEKFAQQMYETRYADDRTKLLQENQIAQFTAAEESTMEALGMIETRGLVALIEASDAMVKAARVKLVGVKQIGGGLCTAMVRGDVAACKAATDAGAAAAQRIGELVSVHVIPRPHGDLEEVFPIGLKGDSSNLGSFYLKYATEAGMKLAVVTGQIVCTVRHHGLAHDKLLMVEMIDPQGNPDGQCAVAIDNIGAGTGEWVLLVSGSSARQAHKSETSPVDLCVIGIVDEVVSGGQDIEQVVKAVLLKMQSSDTPSAAVHEMGVFASLDDAVAAAKVAQQGLKSVAMRQLAIAAIREAGEKHARDLAELAVSETGMGRVEDKFAKNVAQARGTPGVECLSPQVLTGDNGLTLIENAPWGVVASVTPSTNPAATVINNGTELQNSYHCEYMPGVMRIPEKHLAREIERIANAGIRSVMTFGISHHTDETGSDAWREDGLVARMSRICKQTVPEMIVMSDTCFCEYTSHGHCGVLCEHGVDNDATLENLGKQAVVAAAAGADFIAPSAAMDGQVQAIRQALDAAGFKDTAIMSYSTKFASSFYGPFREAAGSALKGDRKSYQMNPMNRREAIRESLLDEAQGADCLMVKPAGAYLDIVRELRERTELPIGAYQVSGEYAMIKFAALAGAIDEEKVVLESLGSIKRAGGEGTVHSRITPPDKTVYPQGSSPDALSVAVAVFRQYALRGKTAARLFDLLHLLQRRGLGRHSHLYADMRDRR

SEQ ID NO: 51953 - protein, 1041 aa, Homo sapiens
  DOMAIN (376)..(397): RHS PROTEIN SIGNATURE domain identified by eMATRIX, accession number PR00394D, p-value=1.090e-28, raw score of 6.56
  DOMAIN (840)..(1041): D-alanyl-D-alanine carboxypeptidase domain identified by PFam, accession name Peptidase_S11, E-value=8.3e-79, PFam score of 275.2
MRNRRRPDVVSALRGRRAMLPAILRASSVTGPVCSTTAGDMLGEESRFIMLLSGSWNAITLIESTLPLKGAELDLLIVMKRTTARPRPPMPASVWVQVDVADSPHLIERFTALFDAHHMNIAELVSRTQPAENERAAQLHIQITAHSPASADAANIEQAFKALCTELNAQGSINVVNYSQHDEQDGVNLPDQDGEQVNLTDFQGQRVLVYFYPKAMTPGCTVQACGLRDNMDELKKAGVDVLGISTDKPEKLSRFAEKELLNFTLLSDEDHQWGIPAGTVQMLDRLESEILADRVSEESRRWLASCGLTVEQMINQMDPVYTPARKIHLYHCDHRGLPLALISTEGATAWCAEYDEWGNLLSDENPHHLQQLIRLPGQQYDEESGLYYNRHRYYDPLLGRYITQDPIGLKGGWNFYQYPLNPVINVDPQGLVDINLYPESDLIHSVADEINIPGVFTIGGHAMTYDLSEEKSASGAVLKARSIIVATGAKWRNMNVPGEDQYRTKGVTYCPHCDGPLFKGKRVAVIGGGNSGVEAAIDLAGIVEHVTLLEFAPEMKADQVLQDKLRSLKNVDIILNAQTTEVKGDGSKVVGLEYRDRVSGDIHNIELAGIFVQIGLLPNTNWLEGAVERNRMGEIIIDAKCETNVKGVFAAGDCTTVPYKQIIIATGEDEGNLDFTNQVQRRSQSCFTFFPFSRANFTWVRSYVLCCFDFTQQVRRVTANAFSGNFDCLDDTLRVNNEGRTVSQTFIFTHVVEVTGQGASRVADHRIFDFSDGFRAAVPCFVGEVSIGRYCVYVYAQFLQFFVVVSNVTQFGRAYESKVSRVEEEDAPAAFVLFAPTAFAAEQTVEAPSVDARAWILMDYASGKVLAEGNADEKLDPASLTKIMTSYVVGQALKADKIKLTDMVTVGKDAWATGNPALRGSSVMFLKPGDQVSVADLNKGVIIQSGNDACIALADYVAGSQESFIGLMNGYAKKLGLTNTTFQTVHGLDAPGQFSTARDMALLGKALIHDVPEEYAIHKENSVSTSTFTFSDSPRERKKDI

SEQ ID NO: 51954 - protein, 404 aa, Homo sapiens
  DOMAIN (1)..(56): Glyceraldehyde 3-phosphate dehydrogenase proteins domain identified by eMATRIX, accession number BL00071D, p-value=5.114e- 35, raw score of 19.39
  DOMAIN (3)..(74): glyceraldehyde 3-phosphate dehydrogenas domain identified by PFam, accession name gpdh, E-value=5.4e-23, PFam score of 79.4
  misc_feature (1)...(404): Xaa = X or * as defined in Table 2
MHDQQVIDAYHPDLRRTRAASQSIIPVDTKLAAGITRFFPQFNDRFEAIAVRVPTINVTAIDLSVTVKKPVKTDVGGAGTVKLNRCQIARISRQDVITPPGCVFEKALTLLIASGRNDTLARQNNHTKESLVEKPFRKILVIKMRYHGDMLLTTPVISTLKQNYPDAKIDMLLYQDTIPILSENPEINALYGISNKGAGTFDKIKNVLSLIKTLRANNYDLVINLTDQWMVALLVRCLPARMKISQLYGHRQHGIWKKSFTHLAPIHGTHIVERNLSVLEPLGITDFYTDTTMSYAEDCWKKMRRELDALGVKDHYVVIQPTARQIFKCRDNDIISKVICMIRGSPTEGRWSVFFFYPADFTFVCPTELGDGCXPLRRTAETGRRRIRSIYRYSLHPQSMAQQL

SEQ ID NO: 51955 - protein, 354 aa, Homo sapiens; identical to SEQ ID NO: 50552
  DOMAIN (103)..(151): L-lactate dehydrogenase proteins domain identified by eMATRIX, accession number BL00064B, p-value=1.000e-40, raw score of 23.57
  DOMAIN (43)..(352): lactate/malate dehydrogenase domain identified by PFam, accession name ldh, E-value=6.9e-177, PFam score of 601.0

SEQ ID NO: 51956 - protein, 371 aa, Homo sapiens
MNMNIKKIVKQATVLTFTTALLAGGATQAFAKENTQKASKEPWPLLNAVGTVSEYYGYHVVYALAGSPKDADVTSFYMFYQKVGDNSIDSWKNAGRVFKDSDKFDANDPILKDQTQEWSGSATFTSDGKIRLFYTDYSGKHYGKQSLTTAQTKAINTLYSKPTREQKTDTKAKNLYLTKRTTAAGTNFFRKESQKLQQSAKKRDAELANGALGIIELNNDYTLKKVMKPLITSNTVTDEIERANVFKMNGKWYLFTDSRGSKMTIDGINSNDIYMLGYVSNSLTGPYKPLNKTGLVLQMGLDPNDVTFTYSHFAVPQAKGNNVVITSYMTNRGFFEDKKATFAPSFLMNIKGNKTSVVKNSILEQGQLTVN

SEQ ID NO: 51957 - protein, 116 aa, Homo sapiens; identical to SEQ ID NO: 49532
  misc_feature (1)...(116): Xaa = X or * as defined in Table 2

SEQ ID NO: 51958 - protein, 692 aa, Homo sapiens
  DOMAIN (570)..(597): CYTIDINE DEAMINASE HYDROLASE ZINC AMINOHY domain identified by eMATRIX, accession number PD02269B, p-value=5.390e-09, raw score of 18.48
  DOMAIN (549)..(629): Cytidine and deoxycytidylate deaminase domain identified by PFam, accession name dCMP_cyt_deam, E-value=2e-05, PFam score of 31.4
MNMNIKKIVKQATVLTFTTALLAGGATQAFAKENNQKAYKETSLNSSKTKNTKCLNSINQRLKILSLQKDLMCGTAGAENADGTVAEYNGYHVVFALAGTRKTLMTHQSTCFIKSWKNAGRVFKDSDKFDANDPILKDQTQEWSGSATFTSDGKIRLFYTDYSGKHYGKQSLTTAQVNVSKSDDTLKINGVEDHKTIFDGDGKTYQNVQQFIDEGNYTSGDNHTLRDPHYVEDKGHKYLVFEANTGTENGYQGEESLFNKAYYGGGTNFFRKESQKLQQSAKKRDAELANGALGIIELNNDYTLKKVMKPLITSNTVTDEIERANVFKMNGKWYLFTDSRGSKMTIDGINSNDIYMLGYVSNSLTGPYKPLNKTGLVLQMGLDPNDVTFTYSHFAVPQAKGNNVVITSYMTNRGFFEDKKATFAPSFLMNIKGNKTSVVKNSILEQGQLTWLQVAKRAGLGGGQSGRTVLRERVRIEIASTHIALAVECVSVRVWKVPRLPSRQKYAKHASQLVSNQKSEEEEYMKTFNISQQDLELVEVATEKITMLYEDNKHHVGAAIRTKTGEIISAVHIEAYIGRVTVCAEAIAIGSAVSNGQKDFDTIVAVRHPYSDEVDRSIRVIPTYGTDEWEQWWNAFNEENLFCSEEMPSSDDEATADSQHSTPPKKKRKYIYVLVIAITMVMRFWQYINGRG

SEQ ID NO: 51959 - protein, 122 aa, Homo sapiens
VWTEGTGNASRARRWKGNQLLPVSLVKRKTTLAPNTQTASPRALADSLMQLARQVSRLEKRAVSATQLMAKAVKGQSSLLPVSLVKKKNHPGALIRKPPLPARWPILLIQLARQVSRLETGQ

SEQ ID NO: 51960 - protein, 478 aa, Homo sapiens
  DOMAIN (341)..(396): ELEMENT INSERTION TRANSPOSABLE SEQUENCE TRANSPOSASE FOR domain identified by eMATRIX, accession number PD02662D, p-value= 3.973e-10, raw score of 21.71
  misc_feature (1)...(478): Xaa = X or * as defined in Table 2
TAAKRKIPSASIRSINDXKYXVCKRTXCVGQLAAENADGTVAEYNGYHVVFALAGSPKDADDTSIYMFYQKVGDNSIDSWKNAGRVLMNPLMILVKIIKLSLTLACHALLDCKTLTLTELGRNLPTKARTKHNIKRIDRLLGNRHLHKERLAVYRWHASFICSGNTMPIVLVDWSDIREQKRLMVLRASVALHGRSVTLYEKAFPLSEQCSKKAHDQFLADLASILPSNTTPLIVSDAGFKVPWYKSVEKLGWYWLSRVRGKVQYADLGAENWKPISNLHDMSSSHSKTLGYKRLTKSNPISCQILLYKSRSKGRKNQRSTRTHCHHPSPKIYSASAKEPWVLATNLPVEIRTPKQLVNIYSKRMQIEETFRDLKSPAYGLGLRHSRTSSSERFDIMLLIALMLQLTCWLAGVHAQKQGWDKHFQANTVRNRNVLSTVRLGMEVLRHSGYTITREDLLVAATLLAQNLFTHGYALGKL

SEQ ID NO: 51961 - protein, 1095 aa, Homo sapiens
  DOMAIN (242)..(282): Chloramphenicol acetyltransferase proteins domain identified by eMATRIX, accession number BL00100B, p-value=4.333e-30, raw score of 25.01
  DOMAIN (223)..(320): Chloramphenicol acetyltransferase domain identified by PFam, accession name CAT, E-value=1e-40, PFam score of 148.7
MGRGPPAGPGGAVLPSGAAAAGGHCQGASGWSARRAGASAAAAAADTAAHGPAPPLPSPLAPAALVSQPPAALVARPAMSLGGASERSVPATKIEITVSCRNLLDLDTFSKSDPMVVLYTQSRASHEWREFGRTEVIDNTLNPDFVRKFVLDYFFEEKQNLRFDVYNVDSKTNISKPALQNFQRYTGIQHVHRIGMAERMWCDRNRERHTVSSSGGNRLPNPEHFEAFQSVAQCTYNQTVQLDITAFLKTVKKNKHKFYPAFIHILARLMNAHPEFRMAMKDVSTQYIRKNVGVVRVKNLAYFPKGFIENMFFVSANPWVERIEKRCLELFGRDYCFSVIPNTNGDICGHYPRHIVFLEYESSEKEKDTTQLNFTVAIDFTASNGETRMSEKVGGNPLQPTSLHYMSPYQLSVYAMALKANNNDEDPNCAGIEGVLESYFQSLRTVQLYGPTYFAPVINQVASNSWSSVTLGTDSEPAVEVPQYVGIRLLVEGFTIKKPMAMCHRRMGVRPAVPLLTQRGSGEGKDSGTPTHSLHTKAQLPSPHVLRHQGQVLRRQHSKLVGTKALSTTGKALRTLPTAKVFISLPPNLDFKVAPSILKPRKSIREDRNGRSQKTVHTEGDMNMNIKKIVKQATVLTFTTALLAGGATQAFAKENNQKAYKETYGVSHITRHDMLQIPKQQQNEKYQVPQFDQSTIKNIESAKGLDVWDSWPLQNADGTVAEYNGYHVVFALAGSPKDADDTSIYMFYQKVGDNSIDSWKNAGRVFKDSDKFDANDPILKDQTQEWSGSATFTSDGKIRLFYTDYSGKHYGKQSLTTAQVNVSKSDDTLKINRVEDHKTIFDGDGKTYQNVQQFIDEGNYTSGDNHTLRDPHYVEDKGHKYLVFEANTGTENGYQGEESLFNKAYYGGGTNFFRKESQKLQQSAKKRDAELANGALGIIELNNDYTLKKVMKPLITSNTVTDEIERANVFKMNGKWYLFTDSRGSKMTIDGINSNDIYMLGYVSNSLTGPYKPLNKTGLVLQMGLDPNDVTFTYSHFAVPQAKGNNVVITSYMTNRGFFEDKKATFAPSFLMNIKGNKTSVVKNSILEPGQLAVN

SEQ ID NO: 51962 - protein, 30 aa, Homo sapiens
LPLKKYLFAISSWSGVTVAQEGQRKRGSGK

SEQ ID NO: 51963 - protein, 232 aa, Homo sapiens
ANHTLRDPHYVEDKGHKYFVFEANTGTENGYQGEESLFNKAYYGGGTNFFRKESQKLQQSAKKRDAELANGALGIIELNNDYTLKKVMKPLITSNTVTDEIERANVFKMNGKWYLFTDSRGSKMTIDGINSNDIYMLGYVSNSLTGPYKPLNKTGLVLQMGLDPNDVTFTYSHFAVPQAKGNNVVITSYMTNRGFFEDKKATFAPSFLMNIKGNKTSVVKNSILEQGQLTVN

SEQ ID NO: 51964 - protein, 562 aa, Homo sapiens
LHTKAQLPSPHVLRHQGQVLRRQHSKLVGTKALSTTGKALRTLPTAKVFISLPPNLDFKVAPSILKPRKSIREDRNGRSQKTVHTEGDMNMNIKKIVKQATVLTFTTALLAGGATQAFAKENNQKAYKETYGVSHITRHDMLQIPKQQQNEKYQVPQFDQSTIKNIESAKGLDVWDSWPLQNADGTVAEYNGYHVVFALAGSPKDADDTSIYMFYQKVGDNSIDSWKNAGRVFKDSDKFDANDPILKDQTQEWSGSATFTSDGKIRLFYTDYSGKHYGKQSLTTAQVNVSKSDDTLKINRVEDHKTIFDGDGKTYQNVQQFIDEGNYTSGDNHTLRDPHYVEDKGHKYLVFEANTGTENGYQGEESLFNKAYYGGGTNFFRKESQKLQQSAKKRDAELANGALGIIELNNDYTLKKVMKPLITSNTVTDEIERANVFKMNGKWYLFTDSRGSKMTIDGINSNDIYMLGYVSNSLTGPYKPLNKTGLVLQMGLDPNDVTFTYSHFAVPQAKGNNVVITSYMTNRGFFEDKKATFAPSFLMNIKGNKTSVVKNSILEPGQLAVN

SEQ ID NO: 51965 - protein, 197 aa, Homo sapiens
  misc_feature (1)...(197): Xaa = X or * as defined in Table 2
SKGKVAIVSSHQEVRASPRRSPLGSEERPGPHTSRQAAGQPHPGTCSSVHCQGSWGLQTQNSEVIHDGDVEAISVGEDAAPGPRVHGADLGQEEEAFRXVVMGGLPDRDSALAPVPEPMHRGWAVRAAEGAVQNDPVGGSERSWGAGSHSQPFSHRPAPHTRGLAQAQTEAAGEGAVPEVHRGAVLAGVRAPGWAQP

SEQ ID NO: 51966 - protein, 86 aa, Homo sapiens
  misc_feature (1)...(86): Xaa = X or * as defined in Table 2
AGLFKSRKVSSICIRFEXILTSCLGVRISTGKLVARIHGSFADAEXILWTGGDNESVSMRXFFRPLERDLYNRIWHEIGLLLVSLL

SEQ ID NO: 51967 - protein, 116 aa, Homo sapiens
  misc_feature (1)...(116): Xaa = X or * as defined in Table 2
RWLATHYLTVKLSLLPNLAVTCQPKREQNITSNESTDCXVIVTSTKSDSLYTVGMLALSVRAIRCPLYLLTGLIFVSKNGLWYCELQSHYTVVLLLFMRKRSRFQSNVQRKLMTNF

SEQ ID NO: 51968 - protein, 220 aa, Homo sapiens
HKGHKYLVFEANTGTENGYQGEESLFNKAYYGGGTNFFRKESQKLQQSAKKRDAELANGALGIIELNNDYTLKKVMKPLITSNTVTDEIERANVFKMNGKWYLFTDSRGSKMTIDGINSNDIYMLGYVSNSLTGPYKPLNKTGLVLQMGLDPNDVTFTYSHFAVPQAKGNNVVITSYMTNRGFFEDKKATFAPSFLMNIKGNKTSVVKNSILEQGQLTVN

SEQ ID NO: 51969 - protein, 230 aa, Homo sapiens
  misc_feature (1)...(230): Xaa = X or * as defined in Table 2
VPQAKGNNVVITSYMTNRGFFEDKKATFAPSFLMNIKGNKTSVVKNSILEQGQLTWLQVAKRAGLGGGQSGRTVLRERVRIEIASTHIALQHAIVTGDAVGMDDIPQEARQYRHNQAYAYSIQGDGAEDDDERIAFASHTIQECRSQGPGGYPFKIYSSRKDRIPISQSLLESHFTVHEETAPDLETTGXPGCKDHGNLCCLSSVKLRYSMYRIKAGLWMTHPGXRTYWV

SEQ ID NO: 51970 - protein, 442 aa, Homo sapiens
  DOMAIN (28)..(71): 1 kw MIND INHIBITOR DIVISION CONTROL domain identified by eMATRIX, accession number DM01756B, p-value=4.822e-15, raw score of 22.91
  DOMAIN (2)..(107): ParA family ATPase domain identified by PFam, accession name ParA, E-value=2.3e-21, PFam score of 84.4
MGKFDEGKLPTDPHLILRLAIETVAHDYDVIVIDSAPNLGIGTINVVCAADVLIVPTPAELFDYTSALQFFDMLRDLLKNVDLKGFEPDVRILLTKYSNSNGSQSPWMEEQIRDAWGSMVLKNVVRETDEVGKGQIRMRTVFEQAIDQRSSTESIIPNDGKKLSFSVSGKMRKGHYFSSEESHVRTDILADTKMQSANGLDVWDSWPLQNADGTVAEYNGYHVVFALAGSPKDADDTSIYMFYQMVGDNSIDSWKNAGRVFKDSDKFDAHDPILKDQTQEWSGSATFTSDGKIRLFYTDYSGKHYGKQSLTTAQVNVSKSDDTLKINGVEDHKTIFDGDGKTYQNVQQFIDEGNYTSGDNHTLRDPHYVEDKGHKYLVFEANTGTENGYQSEESLFNKAYYGGGTNFFRKESQKLQQSAKKRDAELTNGAPSYHRVKLLITH

SEQ ID NO: 51971 - protein, 657 aa, Homo sapiens
MRWDCRPPAAPPAASALPLLSCQSSGFCRSSAVRLGSGFPAPLAVSARVSRLAPDRMVQLPQGRSRGSSLIASSAPTAPLRGRLGLIARKSACCAHNGPCLKVILFPSPASGVDPIKVQNAQLPGGGKIFFPYGKFFKFSRRNQSFRLQSENFKLGGYVLLDILASRNLMRFVKRPCEVRQPVRVNNAPADKARATSSTGPECGDGDGKAEVNGTGGMQASARGYGCGSFNHVGKPTQVFTTRLEGSALAQGEDITDRLTLYRPIMDTSHRWPLQNADGTVAEYNGYHVVFALAGSPKDADDTSIYMFYQKVGDNSIDSWKNAGRVFKDSDKFDANDPILKDQTQEWSGSATFTSDGKIRLFYTDYSGKHYGKQSLTTAQVNVSKSDDTLKINGVEDHKTIFDGDGKTYQNVQQFIDEGNYTSGDNHTLRDPHYVEDKGHKYLVFEANTGTENGYQGEESLFNKAYYGGGTNFFRKESQKLQQSAKKRDAELANGALGIIELNNDYTLKKVMKPLITSNTVTDEIERANVFKMNGKWYLFTDSRGSKMTIDGINSNDIYMLGYVSNSLTGPYKPLNKTGLVLQMGLDPNDVTFTYSHFAVPQAKGNNVVITSYMTNRGFFEDKKATFAPSFLMNIKGNKTSVVKNSILEQGQLTSSK

SEQ ID NO: 51972 - protein, 542 aa, Homo sapiens
  DOMAIN (16)..(110): ZU5 domain identified by PFam, accession name ZU5, E-value=1e -37, PFam score of 138.7
MIPFQETFIIKRGGITGFLVSFMVDARGGSMRGSRHHGMRIIIPPRKCTAPTRITCRLVKRHKLANPPPMVEGEGLASRLVEMGPAGAQFLGRSDSSLRERKYPKAIKETYGVSHITRHDMLQIRKQQQNEKYQVPQFDQSTIKNIESAKGLDVWDSWPLQNADGTVAEYTCYHVVFAHAGSPKDADDTSIYMFYQKVGDNSIDSWKNAGRVFKDSDKFDANDPILKDQTQEWSGSATFTSDGKIRLLYTDYSGKHYGKQSLTTAQVNVSKSDDTLKINGVEDHKTIFDGDGKTYQNVQQFIDEGNYTSGDNHTLRDPHYVEDKGHKYLVFEANTGTENGYQGEESLFNKAYYGGGTNFFRKESQKLQQSAKKRDAELANGALGIIELNNDYTLKKVMKPLITSNTVTDEIERANVFKMNGKWYLFTDSRGSKMTIDGINSNDIYMLGYVSNSLTGPYKPLNKTGLVLQMGLDPNDVTFTYSHFAVPQAKGNNVVITSYMTNRGFFEDKKATFAPSFLMNIKGNKTSVVKNSILEQGQLTVN

SEQ ID NO: 51973 - protein, 603 aa, Homo sapiens
  DOMAIN (442)..(453): RNase H domain identified by eMATRIX, accession number PF00075B, p-value=7.517e-12, raw score of 12.56
  DOMAIN (375)..(560): Reverse transcriptase domain identified by PFam, accession name rvt, E-value=2.4e-37, PFam score of 137.5
MNMNIKKIVKQATVLTFTTALLAGGATQAFAKENNQKAYKETYGVSHITRHDMLQIPKQQQNEKYQVPQFDQSTIKNIESAKGLDVWDSWPLQNADGTVAEYNGYHVVFALAGSPKDADDTSIYMFYQKVGDNSIDSWKNAGRVFKDSDKFDANDPILKDQTQEWSGSATFTSDGKIRLFYTDYSGKHYGKQSLTTAQVNVSKSDDTLKINGVEDHKTIFDGDGKTYQNVQQFIDEGNYTSGDNHTLRDPHYVEDKGHKYLVFEANTGTENGYQGEESLFNKAYYGGGTNFFRKESQKLQQSAKKRDAELANGALGIIELNNDYTLKKVMKPLITSNTVTDEIERANVFKMNGKWQYPLRPKAQQGLQKIVKDLKAQGLVKSCNSPCNTPILGVQKPSRQWRLVQELRIINEAVVPLDPAVPNPHTLLSQIPEEAVWFTVLDLKDAFFSIPVHPDSQFLFAFEDPSNPTSQLTWTVLPQGFRDSPHLFGQALAQDLSQFSYLDTLVLRYMDDLLLAASSETLCHQATQALLNFLATCGYKVSKPNAQHCSQQVKYLGLKLSKGTKALGEERIQPILAYPHPKTLKQLRGFLGITGFCQIWIFP

SEQ ID NO: 51974 - protein, 45 aa, Homo sapiens; identical to SEQ ID NO: 49536
  misc_feature (1)...(45): Xaa = X or * as defined in Table 2

SEQ ID NO: 51975 - protein, 645 aa, Homo sapiens
MKNTELEQLINGKLNSAAISDYAPNGSVIAPVVRLVLLLEACLSRLMALPPTDGNFACARSRFVDRMGAAWNALHQPARNRHPCQSNSSRKQHNKRNLINQGERRETTFKHLSLLDRVYQTAPPEEGAEEKTIRCTRRFPRAESFVNEAGASRPSLVATTFQVSEGFFNLHSLRIDINKFVWEFEFQQVTTQPRRQSKTTTRTGDTQEKQRGKERKRRRQRAQRHRSQEGTSARKANKAATQRRHKPRTARPNRATKRKATHGAAKGGRRHPPKSNRTTHKDNTTETAHPERQHPKGKNTQQKEETRGEKPRTRDPGEERKARARKGTRENQGPDQGREPKARGRAPEREGTNPDRPAKTRGPKKHQGPQNRAPEPLDAGELSWRTDDHISIAPGKMFSTGENWSRFFRFNTAWQWGEREEQAINREGDWIISPGRDTSNADKLDNNTAGAENQIKEVEATLMELRAQRQQAEAELKLARVTYSRQQRLAQTKAVSQQDLDTAATEMAVKQAQIGTIDAQIKRNQASLDTAKTNLDYTRIVAPMAGEVTQITTLQGQTVIAAQQAPNILTLADMSAMLVKAQVSEADVIHLKPGQKAWFTVLGDPLTRYDGQIKDVLPTPEKVNDAIFYYARFEVPNPNVCCGWI

SEQ ID NO: 51976 - protein, 45 aa, Homo sapiens; identical to SEQ ID NO: 49538
  misc_feature (1)...(45): Xaa = X or * as defined in Table 2

SEQ ID NO: 51977 - protein, 116 aa, Homo sapiens; identical to SEQ ID NO: 49539
  misc_feature (1)...(116): Xaa = X or * as defined in Table 2

SEQ ID NO: 51978 - protein, 139 aa, Homo sapiens; identical to SEQ ID NO: 49540

SEQ ID NO: 51979 - protein, 45 aa, Homo sapiens; identical to SEQ ID NO: 49538
  misc_feature (1)...(45): Xaa = X or * as defined in Table 2

SEQ ID NO: 51980 - protein, 143 aa, Homo sapiens; identical to SEQ ID NO: 49543
  misc_feature (1)...(143): Xaa = X or * as defined in Table 2

SEQ ID NO: 51981 - protein, 45 aa, Homo sapiens; identical to SEQ ID NO: 49538
  misc_feature (1)...(45): Xaa = X or * as defined in Table 2

SEQ ID NO: 51982 - protein, 301 aa, Homo sapiens; identical to SEQ ID NO: 49546
  DOMAIN (113)..(168): ELEMENT INSERTION TRANSPOSABLE SEQUENCE TRANSPOSASE FOR domain identified by eMATRIX, accession number PD02662D, p-value= 3.973e-10, raw score of 21.71
  misc_feature (1)...(301): Xaa = X or * as defined in Table 2

SEQ ID NO: 51983 - protein, 378 aa, Homo sapiens
MNMNIKKIVKQATVLTFTTALLAGGATQAFAKENNQKAYKETYGVSHITRHDMLQIPKQQQNEKYQVPQFDQSTIKNIESAKGLDVWDSWPLQNADGTVAEYTGYHVVFALAGSRKDADDTSIYMFYQKVGDNSIDSWKNAGRVFKDSDKFDANDPILKDQTQEWSGSATFTSDGKIRLFYTDYSGKHYGKQSLTTAQVNVSKSDDTLKINGVEDHKTIFDGDGKTYQNVQQFIDEGNYTSGDNHTLRDPHYVEDKGHKYLVFEAQHGEQKTDSQGEESLFNKASFLIVLLAYASGIIFTMVLDDLPNLEDIYTSLCSSTMEDSEMDFDSGLEDDDTKSDSILEDSTIFVAFKGNIDDKDFKWKLDAILKNVPNLLHM

SEQ ID NO: 51984 - protein, 116 aa, Homo sapiens; identical to SEQ ID NO: 49539
  misc_feature (1)...(116): Xaa = X or * as defined in Table 2

SEQ ID NO: 51985 - protein, 116 aa, Homo sapiens; identical to SEQ ID NO: 49532
  misc_feature (1)...(116): Xaa = X or * as defined in Table 2

SEQ ID NO: 51986 - protein, 80 aa, Homo sapiens; identical to SEQ ID NO: 49550
  misc_feature (1)...(80): Xaa = X or * as defined in Table 2

SEQ ID NO: 51987 - protein, 45 aa, Homo sapiens; identical to SEQ ID NO: 49538
  misc_feature (1)...(45): Xaa = X or * as defined in Table 2

SEQ ID NO: 51988 - protein, 119 aa, Homo sapiens
  misc_feature (1)...(119): Xaa = X or * as defined in Table 2
AGLFKSRKVSSICIRFEXILTSCLGVRISTGKLVARTHGSFADAEXILGDGWXQXVRVERXFFRPLERDLYNRILACPLINTXPTPVVRLKPXTVWSMGPVVGTPARPIRTSGACWWCW

SEQ ID NO: 51989 - protein, 85 aa, Homo sapiens
  misc_feature (1)...(85): Xaa = X or * as defined in Table 2
AEQDCTILPVLRHFTFFKSRKVSSICIRFEXILTSCLGVRISTGKLVARTHGSFADDQTLFFMTLAVSGELWTPSPWRPNSIRTS

SEQ ID NO: 51990 - protein, 116 aa, Homo sapiens; identical to SEQ ID NO: 49532
  misc_feature (1)...(116): Xaa = X or * as defined in Table 2

SEQ ID NO: 51991 - protein, 46 aa, Homo sapiens; identical to SEQ ID NO: 49557
  misc_feature (1)...(46): Xaa = X or * as defined in Table 2

SEQ ID NO: 51992 - protein, 372 aa, Homo sapiens
  misc_feature (1)...(372): Xaa = X or * as defined in Table 2
SFLWRFRLRGGSERFCLAGIPSASGVXNIPSASIRSINDXKYXVCKRTXCVGQLAAENADGTVAEYNGYHVVFALAGSPKDADDTSIYMFYQKVGDNSIDSWKNAGRVFKDSDKFDANDPILKDQTQEWSGSATFTSDGKIRLFYTDYSGKHYGKQSLTTAQVNVSKSDDTLKINGVEDHKTIFDGDGKTYQNVQQFIDEGNYTSGDNHTLRDPHYVEDKGHKYLVFEANTGTENGYQGEESLFNKAYYGGGTNFFRKESQKLQQSAKKRDAELANGALGIIELNNDYTLKKVMKPLITSNTVTDEIERANVFKMNGKWYLFTDSRGSKMTIDAKSTLLESTEGSMTPPMTATEPFLRFLKGEIAQPKPHPL

SEQ ID NO: 51993 - protein, 35 aa, Homo sapiens
ELFSGQLTAHPSCSYGWRGIFRQRDTVPSLFGRGA

SEQ ID NO: 51994 - protein, 334 aa, Homo sapiens
  DOMAIN (113)..(168): ELEMENT INSERTION TRANSPOSABLE SEQUENCE TRANSPOSASE FOR domain identified by eMATRIX, accession number PD02662D, p-value= 3.973e-10, raw score of 21.71
  misc_feature (1)...(334): Xaa = X or * as defined in Table 2
HHTAHCQXCWLXSDHGINPLRSWVGTGXVGVRGKVQYADLGAENWKPISNLHDMSSSHSKTLGYKRLTKSNPISCQILLYKSRSKGRKNQRSTRTHCHHPSPKIYSASAKEPWVLATNLPVEIRTPKQLVNIYSKRMQIEETFRDLKSPAYGLGLRHSRTSSSERFDIMLLIALMLQLTCWLAGVHAQKQEHPLWSLALVRRRSPAQSPHVGTGSSGSTGCSSQAPCMKSNNALIVILGTVTLDAVGIGLVMPVLPGLLRDIVHSDSIASHYGVLLALYALMQFLCAPVLGALSDRFGRRPVLLASLLGATIDYAIMATTPVLWIYPLVNSPSC

SEQ ID NO: 51995 - protein, 116 aa, Homo sapiens; identical to SEQ ID NO: 49532
  misc_feature (1)...(116): Xaa = X or * as defined in Table 2

SEQ ID NO: 51996 - protein, 197 aa, Homo sapiens
  misc_feature (1)...(197): Xaa = X or * as defined in Table 2
MGVNDLWQILEPVKQHIPLRNLGGKTIAVDLSLWVCEAHPVKKMMGSVMKKHLRDFADFGTTIKQDFRLLGQTSVDRLLQLSQGQAAYPIPDDQVQSVLISMLLIALMLHLTCGLAGVHAQKQGWDKHFQANTVRNRNVLSTVRLGMEVLRHSGYTITREDSLVAATLLTQNLFTHGYVLGKLXGDLSVLSLHILEY

SEQ ID NO: 51997 - protein, 45 aa, Homo sapiens; identical to SEQ ID NO: 49536
  misc_feature (1)...(45): Xaa = X or * as defined in Table 2

SEQ ID NO: 51998 - protein, 31 aa, Homo sapiens
  misc_feature (1)...(31): Xaa = X or * as defined in Table 2
AGLFKSRKVSSICIRFEXILTSCLGVRIFNR

SEQ ID NO: 51999 - protein, 532 aa, Homo sapiens
  DOMAIN (52)..(95): 1 kw MIND INHIBITOR DIVISION CONTROL domain identified by eMATRIX, accession number DM01756B, p-value=4.822e-15, raw score of 22.91
  DOMAIN (13)..(131): ParA family ATPase domain identified by PFam, accession name ParA, E-value=8.7e-17, PFam score of 69.2
MRLGFESRGEIAKDQAKLDLAGQKERDNQSSTLGEAETPLIICWSTLEDPHYDVIVIDSAPNLGIGTINVVCAADVLIVPTPAELFDYTSALQFFDMLRDLLKNVDLKGFEPDVRILLTKYSNSNGSQSPWMEEQIRDAWGSMVLKNVVRETDEVGKGQIRMRTVFEQAIDQRSSTDTSLSTPAAPMVDSLIARVGVMARGNAITLPVCGRDVKFTLEVLRGDSVEKTSRVWSGNERDQELLTEDALDDLIPSFLLTGQQTPAFGRRVSLYPLAGGATQAFAKENNQKAYKETYGVSHITRHDMLQIPKQQQNEKYQVPQFDQSTIKNIESAKGLDVWDSWPLQNADGTVAEYNGYHVVFALAGSPKDADDTSIYMFYQKVGDNSIDSWKNAGRVFKDSDKFDANDPILKDQTQEWSGSATFTSDGKIRLFYTDYSGKHYGKQSLTTAQVNVSKSDDTLKINGVEDHKTIFDGDGKTYQNVQQFIDEGNYTSGDNHTLRDPHYVEDKGHKYLVFEANTGTENGYQGEESLFT

SEQ ID NO: 52000 - protein, 116 aa, Homo sapiens; identical to SEQ ID NO: 49532
  misc_feature (1)...(116): Xaa = X or * as defined in Table 2

SEQ ID NO: 52001 - protein, 45 aa, Homo sapiens; identical to SEQ ID NO: 49538
  misc_feature (1)...(45): Xaa = X or * as defined in Table 2

SEQ ID NO: 52002 - protein, 49 aa, Homo sapiens
WPSCREPWPDACGGWSCVCRGCLGDACVGEGLRQGCLLKASATLVQGVP

SEQ ID NO: 52003 - protein, 45 aa, Homo sapiens; identical to SEQ ID NO: 49538
  misc_feature (1)...(45): Xaa = X or * as defined in Table 2

SEQ ID NO: 52004 - protein, 1027 aa, Homo sapiens
  DOMAIN (905)..(932): CYTIDINE DEAMINASE HYDROLASE ZINC AMINOHY domain identified by eMATRIX, accession number PD02269B, p-value=5.390e-09, raw score of 18.48
  DOMAIN (884)..(964): Cytidine and deoxycytidylate deaminase domain identified by PFam, accession name dCMP_cyt_deam, E-value=2e-05, PFam score of 31.4
MNMNIKKIVKQATVLTFTTALLAGGATQAFAKENNQKAYKETYGVSHITRHDMLQIPKQQQNEKYQLHGLLSPQHADTIRGKSHVSSRGQGKASSDVSALKAHAFCSATKQDKEDRDLHLRRPAPTKIAGSGPSVDRQGSRGPRAAAPPSLLSLPAPEVTRYVPAYSYRRIPALLFARRSVAGTEATVGTSVIHPPNPPVSPGKTVNDVNSNNNMSYRNAGTVRQMLESKRNVSESAPPSFQTPVNTVSSTNLVTPPAVVSSQPKLQTPVTSGSLTATSVLPAPNTATVVATTQSIREDRNGRSQKTVHTEGDMNMNIKKIVKQATVLTFTTALLAGGATQAFAKENNQKAYKETYGVSHITRHDMLQIPKQQQNEKYQVPQFDQSTIKNIESAKGLDVWDSWPLQNADGTVAEYNGYHVVFALAGSPKDADDTSIYMFYQKVGDNSIDSWKNAGRVFKDSDKFDANDPILKDQTQEWSGSATFTSDGKIRLFYTDYSGKHYGKQSLTTAQVNVSKSDDTLKINGVEDHKTIFDGDGKTYQNVQQFIDEGNYTSGDNHTLRDPHYVEDKGHKYLVFEANTGTENGYQGEESLFNKAYYGGGTNFFRKESQKLQQSAKKRDAELANGALGIIELNNDYTLKKVMKPLITSNTVTDEIERANVFKMNGKWYLFTDSRGSKMTIDGINSNDIYMLGYVSNSLTGPYKPLNKTGLVLQMGLDPNDVTFTYSHFAVPQAKGNNVVITSYMTNRGFFEDKKATFAPSFLMNIKGNKTSVVKNSILEQGQLTWLQVAKRAGLGGGQSGRTVLRERVRIEIASTHIALAVECVSVRVWKVPRLPSRQKYAKHASQLVSNQKSEEEEYMKTFNISQQDLELVEVATEKITMLYEDNKHHVGAAIRTKTGEIISAVHIEAYIGRVTVCAEAIAIGSAVSNGQKDFDTIVAVRHPYSDEVDRSIRVIPTYGTDEWEQWWNAFNEENLFCSEEMPSSDDEATADSQHSTPPKKKRKYIYVLVIAITMVMRFWQYINGRG

SEQ ID NO: 52005 - protein, 45 aa, Homo sapiens; identical to SEQ ID NO: 49538
  misc_feature (1)...(45): Xaa = X or * as defined in Table 2

SEQ ID NO: 52006 - protein, 493 aa, Homo sapiens
SIREDRNGRSQKTVHTEGDMNMNIKKIVKQATVLTFTTALLAGGATQAFAKENNQKAYKETYGVSHITRHDMLQIPKQQQNEKYQVPQFDQSTIKNIESAKGLDVWDSWPLQNADGTVAEYNGYHVVFALAGSPKDADDTSIYMFYQKVGDNSIDSWKNAGRVFKDSDKFDANDPILKDQTQEWSGSATFTSDGKIRLFYTDYSGKHYGKQSLTTAQVNVSKSDDTLKINGVEDHKTIFDGDGKTYQNVQQFIDEGNYTSGDNHTLRDPHYVEDKGHKYLVFEANTGTENGYQGEESLFNKAYYGGGTNFFRKESQKLQQSAKKRDAELANGALGIIELNNDYTLKKVMKPLITSNTVTDEIERANVFKMNGKWYLFTDSRGSKMTIDGINSNDIYMLGYVSHSLTGPYKPLNKTGLVLQMGLDPNDVTFTYSHFAVPQAKGNNVVITSYMTNRGFFEDKKATFAPSFLMNIKGNKTSVVKNSILEQGQLTVN

SEQ ID NO: 52007 - protein, 30 aa, Homo sapiens
SLQTRYLFAISSWSGVTVAQEGQRKRGSGK

SEQ ID NO: 52008 - protein, 18 aa, Homo sapiens
VIGAGEMVHPSSCCAWRL

SEQ ID NO: 52009 - protein, 322 aa, Homo sapiens
  DOMAIN (113)..(168): ELEMENT INSERTION TRANSPOSABLE SEQUENCE TRANSPOSASE FOR domain identified by eMATRIX, accession number PD02662D, p-value= 3.973e-10, raw score of 21.71
  misc_feature (1)...(322): Xaa = X or * as defined in Table 2
HHTAHCQXCWLXSDHGINPLRSWVGTGXVGVRGKVQYADLGAENWKPISNLHDMSSSHSKTLGYKRLTKSNPISCQILLYKSRSKGRKNQRSTRTHCHHPSPKIYSASAKEPWVLATNLPVEIRTPKQLVNIYSKRMQIEETFRDLKSPAYGLGLRHSRTSSSERFDIMLLIALMLQLTCWLAGVHAQKQGWDKHFQANTVRNRNVLSTVRLGMEVLRHSGYTITREDLLVAATLLAQNLFTHGLFGPSVDAPPPKRGFKRPKLPELRLQRFFGGVITPPLESYSLPSDPVHLFPPRRPPRQLTASPLRARAPYECSSCKDA

SEQ ID NO: 52010 - protein, 881 aa, Homo sapiens
  DOMAIN (223)..(266): 1 kw MIND INHIBITOR DIVISION CONTROL domain identified by eMATRIX, accession number DM01756B, p-value=4.822e-15, raw score of 22.91
  DOMAIN (188)..(295): ParA family ATPase domain identified by PFam, accession name ParA, E-value=1.4e-23, PFam score of 91.8
LKIYSHMAIAIAQFNDDSPEARKITRRWRIGEAADLVGVSSQAIRDAEKAGRLPHPDMEIRGRVEQRVGYTIEQINHMRDVFGTRLRRAEDVFPPVIGVAAHKGGVYKTSVSVHLAQDLALKGLRVLLVEGNDPQGTASMYHGWVPDLHIHAEDTLLPFYLGEKDDVTYAIKPTCWPGLDIIPSCLALHRIETELMGKFDEGKLPTDPHLMLRLAIETVAHDYDVIVIDSAPNLGIGTINVVCAADVLIVPTPAELFDYTSALQFFDMLRDLLKNVDLKGFEPDAETSQGALGTLANVVTSLANLSESLNNGDTSEIQPEDQSASEITRAFDTLAKALNTTDSSSSPSLADGIDTSGGGSIHVISRDQSTPIIEVEGPLLSDTHVTFKSIREDRNGRSQKTVHTEGDMNMNIKKIVKQATVLTFTTALLAGGATQAFAKENNQKAYKETYGVSHITRHDMLQIPKQQQNEKYQVPQFDQSTIKNIESAKGLDVWDSWPLQNADGTVAEYNGYHVVFALAGSPKDADDTSIYMFYQKVGDNSIDSWKNAGRVFKDSDKFDANDPILKDQTQEWSGSATFTSDGKIRLFYTDYSGKHYGKQSLTTAQVNVSKSDDTLKINGVEDHKTIFDGDGKTYQNVQQFIDEGNYTSGDNHTLRDPHYVEDKGHKYLVFEANTGTENGYQGEESLFNKAYYGGGTNFFRKESQKLQQSAKKRDAELANGALGIIELNNDYTLKKVMKPLITSNTVTDEIERANVFKMNGKWYLFTDSRGSKMTIDGINSNDIYMLGYVSNSLTGPYKPLNKTGLVLQMGLDPNDVTFTYSHFAVPQAKGNNVVITSYMTNRGFFEDKKATFAPSFLMNIKGNKTSVVKNSILEQGQLTVN

SEQ ID NO: 52011 - protein, 478 aa, Homo sapiens
  DOMAIN (52)..(94): Chloramphenicol acetyltransferase proteins domain identified by eMATRIX, accession number BL00100C, p-value=1.000e-39, raw score of 23.60
  DOMAIN (28)..(164): Chloramphenicol acetyltransferase domain identified by PFam, accession name CAT, E-value=2.3e-97, PFam score of 336.9
TRTLRVQDRSAGYYGLFKDRKEKLSTSFYPAFIHILARLMNAHPEFRMAMKDGELVIWDSVHPCYTVFHEQTETFSSLWSEYHDDFRQFLHIYSQDVACYGENLAYFPKGFIENMFFVSANPWVSFTSFDLNVANMDNFFAPVFTMGKYYTQGDKVLMPLAIQIRRKNGPVLQPLHLTEKSVYSTTDYSGKHYGKQSLTTAQVNVSKSDDTLKINGVEDHKTIFDGDGKTYQNVQQFIDEGNYTSGDNHTLRDPHYVEDKGHKYLVFEANTGTENGYQGEESLFNKAYYGGGTNFFRKESQKLQQSAKKRDAELANGALGIIELNNDYTLKKVMKPLITSNTVTDEIERANVFKMNGKWYLFTDSRGSKMTIDGINSNDIYMLGYVSNSLTGPYKPLNKTGLVLQMGLDPNDVTFTYSHFAVPQAKGNNVVITSYMTNRGFFEDKKATFAPSFLMNIKGNKTSVVKNSILEQGQLTVN

SEQ ID NO: 52012 - protein, 45 aa, Homo sapiens; identical to SEQ ID NO: 49538
  misc_feature (1)...(45): Xaa = X or * as defined in Table 2

SEQ ID NO: 52013 - protein, 151 aa, Homo sapiens
MTCKTPTRKRAVSPGAIRSRVTTEGKGMIDDIKRIDSMINALRNMKQDIKRQQKLSEINSLDLSPKQAQKRNADADWIAMEQIKRRHELHALSVELGFAERRESYAPFELTDGILLRILGILLELQVAKACKPLGRTAFGRRSDSSLRERK

SEQ ID NO: 52014 - protein, 505 aa, Homo sapiens
  DOMAIN (324)..(343): L-LACTATE DEHYDROGENASE SIGNATURE domain identified by eMATRIX, accession number PR00086D, p-value=4.600e-24, raw score of 15.53
  DOMAIN (299)..(505): lactate/malate dehydrogenase domain identified by PFam, accession name ldh, E-value=9.6e-82, PFam score of 285.0
  misc_feature (1)...(505): Xaa = X or * as defined in Table 2
MSSSHSKTLGYKRLTKSNPISCQILLYKSRSKGRKNQRSTRTHCHHPSPKIYSASAKEPWVLATNLPVEIRTPKQLVNIYSKRMQIEETFRDLKSPAYGLGLRHSRTSSSERFDIMLLIALMLQLTCWLAGVHAQKQGWDKHFQANTVRNRNCKMATLKEKLIAPVAEEEANSPNNKITVVGVGQVGMACAISILGKVSWPDELALVGCFWEDKLKGGNDGSFQHGELIFFQTPKNCGQDKGLFWGPPNSXRFVSWXLAGSPVQPRRGRIRLKSWVPEKWLMVFQIPLFLKIVKYSPXFASXLVVSHPVDIPTYVTWETKVGLPKHRVIGSGCNLDSARFRYLMAEKLGIHPSSCHGWIFWGEHGDSSVAWCWNGVNVAGVSLQELNPEMGTDNDSENWKEVHKMVVESAYEVIKLKGYTNWAIGLSVADLIESMLKNLSRIHPVSTMVKGMYGIENEVFLSLPCILNARGLTSVINQKLKDDEVAQLKKSADTLWDIQKDLKDL

SEQ ID NO: 52015 - protein, 117 aa, Homo sapiens
  DOMAIN (55)..(67): KH domain proteins family of RNA binding proteins domain identified by eMATRIX, accession number PF00013, p-value=4.176e-10, raw score of 5.78
  DOMAIN (44)..(92): KH domain identified by PFam, accession name KH-domain, E- value=8.6e-16, PFam score of 65.9
ETWYSAIDTWSPSEWQMAYEPQGGSGYGGRGSYGDLGGPIITTQVTIPKDLAGSIIGKGGQRIKQIRHESGASIKIDEPLEGSEDRIITITGTQDQIQNAQYLLQNSVKQYADVEGF

SEQ ID NO: 52016 - protein, 59 aa, Homo sapiens
LLQHWGVSCWSDPERFSCALQGYIITGKRPAEDMEEEQAFKRSRNTDEMVELRILLQSK

SEQ ID NO: 52017 - protein, 296 aa, Homo sapiens
  DOMAIN (226)..(238): KH domain proteins family of RNA binding proteins domain identified by eMATRIX, accession number PF00013, p-value=4.176e-10, raw score of 5.78
  DOMAIN (219)..(263): KH domain identified by PFam, accession name KH-domain, E- value=4.2e-08, PFam score of 40.4
MPKRKAEGGAKGDKAKPEPKPKKAPAKKGEKIPKGKKGKADAGKEGNKPAENGDAKQSRPRKLKALEMPSEVSAFLITVYFWVTVEADRHKPKKKMIGITSPIKGRAQPYDPNFYDETYDYGGFTMMFDDRRGRPVGFPMRGRGGFDRMPPGRGGRPMPPSRRDYDDMSPRRGPPPPPPGRGGRGGSRARNLPLPPPPPPRGGDLMAYDRRGRPGDRYDGMLAGSIIGKGGQRIKQIRHESGASIKIDEPLEGSEDRIITITGTQDQIQNAQYLLQNRGSRGGLAICRQLFVVSGD

SEQ ID NO: 52018 - protein, 42 aa, Homo sapiens
MPVFQSQTAVAPRRILSISADIETIGEILKKIIPTLGRVPTL

SEQ ID NO: 52019 - protein, 608 aa, Homo sapiens
  DOMAIN (555)..(567): KH domain proteins family of RNA binding proteins domain identified by eMATRIX, accession number PF00013, p-value=4.176e-10, raw score of 5.78
  DOMAIN (221)..(592): KH domain identified by PFam, accession name KH-domain, E- value=2.8e-15, PFam score of 64.2
MAILRARAAEILFQETAASPQALPRLQARQGRAKVRRRSRQSPLKSAPWKLSLDHGTRGLANDIGVQWRRPARPPSRDTVPRGLALAPASHAMPCHPPHTRASEPPGAHLGTGKVPAWSLKSVVRCEQRRVMQQACAYPDRKKGMQRLKDGVCSACAQTTGKQDCENAWCVPLIQVETEQPEESFPNTETNGEFGKCPAEDMEEEQALKRSRNTDEMVELHILLQNKNSGAVIGEGGKNIKAPCIDYSASVSVPDSSGPKCILSISAGIETIGEILKKIIPTLEEGLQLPLLTPTSQLLLESDAVECLNYQHYKGRDFECELKLLIYQSLAGGILGSKECCSHPTDRVVLIGGKPNRVVECIKIILDLISESPIKGPAQPYDPSFYNETYDYGGFTMMFDDRPGCPVGFPMWGRGGFDRMPPGWGGRPMPPSRRDMSPHRGPPPPLTGRGGRGGSRARNLPLPPPPPPRGEDLMAYDRRGRPGDCYDGMVGFSPDETWNSAIDTWSPSEWQMAYEPQGGSGYDYSYAGIGGSYGDLGGPITTAQVTIPKDLTGSIIGKGGQRIKQIGHELGASIKIDEPLEGSEDQITIITGTQDQIQNAQYLLQNNV

SEQ ID NO: 52020 - protein, 49 aa, Homo sapiens
  DOMAIN (33)..(45): KH domain proteins family of RNA binding proteins domain identified by eMATRIX, accession number PF00013, p-value=4.150e-09, raw score of 5.78
NFIILPPQYQHYKGSDFDCELRLLIHQSLARGIIGVKGAKIKELREVKK

SEQ ID NO: 52021 - protein, 16 aa, Homo sapiens
VKAGRGGSWAHNLLKW

SEQ ID NO: 52022 - protein, 523 aa, Homo sapiens
  DOMAIN (113)..(125): KH domain proteins family of RNA binding proteins domain identified by eMATRIX, accession number PF00013, p-value=5.846e-11, raw score of 5.78
  DOMAIN (105)..(508): KH domain identified by PFam, accession name KH-domain, E- value=1.1e-24, PFam score of 95.4
DAWAAVSRGDEPGWGSGSWRLLQHWGVSCWSDPKRFSSALQGYIITDWCAPFNKRIWKREQPEETFPNTETNGEFGKRPAEDMEEEQAFKRSRNTDEMVELRILLQSKNAGAVIGKGGKNIKALRTDYNASVSVPDSSVPERILCISADIETIGEILKKIIPTLEEGLQLPSPTATSQLPLESDAVECLNYQHYKGSDFDCELRLLIHQSLGREGIIGGQRCLKSKELRGGTLQTTIKLFQECCPHSTDRVVLIGGKPDRFVECIKIILDLISESPIKGRAQPYDPNFYGWKPMDYGGFTMMFDDRRGRPVGFPMRGRGGFDRMPPGRGGRPMQPYRRDYDDMSPRRGPPPPPPGRGGRGGSRARNLPLPPPPPPRGGDLMAYDRRGRPGDRYDGMVGFSADETWDSAIDTWSPSEWQMAYEPQGGSGYDYSYAGGRGSYGDLGGPIITTQVTIPKDLAGSIIGKGGQRIKQIRHESGASIKIDEPLEGSEDRIITITGTQDQIQNAQYLLQNSVKQYSGKFF

SEQ ID NO: 52023 - protein, 471 aa, Homo sapiens
  DOMAIN (59)..(71): KH domain proteins family of RNA binding proteins domain identified by eMATRIX, accession number PF00013, p-value=5.846e-11, raw score of 5.78
  DOMAIN (48)..(202): KH domain identified by PFam, accession name KH-domain, E- value=5.2e-17, PFam score of 69.9
  misc_feature (1)...(471): Xaa = X or * as defined in Table 2
KNMETEQPEETFPNTETNGEFGKRPAEDMEEEQAFIRSRNTDEMVELRILLQSKNAGAVIGKGGKNIKALRTDYNASVSVPDSSGPERILSISADIETIGEILKKIIPTLEEGLQLPSPTATSQLPLESDAVECLNYQHYKGSDFDCELRLLIHQSLAGGIIGVKGAKIKELRENTQTTIKLFQECCPHSTDRVVLIGGKPDRVVECIKIILDLISESPIKGRAQPYDPNFYDETYDYGGFTMMFDDRRGRPVGFPMRGRGGFDRMPPGRGGRPMPPSRRDYDDMSPRRGPPPPPPGRGGRGLGSRARNLPLPPPPPPRGGDLMAYYKRGRPGDPYDGMVGFSADETWDSPIDTWSPSEWQMAYEPQGGSGYDYSYAQGGRGSYGDLGGPIITTQVTIPKDLALGSIYWKKGGQRIKQIPSXVGELSIKIDEPLEGSEDRIITITGTQDQIQNAQYLLQNSVKQYADVEGF

SEQ ID NO: 52024 - protein, 113 aa, Homo sapiens
  misc_feature (1)...(113): Xaa = X or * as defined in Table 2
TISEPPALILLPIAVPSFSTTCRLPEDIIVVSAFPPLLIFCVPLLILVPVAMPXLLIFCVPPLIMVFVAFPATSITPPLSIRVASALALVKTDIVPLSLIIVLFAEPYAFMSK

SEQ ID NO: 52025 - protein, 1249 aa, Homo sapiens
  DOMAIN (468)..(507): Bacterial surface antigen domain identified by eMATRIX, accession number PF01103J, p-value=1.000e-40, raw score of 9.61
  DOMAIN (827)..(985): Fimbrial proteins domain identified by PFam, accession name Fimbrial, E-value=3.3e-50, PFam score of 180.2
MVILLYGDNRRVRQKLPHFFGFLSDNNCRFLVNIYPPRVHYCWVRSDYNLYANTITVTNGGVLDVNVDQFDTEAFRTDKLELTSGNIADHNGNVVSGVFDIHSSDYVLNADLVNDRTWDTSKSNYGYGIVAMNSDGHLTINGNGDVDNGTNWIQLCNNVVAATGNYKVRIDNATGAGANADYKDKEIIYVNDVNSNATFSAANKADLGAYTYQAEQRGNTACLPQMELDDYANMPLSIPSANTNIWNLGQDTVGTRLTNSRHGLADNGGAWVSYFGGNFNGDNGTINYDQDVNGIMVGVDTKIDGNNAKWIVGAAAGSLKVDQDSQTAYIYSSAHFANNVFVDGSLSYSHFNNDLSATMSNGTYVDGSTNSDAWGFGLKAGYDFKLGDAGYVTPYGSVSGLFQSGDDYQLSNDMKVDGQSYDSMRYEGSPRVEPASACKMHKVTLDTATYVPIDDDHKWVVLGRTRWGYGDGLGGKEMPFYENFYAGGSSTVRGFQSNTIGPKAVYFPHQASNYDPDYDYECATQDGAKDLCKSDDAVGGNALAVASLEFITPTPFISDKYANSVRTSFFWDMGTVWDTNWDSSQYSGYPDYSDPSNIRMSAGIALQWMSPLGPLVFSYAQPFKKYDGDKAEQFQFNIGKTCATITPQIYPEGKLRCTAPVFEPGGGGINVARAIAHLGGSATAIFPAGGATGEHLVSLLADENVPVATVEAKDWTRQNLHVHVEASGEQYRFVMPGAALNEDEFRQLEEQVLEIESGAILVISGSLPPGVKLEKLTQLISAAQKQGIRCIVDSSGEQLSAALAIENPLAVSLLFTAPVYAADEGSGEIHFKGEVIEAPCEIHPEDIDKNIDLGQVTTTHINREHHSNKVAVDIRLINCDLPASDNGSGMPVSKVGVTFDSTAKTTGATPLLSNTSAGEHTGVGVRLMDKNDGNIVLGSAAPDLDLDASSSEQTLNFFAWMEQIDNAVDVTAGMDTVNIYRLSFVSCLVMAMPCAMAVEFNLNVLDKSMRDRIDISLIIGKGVICSRYPSVLAQLDRCLSFLLMIGFSLVAEGFGFVIPKGYLYAAIGFSVMIEALNQLAIFNRRRFLSANQTLRHETTEAVMRLLSGQKEDAELDAETASMLVDHGNQQIFNPQERRMIERVLNLNQRTVSSIMTSRHDIEHIDLNAPEEEIRQLLERNQHTRLVVTDGDDAEDLLGVVHVIDLLQQSLRGEPLNLRVMIRQPLVFPENLPLCTALEHFVMPARTLLL

SEQ ID NO: 52026 - protein, 450 aa, Homo sapiens
MIVIGARPRQSLHACSRVTWQNRLRLSNKWMPLLLEFFRHRKGYNCFLMLWHLRTDENKVTVSADKFKVKPGVDTNIETLIENALKNAAECAALDVTKQMAADKKAMDEINGPSRDVKLTFAQIAPPPGSMVLRGINPNGSIEFGMRSDEVVTKAMLNLEYTPSPSLLPVQSQLKVYLNDELMGVLPVTKEQLGKKTLAQMPINPLFISDFNRVRLEFVGHYQDVCEKPASTTLWLDVGRSSGLDLTYQTLNVKNDLSHFPVPFFDPSDNRTNTLPMVFAGAPDVGLQQASAIVASWFGSRSGWRGQNFPVLYNQLPDRNAIVFATNDKRPDFLRDHPAVKAPVIEMINHPQNPYVKQFTFACSEEYSTIKRVWVYITGVTDHHQNSQPQSMQRIAGTNVWQWTTQLNANWRGSYCLVPTERVPELDCNHSVHMRGSDLSAFIEADKLLK

SEQ ID NO: 52027 - protein, 583 aa, Homo sapiens
  DOMAIN (460)..(472): PROTEIN CBS DOMAIN BIOSYNTHESIS domain identified by eMATRIX, accession number PD00149B, p-value=7.600e-09, raw score of 12.62
  DOMAIN (367)..(483): CBS domain identified by PFam, accession name CBS, E-value= 3.8e-13, PFam score of 57.1
  misc_feature (1)...(583): Xaa = X or * as defined in Table 2
TAMAGRMPCAEVISGSATRPDGPKALFKPIGRPHQAIRPINKPPAAPPKQAVTNGFMRGRVPPKTLTVPSESSLAPMTLVVIVVKEALPPAKIFSTPVPYQPTRRAPDAEPLSASKTPSVYLVNFVVSPEDLRKLTVDVLPALRANTRALWQVEVSAFPSFMTQATPATQPLINAEPAVAAPTEQNPQVGPVMPGVQGADAPVVAQNGPSRDVKLTFAPIAPPPGSMVLRGLNPNGSLEFGMRSDEVVTKAMVQLELTPWHGYGCQCPFLPVKYLYAAIGFSVMIEALNQLAIFNRRRFLSANQTLRQRTTEAVMRLLSGQKEDAELDAETASMLVDHGNQQIFNPQERRMIERVLNLNQRTVSSIMTSRHDIEHIDLNAPEEEIRQLLERNQHTRLVVTDGDDAEDLLGVVHVIDLLQQSLRGEPLNLRVLIRQPLVFPETLPLLPALEQFRNARTHFAFVVDEFGSVEGIVTLSDVTETIAGNLPNEVEEIDARHDIQKNADRSWTGNGLLPLGDCRLXQASPTGCINRRGSHYGYPTLYEFRKRFLTPGTVCKRCDQRGDAMRVQVQWVFYTYILPLANE

SEQ ID NO: 52028 - protein, 336 aa, Homo sapiens
  DOMAIN (121)..(153): ABC transporters family proteins domain identified by eMATRIX, accession number BL00211B, p-value=2.800e-26, raw score of 13.37
  DOMAIN (34)..(201): ABC transporter domain identified by PFam, accession name ABC_tran, E-value=1.4e-28, PFam score of 108.3
  misc_feature (1)...(336): Xaa = X or * as defined in Table 2
TNNRLXKXGNNXXLTNQKKSRTRWIHSRILPEAGCGIASVGRNNCGLWRFTPAKAISWGKIHPVFQRQILRVLSQTLFPNMSLGRNLGYGLKMFGVPRAELKPRFKEALPMVNLEGFEDRFVDQISGGQQQRVALARALILKPKVLLFDEPLSNLDANLRRSMRDKIRELQKQFDITSLYVTHDQSEAFAVSDTVLVMNKGHIMQIGSPQDLYRQPASRFMASFMGDANLFPATFSDGYVDIYGYHLPRPLHFGTQGEGMVGVRPEAITLSDRGEESQRCVIRHVAYMGPQYEVTVEWHGQEILLQVNATRLQPDVGEQYYLEIHPYGMFVLADAA

SEQ ID NO: 52029 - protein, 36 aa, Homo sapiens
  misc_feature (1)...(36): Xaa = X or * as defined in Table 2
CSWHDRFPDWKAGTHLLARGXQLSLPVWLCPVLKLS

SEQ ID NO: 52030 - protein, 488 aa, Homo sapiens
  DOMAIN (308)..(355): kw TRANSCRIPTASE REVERSE II ORF2 domain identified by eMATRIX, accession number DM01354V, p-value=1.000e-40, raw score of 12.97
  DOMAIN (212)..(299): ParB-like nuclease domain identified by PFam, accession name ParBc, E-value=1.1e-08, PFam score of 42.2
NECLQVDSRGSPHDKVRVNEVTKLWKSWGTGSVKVLSLKAEPDGKGAYWYRPHKATSWISEQSGEVWRVQLKEPTVNIPQTCSELQLQGPNLLEGNVLKFFDMLRDLLKNVDLKGFEPDVRILLTKYSNSNGSQSPWMEEQIRDAWGSMVLKNVVRETDEVGKDTSLSTPAAPMVDSLIARVGVMARGNAITLPVCGRDVKFTLEVLRGDSVEKTSRVWSGNERDQELLTEDALDDLIPSFLLTGQQTPAFGRRVSGVIEIADGSRRRKAAALTESDYRVLVGELDDEQMAALFRLGNDYRPTSAYERVASKRIKYLGIQLTRDMKDLFKENYKLLLNEIKEDTNKWKTIPCSWVGRINIVKMAILPKVIYRFSAIPLKLPMTFFTELEKTTLTFIWNQKRARIAKSILSQKNKAGGIRLPDFKLYYKTTVTKTAWYWYHSRDRGQWNRTEPSEIMLRIYNHLIFDKPDKTSNWGRIPLFNNDAGKTD

SEQ ID NO: 52031 - protein, 253 aa, Homo sapiens
MDDIPQEARQYRHNQAYAYSIQGDGAEDDDKRIVRFHTRVSGVIEIADGSRRRKAAALTESDYRVLVGELDDEQMAALSRLGNDYRPTSAYERGQRYASRLQNEFAGNISALADAENISRKIITRCINTAKLPKSVVALFSHPGELSARSGDALQKAFTDKEELLKQQASNLHEQKKAGVIFEAEEVITLLTSVLKTSSASRTSLSSRHQFAPGATVLYKGDKMVLNLDRSRVPTECIEKIEAILKELEKPAP

SEQ ID NO: 52032 - protein, 361 aa, Homo sapiens
  DOMAIN (39)..(79): Chloramphenicol acetyltransferase proteins domain identified by eMATRIX, accession number BL00100B, p-value=4.333e-30, raw score of 25.01
  DOMAIN (6)..(78): Chloramphenicol acetyltransferase domain identified by PFam, accession name CAT, E-value=2.2e-39, PFam score of 144.3
MEKKITGYTTVDISQWHRKEHFEAFQSPAQCTKNQTVQLDITAFLKTVKKNKHKFYPAFIHILARLMNAHPEFRMAMKGVPGGDSVKNTSRVWSGNERDQKLLTENALNDLIPSFLLTGQQTPALGRRVSGVIEIADGSRRRKAAALTESDYRVLVGELYDEQMPPLSRLGNDYRPTSAHPQKRRYASRLQNEFAGNISALADAENISRVRDVNLLLEVLGVDSVEKTFRVWSGNERDQELLMEDALDDLIPSFLLTGQQTPAFGRRVSGVIEIADGSRRRKAAALTESDYRVLVGELDDEQMAALSRLGNDYRPTSAYERGQRYASRLQNEFAGNISALADAENISRKIIPRCINSAKLP

SEQ ID NO: 52033 - protein, 311 aa, Homo sapiens
MLRDLLKNVDLKGFEPDVRILLTKYSNSNGSQSPWMEEQIRDAWGSMVLKNVVRETDEVGKGQIRMRTVFEQAIDQRSSTDNEGAPVIPKHTLNTQPVEDTSLSTPAAPMVDSLIARVGVMARGNAITLPVCGRDVKFTLEVLRGDSVEKTSRVWSGNERDQELLTEDALDDLIPSFLLTGQQTPAFGRRVSGVIEIADGGSSRSKKRRRGCEGGRRVRQGCPDQKHPAAFSVSGGKIHLSGRTPVEKRPRLPQPRDLGARAFAACRGSRGRPWNWLPAALRLHADLGCVRGGGGGWPGANPYPAPASSTC

SEQ ID NO: 52034 - protein, 247 aa, Homo sapiens
  misc_feature (1)...(247): Xaa = X or * as defined in Table 2
QHAIVTGDAVGMHHIPQEARQYRHNQAYAYSIQGDGAEDDDERIVRFHTRCLTEAFEKLQCGGVVNQLSRRGNNQHISSTYDINRADTQVRRAVNNYDIIVMSNSFNASRSIRCGSVGSLPSSNLPINSVSIRCRARSGEEXCQAPASKWALLHKXHRPFPQDRKAGECLLHEYEDLVPIRDTLRLFPGGRYLPRAKHVAPSEPDPEQDEQKLRFCKRHLYGQQPRSPVEIRLQHVAIAYPTHHAYD

SEQ ID NO: 52035 - protein, 207 aa, Homo sapiens
  misc_feature (1)...(207): Xaa = X or * as defined in Table 2
IRLEPFKINVLEQITKHIEKLQCGGVVKQLSRRGNNQHISSTYDINRADTQVRRAVNNYDIIVMSNSFNASRSIRCGSVGSLPSSNLPINSVSIRCRARSGEEXCQAPASKWALLHKXHRPFPQDRKAGECLLHEYEDLVPIRDTLRLFPGGRYLPRAKHVAPSEPDPEQDEQKLRFCKRHLYGQQPRSPVEIRLELVAIAYQTHHA

SEQ ID NO: 52036 - protein, 158 aa, Homo sapiens
TPAFGRRVSGVIEIADGSRRRKAAALTESDYRVLVGELDDEQMAALSRLGNDYRPASAYERGQRYASRLQNEFAGNISALADAENISRKIITRCINTAKLPKSVVALFSHPGELSARSGDALQKAFTDKEELLKQQASNLHEQKKAGVIFEAEEISLF

SEQ ID NO: 52037 - protein, 379 aa, Homo sapiens
  DOMAIN (134)..(177): 1 kw MIND INHIBITOR DIVISION CONTROL domain identified by eMATRIX, accession number DM01756B, p-value=4.822e-15, raw score of 22.91
  DOMAIN (99)..(213): ParA family ATPase domain identified by PFam, accession name ParA, E-value=1.6e-26, PFam score of 101.5
SRVKLGQSSESQVAALKTREPMNIATLEVLVLKGLRVCFVKVNHPKGPASMYPGWVPILYIHAEDPLLPFYLGEKEDVTYAIKPTCWPGLDIIPSCLALPRIETELMGKFDEGKLPTDPHLMLRLAIETVAHDYDVIVIDSAPNLGIGTINVVCAADVLIVPTPAELFDYTSALQFFDMLRPLLKNVDLKGFEPDVRILLTKYSNSNGSQSPWMEEQIRDAWGSMVLKNVKEFAGNISALADAENISRKIITRCINTAKLPKSVVALFSHPGELSAGDALQKAFTDKEELLKQQASNLHEQKKAGVIFEAEEVITLLTSVLKTSSASRTSLSSRHQFAPGATVLYKGDKMVLNLDRSRVPTECIEKIEAILKELEKPAP

SEQ ID NO: 52038 - protein, 205 aa, Homo sapiens
  misc_feature (1)...(205): Xaa = X or * as defined in Table 2
LEPASLSIPNLLLHPRGLRAITIAVFGKQNTYIRLEPFKINVLEQITKHIEKLQCGGVVKQLSRRGNNQHISSTYDINRADTQVRRAVNNYDIIVMSNSFNASRSIRCGSVGSLPSSNLPINSVSIRCRARSGEEXCQAPASKWALLHKXHRPFPQDRKAGECLLHEYEDLVPIRDTLRLFPGGRYLPRAKHVAPSEPILSCQLH

SEQ ID NO: 52039 - protein, 257 aa, Homo sapiens
  misc_feature (1)...(257): Xaa = X or * as defined in Table 2
QHAIVTGDAVGMDDIPQEARQYRHNQAYAYSIQGDGAEDDDERIVRFHTRRLTFKINVLEQITKHIEKLQCGGVVKQLSRRGNNQHISSTYDINRADTQVRRAVNNYDIIVMSNSFNASRSIRCGSVGSLPSSNLPINSVSIRCRARSGEEXCQAPASKWALLHKXHRPFPQDRKAGECLLHEYEDLVPIRDTLRLFPGGRYLPRAKHVAPSEPDPEQDEQKLRFCKRHLYGQQPRSPVEIRLQHVAIAYQTHHAYD

SEQ ID NO: 52040 - protein, 266 aa, Homo sapiens
  DOMAIN (67)..(154): ParB-like nuclease domain identified by PFam, accession name ParBc, E-value=1.7e-10, PFam score of 48.3
MKRAPVIPKHTLNTQPVEDTSLSTPAAPMVDSLIARVGVMARGNAITLPVCGRDVKFTLEVLRGDSVEKTSRVWSGNERDQELLTEDALDDLIPSFLLTGQQTPAFGRRVSGVIEIADGSRRRKAAALTESDYRVLVGELDDEQMAALSRLGNDYRPTSAYERGDALQKAFTDKEELLKQQASNLHEQKKAGVIFEAEEVITLLTSVLITSSASRTGGSSRHQFAPGATVLYKGDKMVLNLDRSRVPTECIEKIEAILKELEKPAP

SEQ ID NO: 52041 - protein, 594 aa, Homo sapiens
  DOMAIN (238)..(281): 1 kw MIND INHIBITOR DIVISION CONTROL domain identified by eMATRIX, accession number DM01756B, p-value=4.822e-15, raw score of 22.91
  DOMAIN (203)..(317): ParA family ATPase domain identified by PFam, accession name ParA, E-value=4e-27, PFam score of 103.5
MVDSLIARVGVMARGNAITLPVCGRDVKFTLEVLRGDSVEKTSRVWSGNERDQELLTEDALDDLIPSFLLTGQQTPAFGRRVSGVIEIADGSRRRKAAALTESDYRVLVGELHDEQMAALYRLGNDYRPTSAYERGQRYASRLQNEFAGNISALADAENISHLHIHAEDTFLPFYLGKKDDVTYAIKPTCWPGLDIIPSCLALHGIEIELMGKFDEGKLPTDPHLMLGLAIETVAHDYDVIVIDSAPNLGIGTINVVCAADVLIVPTPAELFDYTSALQFFDMLRDLLKNVDIKGFEPDVRILLTKYSNSNGSQSPWMEEQIRDAWGSMVLKNVVRETDEVGKAVINHKKGKNSPRMVQSNDLTKAAYSLSRDQKRMLYLFVDQIRKSDGTLQEHDGICEIHVAKYAEIFGLTSAEASKDIRQALKSLAGKEVVFYRPEEDAGDEKGYESFPWFIKQSEELSQEISTLTRWGWQSFDEVGSGQPQGQDSLGPGTAKGQKRSMEKLSSTKLFPGAKKAEVAQLQEQVALKDAEIERLHSQLSRTTALHSESHTERDLLSCGEERGASANWNPYSDQKRADLCEGLTNCRNDMDLA

SEQ ID NO: 52042 - protein, 155 aa, Homo sapiens
  DOMAIN (8)..(86): ParB-like nuclease domain identified by PFam, accession name ParBc, E-value=3.2e-07, PFam score of 37.4
KGRGTYGNERDQELLTEDALDDLIPSFLLTGQQTPAFGRRVSGVIEIADGSRRRKAAALTESDYRVLVGELDDEQMAALSRLGNDYRPTSAYERGQRYASRLQNEFAGNISALADAENISRKIITRCINTRQLPKSVVGFFSHPGELSARSGDAL

SEQ ID NO: 52043 - protein, 1099 aa, Homo sapiens
  DOMAIN (581)..(618): Type I fibronectin domain proteins domain identified by eMATRIX, accession number BL01253E, p-value=7.194e-10, raw score of 16.01
  DOMAIN (553)..(613): Trypsin domain identified by PFam, accession name trypsin, E- value=3.3e-13, PFam score of 44.3
MAGALPPASLPPCSLISDCCASNQGDSVGLGSSEPGAGYNLVVHRFLSRSEKRSIRVGVTRFSRDFRFGPPINKIFACGANQRGRLAAILSGPAGEGQSAVARLTGKKKNHPGAQYATRLSPRVGRFINAAGTTGFPTGKRAVSATQLMSNTHRLKIFGNDPQLPRGGFVIGARRSNGSRKRHYFAGNERAQELLTEDALDDLILSFLLTGQQTPAFGRRVSGVIEIADGSRRRKAAALTESDYRVLVGELDDEQMAALSRLGNDYRPTSAYERGQRYASPLQNEFAGNISALADAENISRKIITRCINTAKLPKSVVALFSHPGELSARSDTSNRSIQLASGWCPPRMELPEEGAVFNLCSFAAFTSDTFRDFADFGPPITQDFRLLGQTSVDRLLQLSQGQAVKGNQLLPVSLVKRKTTLAPNTQTASPRALADSLMQLARQVSRLESGQDFADFGTTIKQDFRLLGQTSVDRLLQLSQGQAVKGNQLLPVSLVKRKTTLAPNTQTASPRALADSLMQLARQVSRLESGQNKDPTQWIATFGATITPPAVKRNVRKIILHENYHRETNENDTALVQLSTGVEFSNIVQRVCLPDSSIKLPPKTSVFVTGFGSIVDDASLPPCSLISDCCASNQGDSVGLGSSEPGAGYNLVVHRFLSRSEKRSIRVGGPDFLGDFCSQMGTNTQPYLGAILFINKGFARFGNPPSNRDFSLAGAKPAWTRLLHFSQGPGGEGQSAVARLTGEKKNHPGAQYANRLSPRVGRFINAAGTTGFLTGKRAVSATQLIITNTEKCLKELMKLKTKARELREECRSLRSRCDQLEERVSAMEDEMNEMKREGKFREKRIKRNEQSLQEIWDYVKRPNLRLIGVTESDGENGTKLENTLQDIIQENFPNLARQSNVQMSRIFRHSSVGGRFIKSHVIKLRLGNDYRPPRAYARGQRYATRLQNEFAANISALADAENISRKIITRCINPAKLPKSVVAFFSHPGELSARSGDALQKAFTDKEELLKQQASNLHEQKKAGVIFEAEEVITLLTSVLKTSSASRTSLSSPHQFAPGATVLYKGDKMVLNLDRSRVPTECIEKIEAILKELEKPAP

SEQ ID NO: 52044 - protein, 299 aa, Homo sapiens
  DOMAIN (13)..(56): 1 kw MIND INHIBITOR DIVISION CONTROL domain identified by eMATRIX, accession number DM01756B, p-value=6.810e-13, raw score of 22.91
  DOMAIN (1)..(92): ParA family ATPase domain identified by PFam, accession name ParA, E-value=4.5e-09, PFam score of 43.6
MLRLAIETVAHDYDVKHIDSAPNLGIGTINVVCAADVLIVPTPAELFDYTSALQFFDMLRDLLKNVDLKGFEPDVRILLTKYSNSNGSQSPWMEEQIRDAWGSMVLKIVVRERNEVGKGQIRMRTVFDQAIDQRSSTDTSLSTPAAPMVDSLIARVGVMARGNAITLPVCGRDVEFTLEVLRGDSVEKTSRELLTEDALDDLIPSFLLTGQQTPAFGRRVSGVIEIADGSRRRKAAALTESDYRVLVGELDDEQMAALSRLGFFYRPTSAYERGQRYASRLQNEFAGNISALADAENIS

SEQ ID NO: 52045 - protein, 659 aa, Homo sapiens
  DOMAIN (57)..(142): ParB-like nuclease domain identified by PFam, accession name ParBc, E-value=3.9e-09, PFam score of 43.8
MKAIRDAEKAGRPPHPDMEIRGRVEQRVGYTIEQINHMRDVFGTRLRRAEDVFPPVIGVAAHKGNERDQELLTEDALDDLILSFLLTGQQTPAFGRRVSGVIEIADGSRRRTAAALTESDYRVLVGELDDEQMAALSRLGNDYRPTSAYERGQRYASRLQNEFAGNISALADAENISRKIITRCINTAKLPKSVVALFSHPGELSARSGDALQKAFTDKEELLKQQASNLHEQKKAGVIFEAEEVITLLTSVLKTVQSKNLSHFTWICHAETAVINHKKRKNSPRIVQSNDLTEAAYSLSRDQKRMLYLFVDQIRKSDGTLQEHDGICEIHVAKYAEIFGLTSAEASKDIRQALKSFAGKEVVFYRPEEDAGDEKGYESFPWFIKHWVTISPQTSAYERGQRYASRCKNEFAGNISALADAENISRKIITRCINTAKLPKSVVALFSHPGELSARSGDALQKAFTDKEELLKQQASNLHEQKKAGVIFEAEEVITLLTSVLKTSSASRTSLSSRHQFAPGATVLYKGDKMVLNLDRSRVPTECKRKLRPFLRNLKSQGGPLESTGIPNLLLHPRGLRAITIAVFGKQNTYIRLEPFKINVLEQITKHIEKLQCGGVVKQLSRRGNNQHISSTYDINRADTQVRRAVNNYDIIVMSNGVF

SEQ ID NO: 52046 - protein, 643 aa, Homo sapiens
  DOMAIN (280)..(309): kw REPLICATION REPB REPA INITIATION domain identified by eMATRIX, accession number DM00653A, p-value=7.207e-27, raw score of 20.40
  DOMAIN (457)..(582): ParA family ATPase domain identified by PFam, accession name ParA, E-value=1.7e-22, PFam score of 88.2
MVDSLIARVGVMARGNAITLPVCGRDVKFTLEVLRGDSVEKTSRVWSAVSGVIEIADGSRRRKAAALTESDYRVLVGELDDEQMAALSRLGNDYRPTSAYERGQRYASRLQNEFAGNISALADAECDNLKTCHTSHGSVMAETAVINHKKRKNSPRIVQSNDLTEAAYSLSRDQKRMLYLFVDQIRKSDGTLQEHDGICEIHVAKYAEIFGLTSAEASKDIRQALKSFAGKEVVFYRPEEDAGDEKGYESFPWFIKLHPEGFTVYISTHISFPSLSGLQNRFTQFRLSETKEITNPYAMRLYESLCQYRKPDGSGIVSLKIDWIIERYQLPQSYQRMPDFRRRFLQGFCRFRNHHQTGFSPAGANQRGPLAATLSGPGGEGQSAVARLTGEKKNHPGAQYANRLSPRVGRFINAAGTTGFPTWKAGSERNAINDDVTYAIKPTCWPGLDIIPSCLALHRIETELMGKFDEGKLPTDPHLMLRLAIETVAHDYDVIVIDSAPNLGIGTINVVCAADVLIVPTPAELFDYTSALQFFDMLRDLLKNVDLKGNSNGSQSPWMEEQIRDAWGSMVLKNVVRETDEVGKGQIRMRTVFEQAIDQRSSTGAWRNALSIWEPECNEISIGVSLDQDGGSNSVLRKLVERE

SEQ ID NO: 52047 - protein, 191 aa, Homo sapiens
  misc_feature (1)...(191): Xaa = X or * as defined in Table 2
QHAIVTGDAVGMDDIPQEARQYRHNQAYAYSIQGDGAGMTMSALLDFIHGAXXXYIRCGSVGRLPSSNLPINSVSIRCRARSGEEXCQAPASKWALLHKXHRPFPQDRKAGECLLHEYEDLVPIRDTLFLFPGGRYLPRAKHVAPSEPDPEQDEQKLRFCKRHLYGQQPRSPVEIRLQHVAIAYQTHHAYD

SEQ ID NO: 52048 - protein, 92 aa, Homo sapiens
  misc_feature (1)...(92): Xaa = X or * as defined in Table 2
QHAIVTGDAVGMDDIPQEARQYRHNQAYAYSIQGDGAEDDDERIVRFHTRCLAXSRRAVNNYDIIVMSNSFNGQSEHQVWIGGQFTFIKFAH

SEQ ID NO: 52049 - protein, 260 aa, Homo sapiens
  DOMAIN (67)..(154): ParB-like nuclease domain identified by PFam, accession name ParBc, E-value=1.7e-10, PFam score of 48.3
MKRAPVIPKHTLNTQPVEDTSLSTPAAPMVDSLIARVGVMARGNAITLPVCGRDVKFTLEVLRGDSVEKTSRVWSGNERDQELLTEDALDDLIPSFLLTGQQTPAFGRRVSGVIEIADGSRRRKAAALTESDYRVLVGELDDEQMAALSRLGNDYRPTSAYERGQRYASRLQNEFAGNISALADADNISRKIITRCINTDKLPESVVALFSHSGELSARSVWDHGPTRIVGLIISLGPRSHSYRRSDNQTGTTVPLVSSV

SEQ ID NO: 52050 - protein, 350 aa, Homo sapiens; identical to SEQ ID NO: 34650
  DOMAIN (187)..(274): ParB-like nuclease domain identified by PFam, accession name ParBc, E-value=1.7e-10, PFam score of 48.3

SEQ ID NO: 52051 - protein, 244 aa, Homo sapiens
  DOMAIN (31)..(120): ParB-like nuclease domain identified by PFam, accession name ParBc, E-value=6.2e-10, PFam score of 46.4
PPAAPMGNLLMARVGVKARGKAHYLPLLRGESVRKTSRVGSGNERDQELLTEDALDDLIPSFLLTGQQTPAFGRRVSGVIEIADGSRRRKAAALTESDYRVLVGELDDEQMAALSRLGNDYRPTSAYERGQRYASRLQNEFAGNISALADAENISRQIITRCINTAKLPKSVVALFSHPGELSARSGDALQKAFTEKRTLKQQALTSEQKKRGIYEAEEVSSSLSPQGRLSNRSASKDMYSSFL

SEQ ID NO: 52052 - protein, 295 aa, Homo sapiens
  DOMAIN (38)..(126): ParB-like nuclease domain identified by PFam, accession name ParBc, E-value=3.1e-06, PFam score of 34.2
MNMNIKKIVKQATVLTFTTALLAGGATQAFAKENNQKAYKETKAVGSGNERDQELLTEEAWNDLILSFLLTGQQTPAFGRRVSGVIEIPDGSRRRKAAALPKSDYRVLVGELDDEQMAALSRLGNDYRPTSAYERGQRYASRLQNEFAGNISALADAENISRKIITRCINTAKLPKSVVALFSHPGELSARSGDALQKAFTDKEELLKQQASNLHEQKKAGVIFEAEEVITLLTSVLKTSSASRTSLSSRHQFAPGATVLYKGDKMVLNLDRSRVPTECIEKIEAILKELEKPAP

SEQ ID NO: 52053 - protein, 192 aa, Homo sapiens
  DOMAIN (2)..(22): DNAJ PROTEIN FAMILY SIGNATURE domain identified by eMATRIX, accession number PR00625C, p-value=8.554e-09, raw score of 16.54
RWRLQNLSFCSSCSGSGSEGATCFARGSAYELGQRYASRLQNAFAGKISALADAEIFSRKIITRCINTAKLLKSVVALFSHPVELSARSGDALQKAFTDKEELLKQQASNLHEQKKAGVIFEAEEVITLFTSVLKTSSASRTSLSSRHQFAPGATVLYKGDKMVLNLDRSRVPTECIEKIEAILKELEKPAP

SEQ ID NO: 52054 - protein, 663 aa, Homo sapiens; identical to SEQ ID NO: 37494
  DOMAIN (105)..(132): Mrp family proteins domain identified by eMATRIX, accession number BL01215A, p-value=4.964e-11, raw score of 9.75

SEQ ID NO: 52055 - protein, 101 aa, Homo sapiens
PVHKRWSVNEEGYPHWHSLMIAAPERGKNNPALGNRVNHRYNLGFFSRLPKIRKTRPDSGTGYGKSKAGLSNVLVIQLNKLIICVMCLVRDCDVLKTYFHR

SEQ ID NO: 52056 - protein, 281 aa, Homo sapiens
  DOMAIN (6)..(232): ParB-like nuclease domain identified by PFam, accession name ParBc, E-value=1.1e-20, PFam score of 82.2
PGGDSVKNTSRVWSGNERDQKLLTENALNDLIPSFLLTGQQTPALGRRVSGVIEIADGSRRRKAAALTESDYRVLVGELYDEQMPPLSRLGNDYRPTSAHPQKRRYASRLQNEFAGNISALADAENISRVRDVNLLLEVLGVDSVEKTFRVWSGNERDQELLMEDALDDLIPSFLLTGQQTPAFGRRVSGVIEIADGSRRRKAAALTESDYRVLVGELDDEQMAALSRLGNDYRPTSAYERGQRYASRLQNEFAGNISALADAENISRKIIPRCINSAKLP

SEQ ID NO: 52057 - protein, 323 aa, Homo sapiens
  DOMAIN (59)..(88): kw REPLICATION REPB REPA INITIATION domain identified by eMATRIX, accession number DM00653A, p-value=7.207e-27, raw score of 20.40
  DOMAIN (65)..(154): ParB-like nuclease domain identified by PFam, accession name ParBc, E-value=0.033, PFam score of 7.3
MGLTLNLEPPPAGTWAPRRGHQVALAPSLADPGWCSRPFKHKLGGLIFNQLLSNAQTPNRFTQFRLSETKEITNPYAMRLYESLCQYRKPDGSGIVSLKIDWIIERYQLPQSYQQIADGSRRRKAAALTESDYRVLVGELDDEQMAALSRLGNDYRPTSAYERGQRYAIRLQNEFAGNISALADAENISRKIITRCINTAKLPKSVVALFSHPGELSARSGDALQKAFTDKEELLKQQASNLHEQKKAGVIFEAEEVITLLTSVLKTSSASRTSLSSRHQFAPGATVLYKGDKMVLNLDRSRVPTECIEKIEAILKELEKPAP

SEQ ID NO: 52058 - protein, 538 aa, Homo sapiens
  DOMAIN (216)..(369): ParB-like nuclease domain identified by PFam, accession name ParBc, E-value=0.0015, PFam score of 20.7
MQRQLTGSLRICTDFLSGALKLTKHQFSVSTTRPSGRGDRAESGAVSCTQKGSAFRGKGSCPRRRDVFLMSAERGRCGKSYPQMREGRGREKGNRVLLAFRGRGSGNSEIIRVVSKEEPPVPAGSHTPLPAVWHPAPLQHKISKDGPQAQHPGKEPPQGKATTKSCYYGKAQQSHGGRTAWRLRDPTNGQQNCRDGASTLVCPEGGTAAPGGSSSTFDPIEDVLRGDRGRDKVKSLFKGIIPENFPNLEKDINIQVQEGYRTPRRFNPKTTSSHLIIKLLKVKDKERILKAAREKKQITCKGTPIYLVADFSVETLQTPASGRRVSGVIEIADGSRRRKAAALTESDYRVLVGELDDEQMAALSRLGNDYRPTSAYERGQRYASRLQNEFAGNISALADAENISRKIITRCINTAKLPKSVVALFSHPGELSARSGDALQKAFTDKEELLKQQASNLHEQKKAGVIFEAEEVITLLTSVLKTSSASRTSLSSRHQFAPGATVLYKGDKMVLNLDRSRVPTECIEKIEAILKELEKPAP

SEQ ID NO: 52059 - protein, 275 aa, Homo sapiens
  DOMAIN (76)..(163): ParB-like nuclease domain identified by PFam, accession name ParBc, E-value=3e-08, PFam score of 40.9
  misc_feature (1)...(275): Xaa = X or * as defined in Table 2
MDDIPQEARQYRHNQAYAYSIQGDGAEDDDERIVRFHTRVTVDSDTLASDAARLTCRHGLARDVKFTLEVLRGDSVEKTSRVWSGNERDQELLTEDALDDLIPFFLLTGQQTPAFGRRVSGVIEIADGSRRRKAAALTESDYRVLVGELDDEQMAALSRLGNDYRPTSAYERGQRYASRLQNEFAGNISALADAENISRKIITRCINTAQLAKSGVALFSHPGELSAPSGDALXKAFTDXEEFLXPQGSNLYEQKKAGVIFGSXKKFSLFLTSVV

SEQ ID NO: 52060 - protein, 220 aa, Homo sapiens
TLRQTKPDNSAEIADGSRRRKAAALTESDYRVLVGELDDKQMAALSRLGNDYRPTSAYERGQRYASRLQNEFAGNISALADAENISRKIITRCINTAKLPKSVVALFSHPGELSARSGDALQKAFTDKEELLKQQASNLHEQKKAGVIFEAEEVITLLTSVLKTSSASRTSLSSRHQFAPGATVLYKGDKMVLNLDRSRVPTECIEKIEAILKELEKPAP

SEQ ID NO: 52061 - protein, 603 aa, Homo sapiens
  DOMAIN (141)..(228): ParB-like nuclease domain identified by PFam, accession name ParBc, E-value=1.9e-05, PFam score of 31.5
MRVQALGKYRHSKWEKLAKTKRLQAQCKSPPQWGSQILKLQNDLLAYIQVTLMQEWTLVPKREQHSTYSRAILLIYKGFCRFRNHHQTGFSPAGANQRGPLAATLSGPGGEGQSAVARLTGEKKNHPGAQYANRLSPRVGRFINAAGTTGNERDQELLTKNAWDDLIPSFLLTGQQTPAFGRRVSGVIEIADGSRRRKAAALTESDYRLLVGELDDEQMAALSRLGNDYRPTSAYERGQRYASRLQNEFAGNISALADAENISRKIITRCINTAKLPKSVVALFSHPGELSARSGDALQKAFTDKEELLKQQASNLHEQKKAGVIFEAEEVITLLTSVLKTSSASRTSLSSRHQFAPGATVLYKGDKMVLNLDRSRVPTEYQTQEWSGSATLPSDGKIRLFYTDYSGKHYGKQSLTTAQVNVSKSDDTLKINGVEDHKTIFDGDGKTYQNVQQFIDEGNYTSGDNHTLRDPHYVEDKGHKYLVFEANTGTENGYQGEESLFNKAYYGGGTNFFRKESQKLQQSATPRDAELANGAIRIFTVGNFPVWGEKKCVHKFVKIFFGQIKVEDELRRFGDLAGCAHTQGSTDMPAPCCLSPLQTLGAD

SEQ ID NO: 52062 - protein, 336 aa, Homo sapiens
  DOMAIN (270)..(303): ESICULAR LUMEN DOMAIN domain identified by eMATRIX, accession number DM01292C, p-value=1.000e-09, raw score of 12.45
  DOMAIN (17)..(99): ParB-like nuclease domain identified by PFam, accession name ParBc, E-value=0.073, PFam score of 3.8
SLYKLNAYRMCNKYSLKSWVITLLKSWVSHPNYSPICEVPVKLFYAKTPAFGRRVSGVIEIADGSRRRKAAALTESDYRVLVGELDDEQMAALSRLGNDYRPTSAYERGQRYASRLQNEFAGNISALADAENISRKIITRCINTAKLPKSVVALFSHPGELSARSGDALQKAFTDKEELLKQQASNLHEQKKAGVIFEAQQVITLLTSVLKTSSASRTSLSSRHQFAPGATVLYKGDKMVLTLDRSRVPTECIEKIEAILKELEKPAPGIASQYGVLLALYALMQFLCAPVLGALSGRFGRRPVLLASLLGATIDYAIMATTPVLWIYPLVNSPSC

SEQ ID NO: 52063 - protein, 631 aa, Homo sapiens
  DOMAIN (239)..(282): 1 kw MIND INHIBITOR DIVISION CONTROL domain identified by eMATRIX, accession number DM01756B, p-value=4.822e-15, raw score of 22.91
  DOMAIN (204)..(318): ParA family ATPase domain identified by PFam, accession name ParA, E-value=2.7e-28, PFam score of 107.5
RMFRMKLMETLNQCINAGHEMTKAIAIAQFNDDSPEARKITRRWRIGEAADLVGVSSQAIRDAEKAGRLPHPDMEIRGRVEQGVGYTIEQINHMRDVFGTRLRRAEDVFPPVIGVAAHKGGVYKTSVSVHLAQDLALKGLRVLLVEGNDPQGTASMYHGWVPDLHIHAEDTLLPFYLGEKDDVTYAIKPTCWPGLDIIPSCLALHRIETELMGKFDEGKLPTDPHLMLRLAIETVAHDYDVIVIDSAPNLGIGTINVVCAADVLIVPTPAELFDYTSALQFFDMLRDLLKNVDLKGFEPDVRILLTKYSNSNGSQSPWMEEQIRDAWGSMVLKNVVRETDEVGKGQIRMRTVFEQAIDQRSSTAAPMVDSLIARVGVMARGNAITLPVCGRDVKFTLEVLRGDSVEKTSRTPAFGRRVSGVIDIADGSRRRKAAALTESDYRVLVGELDDEHMPALSPLGNDYRPTSAYERGQRYATRLQNEFAGNISALADAENISRKIITRCINTAKLPKSVVALFSHPGELSARSGDALQKAFTDKEELLKQQASNLHEQKKAGVIFEAEEVITLLTSVLKTSSASIYSLSSRQQFAHGAPVLYKGDKMVLNLDRSRVPTECIEKIEAILKELEKPAP

SEQ ID NO: 52064 - protein, 432 aa, Homo sapiens; identical to SEQ ID NO: 43729
  DOMAIN (81)..(95): Phage integrase family domain identified by eMATRIX, accession number PF00589B, p-value=1.621e-11, raw score of 16.17
  DOMAIN (6)..(127): "Phage" integrase family domain identified by PFam, accession name Phage_integrase, E-value=2e-06, PFam score of 24.4

SEQ ID NO: 52065 - protein, 347 aa, Homo sapiens
  DOMAIN (38)..(125): ParB-like nuclease domain identified by PFam, accession name ParBc, E-value=0.0011, PFam score of 22.1
MDDIPQEARQYRHNQAYAYSIQGDGAEDDDERIVRFHTRVTVDSDTLASDAARLTCRHGLGNQRPPFLLTGQQTPAFGRRVSGVIEIADGSRRRKAAALTESDYRVLVGELDDEQMAALSRLGNDYRPTSAYERGQRYASRLQNEFAGNISALADAENISRKIITRCINTAKLPKSVVALFSHPGELSARSGDALQKAFTDKEELLKQQASNLHEQKKAGVIFEAEEVITLLTSVLKTSSASRTSLSSRHQFAPGATVLYKGDKMVLNLDRSRVPTECIEEIEAILKNLKSPHLDPHYQDVIDSRDVIARIEELQGYRARIRNHGHSCFLCEIVIRSQFHTTYEPEA

SEQ ID NO: 52066 - protein, 145 aa, Homo sapiens
  misc_feature (1)...(145): Xaa = X or * as defined in Table 2
IRLEPFKINVLEQITKHIEKLQCGGVVKQLSRRGNNQHISSTYDINRADTQVRRAVNNYDIIVMSNSFNASRSIRCGSVGSLPSSNLPINSVSIRCRARSGEEXCQAPASKWALLHKXHRPFPQDRKAGECLLHEYEDLYPSVIH

SEQ ID NO: 52067 - protein, 801 aa, Homo sapiens
  DOMAIN (52)..(95): 1 kw MIND INHIBITOR DIVISION CONTROL domain identified by eMATRIX, accession number DM01756B, p-value=4.822e-15, raw score of 22.91
  DOMAIN (13)..(131): ParA family ATPase domain identified by PFam, accession name ParA, E-value=8.7e-17, PFam score of 69.2
MRLGFESRGEIAKDQAKLDLAGQKERDNQSSTLGEAETPLIICWSTLEDPHYDVIVIDSAPNLGIGTINVVCAADVLIVPTPAELFDYTSALQFFDMLRDLLKNVDLKGFEPDVRILLTKYSNSNGSQSPWMEEQIRDAWGSMVLKNVVRETDEVGKGQIRMRTVFEQAIDQRSSTDTSLSTPAAPMVDSLIARVGVMARGNAITLPVCGRDVKFTLEVLRGDSVEKTSRVWSGNERDQELLTEDALDDLIPSFLLTGQQTPAFGRRVSLYPLAGGATQAFAKENNQKAYKETYGVSHITRHDMLQIPKQQQNEKYQVPQFDQSTIKNIESAKGLDVWDSWPLQNADGTVAEYNGYHVVFALAGSPKDADDTSIYMFYQKVGDNSIDSWKNAGRVFKDSDKFDANDPILKDQTQEWSGSATFTSDGKIRLFYTDYSGKHYGKQSLTTAQVNVSKSDDTLKINGVEDHKTIFDGDGKTYQNVQQFIDEGNYTSGDNHTLRDPHYVEDKGHKYLVFEANTGTENGYQGEESLFNKAYYGGGTNFFRKESQKLQQSAKKRDAELGVYALAVSSVRGTELELGLTPAFGRRVSGVIEIADGSRRRKAAALTESDYRVLVGELDDEQMAALSRLGNDYRPTSAYERGQRYASRLQNEFAGNISALADAENISRKIITRCINTAKLPKSVVALFSHPGELSARSGDALQKAFTDKEELLKQQASNLHEQKKAGVIFEAEEVITLLTSVLKTSSASRTSLSSRHQFAPGATVLYKGDKMVLNLDRSRVPTECIEKIEAILKELEKPAP

SEQ ID NO: 52068 - protein, 571 aa, Homo sapiens
  DOMAIN (316)..(403): ParB-like nuclease domain identified by PFam, accession name ParBc, E-value=1.7e-10, PFam score of 48.3
LPHPDMEIRGRVEQRVGYTIEQINHMRDVFGTRLRRAEDVFTPVIGVAAIKTGTTVHIVSSSSLLGGDHGPSRIGGLLLVCDYGPLVSSSGISGPTRIVGLIISLGPGYHLCFRSDYRTGITDPLYIGDATIRVSLRVYSLPSRSRIEHVVANCGMIPKQQQNEKYQVPQFDQSTIKNIESAKGLDVWDSWPLQNADGTVAEYNGYHVVFALAGSPKDADDTSIYMFYQKVGDNSIDSWKNAGRVFKDSDKFDANDPILKDQTQEWSGSATFTSDGKIRLFYTDYSGVMARGNAITLPVCGRDVKYTLEVLRGDSVEKTSRVWSGNERDQELLTEDALDDLIPSFLLTGQQTPAFGRRVSGVIEIADGSRRRKAAALTESDYRVLVGELDDEQMAALSRLGNDYRPTSAYERGQRYASRLQNEFAGNISALADAENISRKIITRCINTAKLPKSVVALFSHPGELSARSGDALQKAFTDKEELLMQQASNLHEQKKAGVIFEAEEVITLLTSVAKTSSASRTSLSSRHQFAPGATVLYKGDKMVLNLDMSRVQLECLDRLHACRSTLEDPP

SEQ ID NO: 52069 - protein, 256 aa, Homo sapiens
  DOMAIN (64)..(151): ParB-like nuclease domain identified by PFam, accession name ParBc, E-value=5.7e-10, PFam score of 46.6
AGPVIQNYVNTQPVEETSYSTPAAPMVDSLIARVGVMAPGNAITLPVCGRDVKFTLEVLRGDSVKKTSRVWSGNERDQELLTEDALDDLIPSFLLTGQQTPAFGRRVSGVIEIADGSRRRKAAALTESDYRVLVGELDDEQMAALSRLGNDYRPTSAYERGQRYASRLQNEFAGNISALADAENISRKIITRCINTAKLPKSVVALFSHPGELSARSGDALQKAFTDKEELLKQQGGSSRVGDNSIDSWKTRGRVL

SEQ ID NO: 52070 - protein, 1204 aa, Homo sapiens
  DOMAIN (850)..(879): kw REPLICATION REPB REPA INITIATION domain identified by eMATRIX, accession number DM00653A, p-value=7.207e-27, raw score of 20.40
  DOMAIN (178)..(277): ParA family ATPase domain identified by PFam, accession name ParA, E-value=7.3e-21, PFam score of 82.7
MKLMETLNQCINAGHEMTKAIAIAQFNDDSPEARKITRRWRIGEAADLVGVSSQAIRDAEKAGRLPHPDMEIRGRVEQRVGYTIEQINHMRDVFGTRLRRAEDVFPPDLALKGLRVLLVEGNDPQGTASMYHGWVPDLHIHAEDTLLPFYLGEKDDVTYAIKPTCWPGLDIIPSCLALHRIETELMGKFDEGKLPTDPHLMLRLAIETVAHDYDVIVIDSAPNLGIGTINVVCAADVLIVPTPAELFDYTSALQFFDMLRDLLKNGNYTSGDNHTLRDPHYVEDKGHKYLVFEANTGTENGYQGEESLFNKAYYGGGTNFFRKESQKLQQSAKKRDAELANGALGIIELNNDYTLKKVMKPLITSNTVTDEIERANVFKMNGKWYLFTDSRGSKMTIDVPQAKGILCEEDNYTAGDNHMMRAPHCEEDRAHKFVVFDANAGTESGHQGESSLFNRACGGGGTFFFSKESQKLQQSAKKRDCINAGHEMTKAIAIAQFNDDSPEARKITRRWRIGEAADLVGVSSQAIRDAEKAGRLPHPDMEIRGRVEQRVGYTIEQINHMRDVFGTRLKRAEDVFPPVIGVAAHKGGVYKTSVSVHLAQDLALKGSLLLPKNDFLFKLGLEGHLPLGKIHSPPTGADVARGSSGLPKSELFLPERNTQELQQDSEEGPLALQVLQSNLMDFADFGTTIKQDFRLLGQTSVDRLLQLSQGQAVKGNQLLPVSLVKRKTTLAPNTQTASPRALADSLMQLARQVSRLESGQNNDGICEIHVAKYVEIFGLTSAEASKDIRQALKSFAGKLVVFYRPEEDAGDEKGYESFPWFIKRAHSPSRGLYSVHINPYLIPFFIGLQNRFTQFRLSETKEITNPYAMRLYESLCQYRKPDGSGIVSLKIDWIIERYQLPQSYQRMPDFRRRFLQVCVNEINSRTPMRLSYIEKKKGRQTTHISRKFTLKWSGGDSVEKTSRVWSGNERAQELLTEDALNDLIPSFLLTGQQTPAFGRRVSGVIEIADGSRRRKAAALTESDYRVLVGELDDEQMAALSRLGNDYRPTSAYERGQRYASRLQNEFAGHISALADAENISRKIITRCINTAKLPKSVVALFSHPGELSARSGDALQKAFTDKEELLKQQASNLHEQKKAGVIFQAEEVITLLTSVLKTSSASRTSLSSRHQFAPGATVLYKGDKMVLNLDSSRVQLSYRENEAK

SEQ ID NO: 52071 - protein, 494 aa, Homo sapiens
  DOMAIN (105)..(132): Mrp family proteins domain identified by eMATRIX, accession number BL01215A, p-value=4.964e-11, raw score of 9.75
  DOMAIN (273)..(405): ParB-like nuclease domain identified by PFam, accession name ParBc, E-value=0.00043, PFam score of 26.0
MKLMETLNQCINAGHEMTKAIAIAQFNDDSPEARKITRRWRIGEAADLVGVSSQAIRDAEKAGRLPHPDMEIRGRVEQRVGYTIEQINHMRDVFGTRLRRAEDVFPPVIGVAAHKGGVYKTSVSVHLAQDLALKGLRVLLVEALHQGFSKSFFLPAYGRTTLDVLQSTEFSPSGSETGSPCEKWGLVPGSGEGAYTGPWAAGVWAVGRGLGLPAVLCLQPLCRSEIPDIQPAKLELREYVRRSTGHHSDALPELLPAKYSNGYELKEALHYIHEPPIDANMVQLNQGSHPAQQRLIFEELVAHQISLLTRRAYIRQIAAPRFSSSKVLAKRLLDALPFQMTNAQKRVSKEILRTPAFGRRVSGVIEIADGSRRRKAAALTESDYRVLVGELDDEQMAALSRLGNDYRPTSAYERGQRYASRLQNEFAGNISALADAENISRKIITRCINTAKLPKSVVALFSHPGELSARSGDALQKAFTDKEELLKQGAFYPY

SEQ ID NO: 52072 - protein, 355 aa, Homo sapiens
  DOMAIN (59)..(146): ParB-like nuclease domain identified by PFam, accession name ParBc, E-value=1.7e-10, PFam score of 48.3
KHTLNTQPVEDTSLSTPAAPMVDSLIARVGVMARGNAITLPVCGRDVKFTLEVLRGDSVEKTSRVWSGNERDQELLTEDALDDLIPSFLLTGQQTPAFGRRVSGVIEIADGSRRRKAAALTESDYRVLVGELDDEQMAALSRLGNDYRPTSAYERGQRYASRLQNEFAGNISALADAENISRKIITRCINTAKLPKSVVALFSHPGELSARSGDALQKAFTDKEELLKQQASNLHEQKKAGVIFEAEEGPRSGDALQKAFTDKEELFKQQASNLHEQKKAGVIFEAEEVITLLTSVLKTSSASRTSLSSRHQFAPGATVLYKGDKMVLTLDSSRVPTECIEKIEAILKELEKPAP

SEQ ID NO: 52073 - protein, 872 aa, Homo sapiens
  DOMAIN (350)..(393): 1 kw MIND INHIBITOR DIVISION CONTROL domain identified by eMATRIX, accession number DM01756B, p-value=9.289e-14, raw score of 22.91
  DOMAIN (315)..(429): ParA family ATPase domain identified by PFam, accession name ParA, E-value=2.2e-27, PFam score of 104.4
MKRAPVIQKHTLNTQPVEDTSLSTPAAPMVDSLIARVGVMARGNAITLPVCGRDVKFTLEVLRGDSVEKTSRVWSGNERDQELLTEDALDDLIPSFLLTGQQTPAFGRRVSGVIEIADGSRRRKAAALTESDYRVLVGELDDEQMAALSRLGNDYRPTSAYERGQRYASRLQNEFAGNISALADAENISRKIITRCINTAKLPKSVVALFSHPRQAPCMKSNNALIVILGTVTLDAVGIGLVMPDLALKGLRVLLVEGNDPQGTASMYHGWVPDLHIHAEDTLLPFYLGEKDDVTYAIKPTCWPGLDIIPSCLALHRIETELMGKFDEGKLPTDPHLMLRLAIETVAHDYDVIVIDSAPNLGIGTINVVCAAHALIVPTPAELFDYTSALQFFDMLRDLLKNVDLKGFEPDVRILLTKYSNSNGSQSPWMEEQIRDACRSMVVKNVERETDKVGKDTLKGFYSLKERPLGNHFLGPNNRPFGKIMKHKTPAFGRRVSGVIEIADGSRRRKAAALTESDYRVLVGELDDEQMAALSRLGNDYRPTSAYERGQRYASRLQNEFAGNISALADAENISRKIITRCINTAKLPKSVVALFSHPGELSARSGDALQKAFTDKEELLKQQASNLHEQKKAGGFCRFRNHHQTGFSPAGANQRGPLAATLSGPGGEGQSAVARLTGEKKNHPGAQYANRLSPRVGRFINAAGTTGNSYDHDYEFELGTLPQEARQYRHNQAYAYSIQGDGAEDDDERIVRFHTRVTVDSDTLASDAARLTCRHGLGNQVFCPHNRAQNVVDKQDTAAIHSRHTTAHRGYSGLQCLSDAGMVLRIGQACVKTLQTAILRAVGLPCTAKVVFPGPYVHNCMGSRARLVSSG

SEQ ID NO: 52074 - protein, 631 aa, Homo sapiens
  DOMAIN (173)..(283): ParA family ATPase domain identified by PFam, accession name ParA, E-value=1.5e-08, PFam score of 41.9
SVTSCLKVTSVCLTSAAASCRSVLMRSTAELQCASHTLRKRKAARRLISLMMTARKARKITRRWRIGEAADLVGVSSQAIRDAEKAGRLPHPDMEIRGRVEQRVGYTIEQINHMRDVFGTRLRRAEDVFPPVIGVAAHKGNDPQGTASMYHGWVPDLHIHAEDTLLPFYLGEKDDVTYAIKPTCWPGLDIIPSCLALHRIETELMGKFDEAQPNLGIGTINVVCAADVLIVPTPAELFDYTSALQFFDMLRDLLKNVDLKGFEPDVRILLTKYSNSNGSQSPWMEEQIRDAWGSMVLKNVVRETDEVGKGQIRMRTVFEQAIDQRSSTDTSLSTPAAPMVDSLIARVGVMARGNAITLPVCGRDVKFTLEVLRGDSVEKTSRVWSGNERDQELLTEDALDDLIPSFLLTGQQTPAFGRRVSGVIEIADGSRRRKAAALPESNYGVLVAELDDEQMPAYPRLGNDYRPTSAYERGQRYATRLQNEFAGNISALADAENISIITRCINTAKLPKSVVALFSHPGELSARSGDALQKAFTDKEELLKQQASNLHEQKKAGVIFEAEEVITLLTSVLKTSSASRTSLSSRHQFAPGATVLYKGDKMVLNLDRSRVPTECIEKIEAILKELEKPAP

SEQ ID NO: 52075 - protein, 529 aa, Homo sapiens
  DOMAIN (122)..(209): ParB-like nuclease domain identified by PFam, accession name ParBc, E-value=1.7e-10, PFam score of 48.3
LFPRLLSCLTTPPHCSFSICFVICSRTLILKGSSLMYVFCLPNTAIVMALSPRGWRSKFGMPGEAWLIKNVVRETNEVGKAAPMVDSLIARVGVMARGNAITLPVCGRDVKFTLEVLRGDSVEKTSRVWSGNERDQELLTEDALDDLIPSFLLTGQQTPAFGRRVSGVIEIADGSRRRKAAALTESDYRVLVGELDDEQMAALSRLGNDYRPTSAYERGQRYASRLQNEFAGNISALADAENISRKIITRCINTAKLPKSVVALFSHPGELSARSGDALQKAFTDKEELLKQQASNLHEQKKAGVIFEAEEVITLLTSVLKTSSASRTSLSSRHQFAPGATVLYKGDKMVLNLDRPKVDKTTKMGKKQRRKTGNSKKQSASPPPNECSSSPATEQSWMENDFDELREEGFRRSNYSELWEDIQNKGKQVENFGKNLEECITRITNTEKCLKELLELKTKARELHEECRSLRSRCDQLIERVSVMEDPLNEMKQDGKFREKRIKRNEQSLQEIWDYVKRPNLRLIGVPES

SEQ ID NO: 52076 - protein, 494 aa, Homo sapiens
  DOMAIN (28)..(71): 1 kw MIND INHIBITOR DIVISION CONTROL domain identified by eMATRIX, accession number DM01756B, p-value=4.822e-15, raw score of 22.91
  DOMAIN (4)..(107): ParA family ATPase domain identified by PFam, accession name ParA, E-value=1.1e-19, PFam score of 78.9
WANCQEGTLPTDPHLMLRLAIETVAHDYDVIVIDSAPNLGIGTINVVCAADVLIVPTPAELFDYTSALQFFDMLRDLLKTVDLKGFEPDVRILLTKYSNSNGSQSPWMEEQIRDAWGSMVLKNVVRETDEVGKGQIRMRTVFEQAIDQRSSTDTSLSTPAAPMVDLLIARVGVMARGKAILLPVCGREVKFTLKVLRGDSVEKTSRVWSGNERDQELLTEDALDDLIPSFLLTGQQTPAFGRRVSGVIEIADGSRRRKAAALTESDYRVLVGELDDEQMAALSRLGNDYRPTSAYERGQRYASRLQNEFAGNISALADAENISRKIITRCINTAKLPKSVVALFSHPGELSARSGDALQKAFTDKEELLKQQAVECSLDQGRIVFPEGKGTTFSLPNPPMMGHQVDSHAFAFVTSTAMNKHMLLSGSEFRAYTGPLTPKKNLIWVNGSRSGPIALKSGFFAPLTVEVPRSLKSEFLVPNWEQHLTPISGYSFDL

SEQ ID NO: 52077 - protein, 827 aa, Homo sapiens
  DOMAIN (67)..(518): ParB-like nuclease domain identified by PFam, accession name ParBc, E-value=4.9e-25, PFam score of 96.6
MKRAPVIPKHTLNTQPVEDTSLSTPAAPMVDSLIARVGVMARGNAITLPVCGRDVKFTLEVLRGDSVEKTSRVWSGNERDQELLTEDALDDLIPSFLLTGQQTPAFGRRVSGVIEIADGSRRRKAAALTESDYRVLVGELDDEQMAALSRLGNDYRPTSAYERGQRYASRLQNEFAGNISALADAENISRKIIIRWINTAKLAKSVVALFSHPGKYLPGQEACMPAGIWCKLLVDLPFWGLEHSGSSLTASLGSGPSGTLCEGSNPTFAFCTALVEVFHKGSIPAVDFCLDIQVDSRGSPFDMLRDLLKNVDLKGFEPDVRILLTKYSNSNGSQSPWMEEQIRDAWGSMVLKNVVRETDEVGKGQIRMRTVFEQAIDQRSSTDTSLSTPAAPMVDSLIARVGVMARGNAITLPVCGRDVKFTLEVLRGDSVEKTSRVWSGNERDQELLTEDALDDLIPSFLLTGQQTPAFGRRVSGVIEIADGSRRRKAAALTESDYRVLVGELDDEQMAALSRLGNDYRPTSAYERGQRYASRLQNEFAGNISALADAENISRKIITRCINTAKLPKSVVALFSHPGELSARSGDALQKAFTDKEELVKQQASNLQSRKKYSKMARPLYTVFKETQRATTHLVESHTSGRNSLQNNKAGPSTSASLKLSHRTKLLLFVIERAGVALALLTQTCGTTPEPVAYLNYYPLYQHRQNALNQLCFFFLTPGELSARSGDALQKAFTDKEELLKQQASNLHEQKKAGVIFEAEEVITLLTSVLKTSSASRTSLSSRHQFAPGATVLYKGDKMVLNLDRSRVPTECIEKIEAILKELEKPAP

SEQ ID NO: 52078 - protein, 502 aa, Homo sapiens
  DOMAIN (144)..(233): ParB-like nuclease domain identified by PFam, accession name ParBc, E-value=4.4e-06, PFam score of 33.6
LLTAPITGGIGTINVVCADDVMIVPTPAELFDYTSALQFFDMLRDLLKNVDLKGFEPDVRILLTKYSNSNGSQSPWMEEQIRDAWGSMVLKNVVRETDEVGKAAPMVDSLIARVGVMARGNAITLPVCGRDVKFTLEVLRGDSVEKTSRVWSGNERDQELLTEDALDDLIPSFLLTGQQTPAFGQRVSGVKEIADGIRRRKAAALTESDYRVLVGELDDEQMAALSRLGNDYRPTSAYERGQRYASRLQNEFAGNISALADAENISRKIITRCINTAKLPKSVVALFSHPGELSARSGDALQKAFTDKEDLLKQQASNLHGAEKSWGCYFEAEEVITLLTSVLKTSSASRTSLSSRHQFAPGATVLYKGDKMVLNLDRSRVPTEYRYGVFLNVLLPATKYFQLHDPSLRNMELNYSLASEDLVLKGLRVLLVEGNDPQGTASMYHGWVPDLHIHAEDTLLPFYLGEKDDVTYAIKPTCWPGLDIIPSCLALHRIETEYNGQI

SEQ ID NO: 52079 - protein, 428 aa, Homo sapiens
  DOMAIN (360)..(393): ESICULAR LUMEN DOMAIN domain identified by eMATRIX, accession number DM01292C, p-value=4.672e-09, raw score of 12.45
  DOMAIN (63)..(150): ParB-like nuclease domain identified by PFam, accession name ParBc, E-value=1.7e-10, PFam score of 48.3
  misc_feature (1)...(428): Xaa = X or * as defined in Table 2
EPVFEQAIDQRSSTDTSLSTPAAPMVDSLIARVGVMARGNAITLPVCGRDVKFTLEVLRGDSVEKTSRVWSGNERDQELLTEDALDDLIPSFLLTGQQTPAFGRRVSGVIEIADGSRRRKAAALTESDYRVLVGELDDEQMAALSRLGNDYRPTSAYERGQRYASRLQNEFAGNISALADAENISQXICWKYFCAGXCGKYFRKIITRCINTAKLPKSVVALFSHPGELSARSGDALQKAFTDKEELLKQQASNLHEQKKAGVISPPEEVITLLTSEIKTSSASRTSLSSRHQFAPGATVLYKGDKMFITVKIAKRSQAPCMKSNNALIVILGTVTLDAVGIGLVMPVLPGLLRDIVHSDSIASHYGVLLALYALMQFLCAPVLGALSDRFGRRPVLLASLLGATIDYAIMATTPVLWIYPLVNSPSC

SEQ ID NO: 52080 - protein, 101 aa, Homo sapiens
  DOMAIN (32)..(45): NONHISTONE CHROMOSOMAL PROTEIN HMG17 FAMILY SIGNATURE domain identified by eMATRIX, accession number PR00925B, p-value=3.089e- 10, raw score of 3.73
MGKGRSPASPAKADGSHCDPKTAPKAKEAPAPPKAEAKAKALKAKKAVLKGVRSHTQKRRSACHSPSGGPRHCDSGGSPDILGRAPPGETSVATMLSSKFR

SEQ ID NO: 52081 - protein, 44 aa, Homo sapiens
  misc_feature (1)...(44): Xaa = X or * as defined in Table 2
SLPSGIKPQSSSKASSRIQVAPTMXSLPRQPLAWPSGHEACPQG

SEQ ID NO: 52082 - protein, 72 aa, Homo sapiens
  DOMAIN (44)..(70): Ribosomal protein L23 domain identified by PFam, accession name Ribosomal_L23, E-value=0.00036, PFam score of 18.5
  misc_feature (1)...(72): Xaa = X or * as defined in Table 2
LIAGAFRKASGGNNIFRRPKTLXLRRQPRXPQKSTPRRNKLGHYAIIKFPLTTESAVKKIEETNTLVFTVLV

SEQ ID NO: 52083 - protein, 310 aa, Homo sapiens
  DOMAIN (131)..(164): Ribosomal protein L23 proteins domain identified by eMATRIX, accession number BL00050A, p-value=2.761e-17, raw score of 23.71
  DOMAIN (111)..(155): Ribosomal protein L23 domain identified by PFam, accession name Ribosomal_L23, E-value=9.9e-14, PFam score of 50.6
CTPEKCLPAVHRRNWLRNAEPPVWKRHLSPICRKRQGRATKPKRRPWYTTPPTRRVRDVALRPYSRHGRQPHAKKKIRMSLTFRRPKTLRLRRQPRYPRKSTPRRNKLGHYAIIKFPLTTESAVKKIEENNTLVFTVDVKANKHQIRQAVKKLYDSDVAKHTEERRHDEQNNILTREAKNRNDNTRNRARTETNTETQKNSGYQALISFHSYYSDTSDNKAHLVSYQSGQCTYDRLGWNLLIRMTCRSLQHTYDIQSTQIASCFHPVSVRVNLRLYCANYGGISAVFMPLRKELLILTRSSNSKVSQLRI

SEQ ID NO: 52084 - protein, 84 aa, Homo sapiens
EMAPKAKEAPAHPKAEAKAKALKAKKAVLKGVRSHTRKKKIRMSLTFRRPKTLRLRRQPRYPRKSTPRRNKLGHYAIIKFPLTT

SEQ ID NO: 52085 - protein, 213 aa, Homo sapiens
  DOMAIN (189)..(203): Ribosomal protein L23 proteins domain identified by eMATRIX, accession number BL00050B, p-value=8.125e-12, raw score of 14.81
  DOMAIN (195)..(213): Ribosomal protein L23 domain identified by PFam, accession name Ribosomal_L23, E-value=0.00046, PFam score of 18.2
  misc_feature (1)...(213): Xaa = X or * as defined in Table 2
PGSYLKPLSWTVALSLRPGFMSRWPCQRLTWQRRSVTQASGASGASLCASRLPRDKTAPKAKEAPAPPKAEAKAKALKPKKAVVERCPHTHAKKRIRMSPTFRRPKTLRLRRQPRYPRKSTPRRNKLGHYAIIKFPLTTESAGKKNKKNNTPLVHCGCXRPTRHQIRQAVKKLYDSDVAKVTTLICPDKEKKAYVRLAPDYDALDVANKIGII

SEQ ID NO: 52086 - protein, 55 aa, Homo sapiens
  misc_feature (1)...(55): Xaa = X or * as defined in Table 2
XTTCSWNTKWSAKRVGPVAATYPMLNKKGPVPAATNGCTGDANGHLQEEPPMPTT

SEQ ID NO: 52087 - protein, 30 aa, Homo sapiens
SDSQMSACSSANLIFVGTSRSPVKRILSDQ

SEQ ID NO: 52088 - protein, 75 aa, Homo sapiens
  misc_feature (1)...(75): Xaa = X or * as defined in Table 2
SGSVISPIAATXYRIFAVLXSVQXXXAGPGDLSGDGELPXSVAIQPNVFIAVSSITCNWLPFGKCGSTYWMCQSM

SEQ ID NO: 52089 - protein, 91 aa, Homo sapiens
  misc_feature (1)...(91): Xaa = X or * as defined in Table 2
QHQPLEVASQWKVCSVSVKLLSQSSDVTRVPLEGLDRLSERSGSLSVLXSGILWALDAASQLVSLLPXLTRYHDPRVSSLSSTYVXSPFSS

SEQ ID NO: 52090 - protein, 99 aa, Homo sapiens
  DOMAIN (59)..(99): Integrase core domain identified by PFam, accession name rve, E-value=0.0029, PFam score of 15.3
SWRRRSAAASNVDSFLAKQRRISLCGKGSANTDSGIAVRRAPASATGKTQHHPGPVMNMVENMLDQAFKKLNPHEHPVLHSDQGWQYRMRRYQNILKEH

SEQ ID NO: 52091 - protein, 254 aa, Homo sapiens
  DOMAIN (3)..(254): Myo-inositol-1-phosphate synthase domain identified by PFam, accession name Inos-1-P_synth, E-value=4.5e-27, PFam score of 103.4
SGRKEANYYGSLTQAGTVSLGLDAEGQEVFVPFSAVLPMVAPNDLVFDGWDISSLNLAEAMRRAKVLDWGLQEQLWPHMEALRPLGLAVYIPEFIAANQSARADNLIPGSRAQQLEQIRRDIRDFRSSAGLDKVIVLWTANTERFCEVIPGLNDTAENLLRTIELGLEVSPSTLFAVASILGGLCLSFNGSPQNTLVPGALELAWQHRILVGGDDFKSGQTKVKSVLVDFLIGSGLKTMSIVSYNHLGNNDGEN

SEQ ID NO: 52092 - protein, 704 aa, Homo sapiens
  DOMAIN (224)..(644): Myo-inositol-1-phosphate synthase domain identified by PFam, accession name Inos-1-P_synth, E-value=1.9e-68, PFam score of 240.8
  misc_feature (1)...(704): Xaa = X or * as defined in Table 2
WKSWMVFTAMKLVKAHHRLKLRLKGYLPVTCLEGTRNQRIAATIRHNRARGRHQITAMSEIVRELSQLGWDDNKIGKELGMDSDEVLRLKQINGLQELFADRQYSRAWTLKLAQAFSCCQQRRFLLGKTETNQFMWEGIGAKHRQRNRRYAVLLRQPLAKLNIIQARYPNQHRQHAGECNPHCQAGGDIVDRCPARCFTKGDSKDGSPPQATWPFHNSATMTAKRLSEASQCGSKKSILRERIIYRPSITRYPFQSTMNHPLPEQTLGCIATDYGSSPSPDRSPGPAHYYWTDHSTANIRYQVAAEENGEYTYVERVKIPLDHGTLLIMERATQADWQLEQIRRDIRDFRSSAGLDKVIVLWTANTERFCEVIPGLNDTAENLLRTIDRSVWEVSPSTLFAVASILEGCAFLNGSPQNTLVPGALELAWQHRVFVGGDDFKSGQTKVKSVLVDFLIGFRLQRPSSIVSYNHLGNNDGENLSAPLQFRSKEVSRSNVVDDMVASNPVLYTPGEEPDHCVVIKYVPYVGDSXRALDEYTSELMLGGTNTLVLHNTCEDSLLAAPIMLDLGAAXPSCCQRVTFLALDIGTPSRRPFHPVLVPAQAFFFKGATLSPPGKPVLVNAAFSASAAAIENILRACVGLPPQNHMLLEHKMERPGPSLKRVWTPWLPPYPMLNKKGPGSRCQPMAAPVDANGHLQEEPPMPTT

SEQ ID NO: 52093 - protein, 636 aa, Homo sapiens
  DOMAIN (545)..(567): Flagellar motor protein motA family proteins domain identified by eMATRIX, accession number BL01307A, p-value=1.310e- 17, raw score of 14.10
  DOMAIN (243)..(427): Domain of unknown function DUF36 domain identified by PFam, accession name UPF0117, E-value=6.8e-110, PFam score of 368.3
MDYMVPVGMDWLCRETAGMRVSIKKGSVVFPLNPELVMKVVRQRSTIVTPSGFKAGAFNFERFKEASNQTLGSTFLYSLSCPKPNLGSQPLDFDTKKSYTLKVEAANVHIDPRFSGRGPFKDTATVKIVVEDADEPPVFSSPTYLLEVHENAALNSVIGQVTARDPDITSSPIRLYRIPGDDAKCVQFNREGVKALKAKPVEKAAPAPAAAAPKAAPTPAKPMGEQLALYRMAGSNADRIQGRMDPTRGQSAAEWLQTAEEADIAWVLKTYGEERFAKRIARAIVERNREQPMTRTKELAEVVAAATPVKDKFKHPATRTFQAVRIWVNSELEKIEQALKSSLNVLAPGGRLSIISFHSLEDRIVKRFMRENSRGPQVPAGLPMTEEQLKKLGGRQLRALGKLMPGEEEVAENLRARSSVLRIAQPVGSFACSLCQPPSRAVKRRKLSQNPADIIPQLLDEQRWKDDVVLILLGYLVVLGTVFGGYLMTGGSLGALYQPAELVIIAGAGIGSFIVGNNGKAIKGTLKALPLLFRRSKYTKAMYMDLLALLYRLMAKSRQMGMFSLERDIENPRESEIFASYPRILADSVMLDFIVDYLRLIISGHMNTFEIEALMDEEIETPESEEKSPGTVWPGR

SEQ ID NO: 52094 - protein, 610 aa, Homo sapiens
  DOMAIN (296)..(336): PTS EIIB domain proteins cysteine phosphorylation site proteins proteins domain identified by eMATRIX, accession number BL01035A, p-value=6.040e-31, raw score of 23.76
  DOMAIN (289)..(323): phosphotransferase system, EIIB domain identified by PFam, accession name PTS_EIIB, E-value=8.9e-19, PFam score of 70.2
MGFRHVGQAGLKLLTSVYYCAKIQQSNNNVKVRVSSWCILSREEVKAAGVEVQERGWHVGEIIIQDGDLLSVGCYKKPGSGVANLRFHRTLPGTVWLNHIWNVPFQMQIGEYTNAAGQVFHGDIPRYMAGDRTAGKLSGGFLFKMYGLPRAAIAIWHSAKPENRAKVGGIMIFAALTSFLTGITEPIEFSFMFVAPILYIIHAILAGLAFPICILLGMRDGTSFSHGLIDFIVLSGNSSKLWLFPIVGIGYAIVYYTIFRVLIKALDLKTPGREDATEDAKATGTSEMAPALVAAFGGKENITNLDACITRLRVSVADVSKVDQAGLKKLGAAGVVVAGSGVQAIFGTKSDNLKTEMDEYIHKKPSRPDASQPDTQTDEQDFLTRHPDAVVFSPKKRQWGTQDDLTCAQWLWKKIIALYEQAAECDGEVVRPKEPNWTAWANEIRVMCVQDGRTHKQMCEMYSRVSRDPFWCRNVLSPSKVREKWDELSLRLSPSVSTYTEKREDPYFKASYDNVEYSQIPAGFRGPVRNFYVGTNDPRVILCLHRQAEELESRGLYRRAATVWMAAFRESHSQPERNNFLARRERCLRKSSKRAASGEEWYLSGNYVGA

SEQ ID NO: 52095 - protein, 249 aa, Homo sapiens
  DOMAIN (24)..(231): Domain of unknown function DUF36 domain identified by PFam, accession name UPF0117, E-value=8.3e-118, PFam score of 394.6
  misc_feature (1)...(249): Xaa = X or * as defined in Table 2
MFQLMKASSGGEAACMPAGLMENYKHTTVLLDEAVNGLNIRPDGIYIDGTFGRGLGEEGRLLAIDRDPQAIAVAKTIDDPRFSIIHGPFSALGEYVAERDLIGKIDGILLDLGVSSPQLDDAERGFSFMRDGPLDMRMDPTRGQSAAEWLQTAEEADIAWVLKTYGEERFAKRIARAIVERNREQPNDPELEEIEQALKSSLNVLAPGGGVSIISFHSLEDRIVKRFMREHQFCVVVRSGVGLKTXSVR

SEQ ID NO: 52096 - protein, 295 aa, Homo sapiens
  DOMAIN (63)..(87): Arginase family proteins domain identified by eMATRIX, accession number BL00147A, p-value=2.607e-17, raw score of 20.22
  DOMAIN (62)..(254): Arginase family domain identified by PFam, accession name arginase, E-value=2.3e-100, PFam score of 296.4
  misc_feature (1)...(295): Xaa = X or * as defined in Table 2
CFASGFIGELRKNIVGFIEQDHTRGLVFRLTPGRTLRAESLNLVICLPMNFQPYDSDADWVITGVPFDMATSGRAGGRHGPAAIRQVSTNLAWEHNRFPWNFDMRERLNVVDCGDLVYAFGDAREMSEKLQAHAEKLLAAGKRMLSFGGDHFVTLPLLRAHAKHFGKMALVHFDAHTDTYANGCEFDHGTMFYTAPKEGLIDPNHSVQIGIRTEFDKDNGFTVLDACQVNDRSVDDVIAQVKQIVGDMPVYLTLYNCGGPSXQFHSLRPAQSPLDRCRARYLAPQCVPDFRTLQR

SEQ ID NO: 52097 - protein, 592 aa, Homo sapiens
MAWHPNRRECKAWDQVPFPGEEALTELVQLTSLSQCDFIHSQSTMSLHSPGTDQARREGCELDIADHHQYHTPASTQKVNAHFQKRRHHSEPGKTKNVSINYEGLKTTKDNCYWEGLPWFAINFNPTNPFCSALRDSSFILGQGEEAMHPSSVKVILGTLKAKVNRHHVPGKGDRISDPGLLVNFLDPLPAYFFPHERLTGPFGARCALTLARVPPHFRRRNPSEELFLPGSPMEIRIPKTSRRDLIGPFTPQDEASVAQWLTRLSLRFENHDPCKSKHLKLEPFHYTFLSMEWKQTGKTVLLKVYSWKKLTGFEVTACGELHLEMTDLRWKRPPGTDDPSPSFGQGNIMPSLQIGQLRQQEETSKAADKRQEFQCSKRDLGQSLLAELPQQVVQYFKHKNCPPPTRSPPELQCPAAHAQAQFMKPDRGPLSESSAPIQVPPLFHITPLSPLSTCSRLDLQITSSGVVAVVPTSGFMWGQIQPSLLSAPSCLTVGPLWEVRPLSGVLKPGDDGKWMLVHRTEVVIKYTLDLCGSHSQCPWCPCVMGTGEAHPAGVQCINPKKQRKKKNYKNSASSSCDPASPGQASPEYVLR

SEQ ID NO: 52098 - protein, 300 aa, Homo sapiens
  misc_feature (1)...(300): Xaa = X or * as defined in Table 2
MRWLVSPIEDTGHKALLFACLALHRACVSGHCLSPKCVGVDGRSHEMVAPGLFLDWLLDGTGVWDGTSTNVEGAQEHAVLILLIITDGVISDMEETGMPWCRLPSCPCPSSSGRGQCGLRCHGVPGWGRRMLRSHTGEEAARDIVSSFPFESSATMSEEVYDPRSLYERLQEQRTGSSRTARQEAVVGSKVTVSQPGHRQETTVLEHLVQYFILLIITDGVISDMEETRHAVVQASKLPMSIIIVGVGNADFAAMEFLDGDAGMLRSHTGEEAARDIVQFVPFREFRNNVRGGLXPSISI

SEQ ID NO: 52099 - protein, 46 aa, Homo sapiens
SQWIFTLITVKAAKETLAKAVLAELPQQVVQYFKHKNLPPTNSEPD

SEQ ID NO: 52100 - protein, 228 aa, Homo sapiens
GDDGKWMLVHRTEVIKYTLDPVWKPFTVPLVSLCDGDMEKPIQVMCYDYDNDGGHDFIGEFQTSMSQMCEARDSVPLEFECINPKKQRKKKNYKNSGIIILRSCKINRDYSFLDYILGGCQLHVSPLGIDFTASNGDPLDPSSLHYINPMGTNEYLSAIWAVGQIIQDYDSDKMFPALGFGAQLPPDWKVSHEFAINFNPTNPFCSGVDGIAQAYSTCLPHIRFYGPT

SEQ ID NO: 52101 - protein, 742 aa, Homo sapiens
  DOMAIN (49)..(272): C2 domain identified by PFam, accession name C2, E-value=5.7e -12, PFam score of 53.2
  misc_feature (1)...(742): Xaa = X or * as defined in Table 2
MYSQEGNQFCNRTDCQELLPPPPAPMAHIPSGGAPAAGAAPMGPQYCVCKVELSVSGQNLLDRDVTSKSDPFCVLFTENNGRWIEYDRTETAINNLNPAFSKKFVLDYHFEEVQKLKFALFDQDKSSMRLDEHDFLGQFSCSLGTIVSSKKITRPLLLLNDKPAGKGLITIAAQELSDNRVITLSLACRRLDKKDLFGKSDPFLEFYKPGDDGKWMLVHRTEVVIKYTLDPVWKPFTVPLVSLCDGDMEKPIQVMCYDYDNDGGHDFIGEFQTSVFKMCEARDSVPLEFECINPKKQRKKKNYKNSGIIILRSCKVNQRGQARARGQVSGHTEGTDRALDLEPARPVFKSRLCHILALWPSELHLTRPQSPHLWNGDINEAEHVQGYSSLTFLCGGQGRHELTFQGLSWWENCHCELLPPTVGMQGAEDIGWGHPVLSGISVTVTPMINRDYSFLDYILGGCQLMFTVGIDFTASNGNPLDPSSLHYINPMGTNEYLSAIWAVGQIIQDYDRPRSFLKPDPWAGTEAVTGQHVMFSVYETHVEWGRQIGLPDVANQNTRHPVKFEFQVSHEFAINFNPTNPFCSGVDGIAQAYSACLPHIRFYGPTNFSPIVNHVARFAAQATQQRTATQYFILLIITDGVISDMEETRHAVVQASKLPMSIIIVGVGNADFAAMEFLDGDSPHAALPTRGRRQPRDIVQFVPFGEFRNAAKRDLGQKLCWRSCPQQVVQYFKAXKPCPPPN

SEQ ID NO: 52102 - protein, 44 aa, Homo sapiens
  misc_feature (1)...(44): Xaa = X or * as defined in Table 2
QPGLSINIEAGAVPRPFARRYWGNLGXFLFLGVLRCFSSPGSPH

SEQ ID NO: 52103 - protein, 31 aa, Homo sapiens
  misc_feature (1)...(31): Xaa = X or * as defined in Table 2
FYAKAEAGDRTVAXPHKPKMFLSIHHRVAKI

SEQ ID NO: 52104 - protein, 187 aa, Homo sapiens
MCYRASAAHKTKIVRNADGTESASEQLYQVVGAGCKMPWQSEAMKDVLICDKRRLMRRTGGTETSKYPEEKKSTEIPPVAASERGGAQSLNQCANTPDDRCDQYGGTAKKTGQALHKLYGQDRGDHPGEGNPGRAANIDKRSQRTREHLGATRKPTRYREGVHGTTMTTRRHTGRSYAKINCQVVIA

SEQ ID NO: 52105 - protein, 190 aa, Homo sapiens
  misc_feature (1)...(190): Xaa = X or * as defined in Table 2
PIIQKVRSHTPKRAPTACTYTVSGSFSLPSPGFFSPFPHGTGSLSVSQEYLALEEWSPHISARDCTCSGLLIELPSTGIFVYGAVTLYRAPFQTLPVTHALIQALGCSPFARRYWGNLGXFLFLGVLRCFSSPGSPHXPMDSVNDSVSKHTEVSPFGNPGYNGSYHLTDAYRRLARPSSPLTPGHPPLYG

SEQ ID NO: 52106 - protein, 208 aa, Homo sapiens
SVETKAFPSWRPQAMACLKMPIISNKNKPLSRQLKNEYCLNMGFIPGFWSLAASLQGRFRFQRRGVKRTSLGEGEPERREGHVADSGPVGMSWLTSFFQAQADSRGKMSSQTTTGRWSVCERGPQECRRAVILQGARSALSSGPALGKLEGQTLFADASWEAECQLRARWGGGPGGPVPQQRGTGKRYHFVFPNGSGCEFLPNLQFTI

SEQ ID NO: 52107 - protein, 95 aa, Homo sapiens
  misc_feature (1)...(95): Xaa = X or * as defined in Table 2
HFTDGQNNRQHGCGVRRQAGKQVVCKVEHQNQYNHRCVWXESFQVRTHGTGEPVNKTRTSQAVSHHNQSCQVDQCVPCAVIAGNVFPRHNVQGQH

SEQ ID NO: 52108 - protein, 62 aa, Homo sapiens
LTPFVLDPFAIRQIDAVLATHDHNDHIDVNVAAAVMQNCADDVPFIGPKTCVDLWIGNSFQL

SEQ ID NO: 52109 - protein, 491 aa, Homo sapiens
  DOMAIN (385)..(428): Ribonuclease PH proteins domain identified by eMATRIX, accession number BL01277B, p-value=1.000e-40, raw score of 18.57
  DOMAIN (322)..(491): 3' exoribonuclease family domain identified by PFam, accession name RNase_PH, E-value=8.8e-48, PFam score of 172.2
MLLAWALLPGVHEFINRSVAAFARVDQQGIERFIQSYGALAAVVSFLLMILQAIAAPLPAFLITFANASLFGAFWGGLLSWTSSMAGAALCFFIARVMGREVVEKLTGKTVLDSMDGFFTRYGKHTILEQRIAHYRAVEQPGRTDRIAAHHIHFGVWIENVDGIKSRAQNRRSDKAFYAASGNRCLTRRCASYQAYKRNITVGRIRRLRRIRQPLPECDAVRLIRPTNRNITSSYHESWVLEDRIIKDGSYNIDQGVGVRAISGEKTGFVTLTKSACAWNRVATARTIVRDSGDGENEYARERQVQGYGTAPADETGDFNMRPAGRSNNQVRPVTLTRNYTKHAEGSVLVEFGDTKVLCTASIEEGVPRFLKGQGQGWITAEYGMLPRSTHTRNAREAAKGKQGGRTMEIQRLIARALRAAVDLKALGEFTITLDCDVLQADGGTRTASITGACVALVDALQKLVENGKLKTNPMKGMVAAVSVGIVNGEA

SEQ ID NO: 52110 - protein, 129 aa, Homo sapiens
  misc_feature (1)...(129): Xaa = X or * as defined in Table 2
PKMVRWLARKCWNTVSTVRCFWMAMPTPVFAPCAAIKTASARXMSWASSRXPNRGCVKSATLRQFSXVAAMKXPPVAQXWWLGRNASTAGGDSGAGRSLDDGEPTPCGMGLEQKRHGNPAGCVAPSRWS

SEQ ID NO: 52111 - protein, 254 aa, Homo sapiens
  misc_feature (1)...(254): Xaa = X or * as defined in Table 2
MAMSKVKSITRESWILSTFPEWGSWLNEEIEQEQVAPGTFTMWWLGCTGIWLKSEGGTNVCVNLWCGTGKQSHGNPLMKQGQQMPPMAGVKKLQPNLRTTPFVLDPFAIRQIDAVLATHDHNDHIDVNVAAAVMQNCADDVPFIGPKTCVDSWIGWGVPKERCIVVKPGDVVQVTALEIHAPDAFDRTAPITWLADQKRRRTVKGMDDAPLXQVSYRPSTPPRCCYWSLLSSSVYYSKRPFAHGYARLCIPFMD

SEQ ID NO: 52112 - protein, 35 aa, Homo sapiens
IGFKPAGGIRSAKDSLAWLSLVKEELGDEWLKPEL

SEQ ID NO: 52113 - protein, 164 aa, Homo sapiens
MGQTAGGEAVSGEIIPEKGGTCAEPQDVELFGQKAFRAGGTERTKTQKVGWHHLQRSARSDFIKTSTGKETVNATFPVAIVMLRAIRDFFWKTGNKIGFKPAGGIRSAKDSLAWLSLVKEELGDEWLKPELFRIGASTLLSDIERQIYHHVTGRYAAYHDLPMS

SEQ ID NO: 52114 - protein, 164 aa, Homo sapiens
  misc_feature (1)...(164): Xaa = X or * as defined in Table 2
SGTVLDMSEYSRVQIRKQPYLSKGYIPVRQKTKAAWLLKAVTFIDLTTLSGDDTSSNIQRLCYKAKYPIREDLLKALNMHDKVAAGFPAGQTHLKTRLEEIRLAVEDGATEIDVVINRSLVLTGQWEGLYSPVVYSALPCNIXHSRLFLPSGNALLLWLWCLHS

SEQ ID NO: 52115 - protein, 350 aa, Homo sapiens
  DOMAIN (75)..(328): Deoxyribose-phosphate aldolase domain identified by PFam, accession name DeoC, E-value=2.8e-08, PFam score of 23.2
  misc_feature (1)...(350): Xaa = X or * as defined in Table 2
ARSNIRMVTAFRSLPAGSSGAARAMSAHNRGTELDLSWISKIQVNHPAVLRRAEQIQARRTVKKDWQAAWLLKAVTFIDLTTLSGDDTSFNIXRLCYKAGYPIREDLLKALNMHDKGITTAAVCVYPARVCDAVKGTSRPAGCVNIPVGISRAAGFPAGQTHLKTRLEEIRLAVEDGSLQKIDVVINRSLGAXQAQWEALYDEIRQFRKACGEAHLKTILATGELGTLTNVYKASMIAMMAGSDFIKTSTGKETVNATFPVAIVMLRAIRDFFWKTGNKIGFKPAGGIRSAKDSLAWLSLVKEELGDEWLKPELFRIGASTLLSDIERQIYHSCGLGRYGSLFMDLSQCL

SEQ ID NO: 52116 - protein, 72 aa, Homo sapiens
SLVGAGDPPIFREKLPVSHGSLSRTGQLSAPVPPGWASACGDSPRSPAANCWSTGFPAARPCGPRGSRDCVV

SEQ ID NO: 52117 - protein, 97 aa, Homo sapiens
  DOMAIN (16)..(30): ATP-DEPENDENT PHOSPHOFRUCTOKINASE FAMILY SIGNATURE domain identified by eMATRIX, accession number PR00476B, p-value=2.688e- 13, raw score of 12.31
  DOMAIN (1)..(78): Phosphofructokinase domain identified by PFam, accession name PFK, E-value=5.1e-56, PFam score of 154.0
MNAAIRGVVRSALTEGLEVMGIYDGYLGLYEDRMVQLDRYSVSDMINRGGTFLGSARFPEFRNENIRAVAIKNLKKRGLAEVAGYRAVTVPTWVQCV

SEQ ID NO: 52118 - protein, 276 aa, Homo sapiens
  DOMAIN (169)..(211): Kringle domain proteins domain identified by eMATRIX, accession number BL00021D, p-value=8.714e-20, raw score of 24.56
  DOMAIN (22)..(210): Trypsin domain identified by PFam, accession name trypsin, E- value=6.6e-65, PFam score of 207.0
MQSLLGSIANRTRDQPVRFQDPTKWVAYVGATYLSGSEASTVRAQVVQIVKHPLYNADTADFDVAVLELTSPLPFGRHIQPVCLPAATHIFPPSKKCLISGWGYLKEDFRKHLPRPAMVKPEVLQKATVELLDQALCASLYGHSLTDRMVCAGYLDGKVDSCQGDSGGPLVCEEPSGRFFLAGIVSWGIGCAEARRPGVYARVTRLRDWILEATTKASMPLAPTMAPAPAAPSTAWPTSPESPVVSTPTKSMQALSTVPLDWVTVPKLQGIFGAER

SEQ ID NO: 52119 - protein, 349 aa, Homo sapiens
  DOMAIN (104)..(117): LDL-receptor class A (LDLRA) domain proteins domain identified by eMATRIX, accession number BL01209, p-value=9.413e-11, raw score of 9.31
  DOMAIN (133)..(269): Trypsin domain identified by PFam, accession name trypsin, E- value=4.5e-19, PFam score of 62.8
  misc_feature (1)...(349): Xaa = X or * as defined in Table 2
RPPWRHWDGNSSVLVHFQLHFLLRPLQTLSLGLEEELLQRGIRARLREHGISLAAYGTIVSAELKGGSRPCAVWWPSEPGAGRCPGNSFSCGNSQCVTKVNPECDDQEDCSDGSDEAHCECGLQPAWRMAGRIVGGMEASPGEFPWQASLRENKEHFCGAAIINDQPLRSXNHRFQDPTKWVAYVVRPTSAARRPAPCGPSKKAWISGWGYLKEGLPXASPRPAMVKPEVLQKADWELLDQALCASLYGHSLTDRMVCAGYLDGKVDSCSVLFLFRGTISFFFSEDRNLIRYVLLYSIFVVNCISGKPQPGPPVLRALCQHPHQIDAGPQYRASCWVTVPKLQGIFGAE

SEQ ID NO: 52120 - protein, 101 aa, Homo sapiens
  misc_feature (1)...(101): Xaa = X or * as defined in Table 2
SVSLLDEETALPFSWDELRLSALLDTXAAFQEIELAFQDPQCVGLLTAPYADAAFSGSTDIAMFLLVPILSARKPASPRSSXTFSHLATEPLPASIKXAAA

SEQ ID NO: 52121 - protein, 59 aa, Homo sapiens
LVSHRTPRFVLSPELSARLNLVFGHNPPPADGPRYRPSPAVTPLCLCTYQITPQPDEML

SEQ ID NO: 52122 - protein, 89 aa, Homo sapiens
  misc_feature (1)...(89): Xaa = X or * as defined in Table 2
PGMAVSYEKISKYPVEFLPAQANIAGHNDAPEEREPFQWXLWLLLPNFXLQEKCSPTLCHFLSRRTQSEFPSSTAAGNLSVSLLYPCKS

SEQ ID NO: 52123 - protein, 336 aa, Homo sapiens
  DOMAIN (232)..(284): ELEMENT TRANSPOSABLE INSERTION PROTEIN TRANSPOSITION DNA domain identified by eMATRIX, accession number PD02455C, p-value= 1.000e-40, raw score of 29.23
  DOMAIN (165)..(324): Integrase core domain identified by PFam, accession name rve, E-value=5.5e-47, PFam score of 166.5
MPQSRVYDPICYSFRWSDNQKAATGKHASKHAAQLTQATARRAACTSEQAGTRRQHTAAGSTQSRAQQRAQARSRKAAAEGAARTHAKAANSRRTTIVAGTQVHESTVMTGPLSLHREGKQINHKAVQRLMGTLSLKAAIKVKRYRSYRGEVGQTAPNVLQRDFKATRPNEKWVTDVTEFAVNGRKLYLSPVIDLFNNEVISYSLSERPVMNMVENMLDQAFKKLNPHEHPVLHSDQGWQYRMRRYQNILKEHGIKQSMSRKGNCLDNAVVECFFGTLKSECFYLDEFSNISELKDAVTEYIEYYNSRRISLKLKGLTPIEYRNQTYMPRVNCPTF

SEQ ID NO: 52124 - protein, 150 aa, Homo sapiens
  misc_feature (1)...(150): Xaa = X or * as defined in Table 2
YYRRCGAASPHGRDPVQIGXTSSQPRXSAYRNPASVIPVARHSARAPAILRPXVVVAERSERSIPGLRATPAEIRTTSAPSSAGVASSPEKPLIFTAIDSHTGSHWSDIIHVCAKKLQNYVPKLNASLLLTPSIYVTRTTRSGPIPPARQ

SEQ ID NO: 52125 - protein, 49 aa, Homo sapiens
  misc_feature (1)...(49): Xaa = X or * as defined in Table 2
GYFDIFSYDTAIPGQSAEQDAREDXAFXMPDRAYSQPCSSLVFPKGCKK

SEQ ID NO: 52126 - protein, 179 aa, Homo sapiens
  misc_feature (1)...(179): Xaa = X or * as defined in Table 2
CGAREERGRGCHHVHSQLRGPGPAPGQVQQPQLVPAPVVPELPGLRGLSWQARRTRARHRQGQVQDHQPDPTVHAQLRGVQLGEAPLQLHHGDXDHRAPXGYFDIFSYDTAIPGQSAEQDAREDXAFXMPDRAYSQPCSSLVFPKGCPVPGRGCAAGVQAAGAAHPPLDHPALQPLQGR

SEQ ID NO: 52127 - protein, 288 aa, Homo sapiens
  DOMAIN (141)..(162): GLUTELIN SIGNATURE domain identified by eMATRIX, accession number PR00211B, p-value=7.500e-09, raw score of 0.86
  misc_feature (1)...(288): Xaa = X or * as defined in Table 2
DLLCGRGCQGRRPRHLQPQTELEAPEVPAERPGRGPAVAARSDPRAQAEDVPGYNPLSGKPAKQQVHEGHHPGAPGHRRPGGAAVPAGGPHRCLPAQPARPCGGAAEPRGGPAGAHXARGSRAAGEGQPWWPSPRLGAGPPAAPVHAAPGSHLLPGHHLPTQPSALAAAQPLAEEPREQPGAGGPQPGSPTLRGVEVVPLPHAAGGAGAVPVGGAACPTAPHPAASAPAPVLLSQLGTQHPPRRDPPHCSCAGIQDSGWAGPPALWSLLHVAKPAQARRPCALLHPGV

SEQ ID NO: 52128 - protein, 84 aa, Homo sapiens
  misc_feature (1)...(84): Xaa = X or * as defined in Table 2
AKAFSFFRYISRVSRNRTCLSRSSMRRSFDSSNADAAFSGSTDIAMFLLVPILSARKPASPRSSXTFSHLATEPLPASIKXAAA

SEQ ID NO: 52129 - protein, 168 aa, Homo sapiens
PEIKSIELHAVRAHAPGPPPRTPRVAHAVRSPAPRRARTALSPGLRALRPAPRPSLPAAAAAPARAAQGPRPAAPAASAPGPPAVAPLVAGQPGLGLQRCRGAGGAGGRGPRGLGRLHLLPHPARHLLRPPAAPARGARSSAWLLLVSAEAPAGVALGPRLDAAPHGP

SEQ ID NO: 52130 - protein, 101 aa, Homo sapiens
  misc_feature (1)...(101): Xaa = X or * as defined in Table 2
SIRRPKRARPIRIKKIPEQQGPQPAVLPVQTVATRDRELPQMPPVGPETLKRDPPVRAMTIPATAAVYKPYWGATPLPIAKPSPAGXQXSRRFSKGYFGFD

SEQ ID NO: 52131 - protein, 116 aa, Homo sapiens
  misc_feature (1)...(116): Xaa = X or * as defined in Table 2
HSPGSFYSRRDAQSPAPAIRAAVXAEVQXTPLCHDRITHFPEDWRGWQRSXFXPAACRVAGSLPVPVSPQIQHPYCRSSAQYLPCGAGLPLPGFDRLCPRSLFQGLAVTGGSCGPS

SEQ ID NO: 52132 - protein, 158 aa, Homo sapiens
  misc_feature (1)...(158): Xaa = X or * as defined in Table 2
YSCRTEHPPRLATAEYRHHQRAADAGRXRHAGVAFYPIKERYRQPEPAFSYQPRRWSASRNRRPSRXRMRRFPANSSTPFPPAPPLRRKRVASLIGGRMLRLTGAGIAEERMIAPQLPECILHELTERPHPFPLGIDLILTCGERLLAIPRTTHVEVC

SEQ ID NO: 52133 - protein, 116 aa, Homo sapiens
  misc_feature (1)...(116): Xaa = X or * as defined in Table 2
RATHVLTWVRGTPKRAEMILGSSRSMSAAAVTVLISPATAQRWITRAPXPSPIRSPSVSRLTATRPSSITKARALSPMAAPALRSTVTTPPRITVEKPLLMEKIPRVPKSRAISAL

SEQ ID NO: 52134 - protein, 157 aa, Homo sapiens
  misc_feature (1)...(157): Xaa = X or * as defined in Table 2
QSQKPDTRGRLFVAKAPPCVQRHKVRWLRLVMITSAHYLPLRRXXPAHPASGGCCPNRAKYTQRPAEXISYRPDXEAVRXSRAPAKVTQSNPASRVALRRPAPRAVHQATIIPVDESTLLPAPLAVSARQKVRQAIPLRDSPVRRPTLDVRHRATGL

SEQ ID NO: 52135 - protein, 91 aa, Homo sapiens
  misc_feature (1)...(91): Xaa = X or * as defined in Table 2
RQLLRWSNRXIARXSLTQPARRFPAYHYAHPAAAAAPGDPLGADLQLCARHYHRQRHCVPRHAGYPRSDGLHPQPRGRWRIRCSDCLRVPF

SEQ ID NO: 52136 - protein, 148 aa, Homo sapiens
  misc_feature (1)...(148): Xaa = X or * as defined in Table 2
MFISGLDDFFIDVVYWVRRIKRKLSVYRRYPRMSYRELYKPDEKPLDDYGSGVEXNGRHRQYGRAGGDHARLRKLSYLCWHLPQRPRYSAXCXRSVRSLPECAXGSLRASWPHPAKPTVXTTCWTPSPNLSVAPISLLLVLFCMTPKM

SEQ ID NO: 52137 - protein, 99 aa, Homo sapiens
  misc_feature (1)...(99): Xaa = X or * as defined in Table 2
SRKSGISIGAVKRPTHXGSXKARSICXNAAYVSKKAESLSSFPEKSESTQRVKAVLSSXXASQGCGDTAQYVLLSFKGSQQAXQVCGRXKAYXXDLSRE

SEQ ID NO: 52138 - protein, 84 aa, Homo sapiens
  misc_feature (1)...(84): Xaa = X or * as defined in Table 2
GSTYEIASATPSPSAKPSNRSPSPMSRPQSNPKPNSLHSCXPXGNLRSTPESGKXATPPPPPAYTLVLFKLANPQLPEESPWAF

SEQ ID NO: 52139 - protein, 85 aa, Homo sapiens
  misc_feature (1)...(85): Xaa = X or * as defined in Table 2
CRRTAASRTPRKRTQTAPTHATNKPQKPQTSTDRGNRREPEKTEPSXHLRPNPQEPGRRGQTQQEPAPRHQPPKPQGEPTTPQKQ

SEQ ID NO: 52140 - protein, 864 aa, Homo sapiens
  DOMAIN (705)..(714): MOLLUSCAN RHODOPSIN C-TERMINAL TAIL SIGNATURE domain identified by eMATRIX, accession number PR00239B, p-value=2.157e- 11, raw score of 3.98
  DOMAIN (238)..(448): short chain dehydrogenase domain identified by PFam, accession name adh_short, E-value=3e-08, PFam score of 40.1
  misc_feature (1)...(864): Xaa = X or * as defined in Table 2
MESHTVTDYNFGRLLNESFANCETDRNYLGIFKCGFWLSGTRKSAFLTKSQVTLTRPVDHTLRNEVLGSTKYQVPGYRRKTNTNLEESNVLIGYDVAPGGGKQIDGKKAEGRELMVPVAGRPLCRSSSMELLLLLPLHIPREQMLLADAYWNLHQSCQSKTSPDTAKCPLDRCPRVFKSQSYKASTFDGLSMDTEVIKSNGKQGWRQRRLANMKDIDKQTQAATFVLSQGMQRSGNDRIILVTGASDGIGREAAMTYARYGATVILLGRNEEKLRQVASHINEETGRQPQWFILDLLTCTSENCQQLAQRIAVNYPRLDGVLHNAGLLGDVCPMSEQNPQVWQDVMQLFRAGIINADPGAFFVTGFRRYCCFTLCCRSFRFGFYRRRFRHRSCRQRAMRHSGTGQGQGNEQCFNSVFHTVFSLFVNSGITLTAVKTVNKWQCSEMEKAAKATFSCYSCNAFFCEAASGLLLFQRIANFDFRLFTQVTHQSFKDDLGIKMETTKPSFQDVLEFVRLFRRKNKLQREIQDVEKKIRDNQKRVLLLDNLSDYIKPGMSVEAIQGIIASMKGDYEDRVDDYIIKNAELSKERRDISKKLKAMGEMKNGEANRKERSSMFRDRPLKRMKSKRDDDSYDEDVEDDEGVGEVRVHRVNHAPANAQEHEAARPSPQHQYQPPYASAQPRQPVQQPPEAQVPPQHAPHPAQPVQQPAYQPQPEQPLQQPVSPQVAPAPQPVHSAPQPAQQAFQPAEPVAAPQPEPVAEPAPVMDKPKRKEAVIIMNVAAHHGSELNGELLLNSIQQAGFIFGDMNIYHRHLSPDGKRPALFSLANMVKTGTFDPEXRFTTPPATRQAAGQNQLRCHPRQSSGK

SEQ ID NO: 52141 - protein, 32 aa, Homo sapiens
PWRPNTQTAFPRALADSLMQLARQVSRLESGQ

SEQ ID NO: 52142 - protein, 108 aa, Homo sapiens
ASIFVMLVRGAEPMEKRQQRGLFTVPGLLLAFCSHVLSCVNPLIPVDNPYYPPLSELIPAPPQPNDRAQRVSERGSGRAPNTQTASPRALADSLMQLARQVSRLESGQ

SEQ ID NO: 52143 - protein, 396 aa, Homo sapiens
  DOMAIN (56)..(94): Bacterial regulatory proteins lacI family proteins. domain identified by eMATRIX, accession number BL00356B, p-value=6.250e- 27, raw score of 26.17
  DOMAIN (28)..(55): Bacterial regulatory proteins, lacI family domain identified by PFam, accession name lacI, E-value=1.4e-12, PFam score of 49.5
  misc_feature (1)...(396): Xaa = X or * as defined in Table 2
HHRMAQNLSRYGNDKRPEESQFRVVNVKPVTLYDVAEYAGVSYQTVSRVVNQASHVSAKTREKVEAAMAELNYIPNRVAQQLAGKQSLLIGVATSSLALHAPSQIVAAIKSRADQLGASVVVSMVFRSGLVACHTAPHNLLARKRGPAGLIINYPLDDQDAIAVEAACTNVPALFLDVSDQTPINSIIFSHEDGTRLGVEHLVALGHQQIALLAGPLSSVSARLRLAGWHNFLTGNQIQPIAEREGDWSAMSGFQQTLQMLNEGIVPHWRLLVAQRSRMALGAMRRHYPESGLRVGADILRVGGNTTIPEDSSCYIPALXPPIKQDFRLLGAQTSVDRLLQLSQGQAVKGNQLLPVSLVKRKTTLAPNTQTASPRALPRFHXMQLARQVSRLESGQ

SEQ ID NO: 52144 - protein, 400 aa, Homo sapiens; identical to SEQ ID NO: 48270
  DOMAIN (170)..(199): SODIUM CHANNEL SIGNATURE domain identified by eMATRIX, accession number PR00170G, p-value=5.976e-10, raw score of 7.74

SEQ ID NO: 52145 - protein, 164 aa, Homo sapiens
MGCGACVVIVGRSFMLYHYALSVPLPVDSLPLYDVDCQTNGNLEYDTYSQPEWKHNLFDHYLAVLYRFKDESGKEQFSGAVVKTREATPGKEIEAITRRMLDFSPRLKKLAGVPCQNISSNVLEESAISDDILSPDEEGFCSGKHFTELGLVGLLEQAAGYFTM

SEQ ID NO: 52146 - protein, 96 aa, Homo sapiens
WHITYFIEKQRARIRRLNQPCFTVGRSASKCTFNITEQFALQKLLRNRGTVDSNKGFIPSSAQLMDCTGDDFFTRAAFTNHHNAGWAGCNTANESF

SEQ ID NO: 52147 - protein, 570 aa, Homo sapiens
  DOMAIN (497)..(513): 10 KD CHAPERONIN SIGNATURE domain identified by eMATRIX, accession number PR00297A, p-value=3.368e-16, raw score of 13.91
  DOMAIN (500)..(567): Chaperonins 10 Kd subunit domain identified by PFam, accession name cpn10, E-value=5.6e-36, PFam score of 132.9
  misc_feature (1)...(570): Xaa = X or * as defined in Table 2
MLCTKWDKLGLEKNAGKNKNAYKWYGWPANAPDEPHIEQLVGECRVMRQLKRLISRIAPSPSSVMVVGESGTAIPVVSHAEFKGGFADIGVHYLDWTSRTTEKSSTKSHKDDFGYLEFEGGANFSWGEMYGFFDWENFYNGRHNKPGSEQRYTFKNTKPYLSWVDTGFSLYLHAYGTYGSANRVNFLDDMFLAGFGFQFXPAGGWWGSNPFFAKRYTRSKPYYTGDNGYVAGWVAGYNFMLGSEKFTLTNWNEYEFDRDATYAADFLPLYDVDCQDNGNLEYDTYSQPEWKHNLFDHYLAVLYRFKDESGKEQFSGAVVKTREATPGKEIEAITRRMLDFSPRLKKLADCPSPRPVFEALCICSMLDALLLLCPLDYHASCDNYSYALLDPQGFPLPHRRLWGPYIDVDVPMLHLIQHAWAQDALLSCLYSDLLYMSSFPYPAGTLTRLMGVTSYNHKNTLLTYCITLMSTIRFAYDGDEEIAMKYTDFLKGELSMNIRPLHDRVIVKRKEVETKSAGGIVLTGSASAKSTRGEVLAVGNGRILENGEVKPLDVKIGDIVFFNDGYRGEI

SEQ ID NO: 52148 - protein, 114 aa, Homo sapiens
PIRKAPKCIPLPSYPAIASSLQDQLSAVAEAEQQDRFQDSVGLLSDGIVRKPLIAVCCRCLPPVALSLRFPTPSGKLFWAGRYKALEQLPPPLWRCFPISRANKTAPKRWRLSA

SEQ ID NO: 52149 - protein, 458 aa, Homo sapiens
MSTLPTPHLYIKTLLLHSGDSQQKVYIRATPASLPAAAASPHRRPPITFATLTHKLCSVLRHLSSSAIKVFPTVLRLQPRYAPMKLNPRLTIPIRNSPCLQAHGTQHPPPGLFSNQLSHKGLVRDSSSAFLFRVQIQRISPCIQLIVRSAFASGQLSPHIKSFGRLNILNRELTELRPLVFFVRRLFRDLQHIRACNMRDARTDVAKQAATLKLEDTETSKKLHQWRSTHQEQKALEPQTVRPGIHAQKRLRVGRFIKPAGTTGFPTGKRACHQEARNIPPHRQSRFLASRGLLAELMFMLYGIGELPEIVTLPKGKPVFSDKNLPSFSISYAGNMVGVALTTEGECGLDMELQRATRGFHSPHAPDNHTFSSNESLWISKQNDPNEARAQLITLRRSVLKLTGDINFFIRTDSPAVIEMSCVVNIRSIRAQPHPRKLLQMLPLTGGSDTTGLLSPEP

SEQ ID NO: 52150 - protein, 556 aa, Homo sapiens
  misc_feature (1)...(556): Xaa = X or * as defined in Table 2
IGQVVDVDTCFTRIHLVFVNFDNDTGSIHVLNDTTTFSYRSYTGVNGNSTFHTSTNQRLISAQSRNGLTLHVRTHQCTVGVIVFQERDQGRTDGYHLLGGYVHVVNLVAAEQAGFAFATASYQVFYEVAFFIQVGVRLGDNVVAFFDSRQVVNFVSYNTVGHFTIRSLKEAVFVSLCVHGQRVDQTDVRTFRGFDWTDATVVSRVYVSNFEACTFTGQTAWAECGDTTFVRNLRQRVVLVHKLRQLAGTEELFHCCGSQDPQQPWGWNLRVNPLAQTTGHAHEAQRKQWHKGNEEADDPEPERAFTPGFVQFETERFRPPVGHPCEAAEDHAADDHVMEVRNQEQAVMQNEVRARYGQQHASHPAHREGDDKTDGPQHRRMEHDAALIHGEQPVEDLHPGRDGDNHCGDTKEGVYVRARTHRKEVVQPNDERQHGDTDGCPYQRGITKQTFTREGCRNFGEHTENRQDQDVNFRVAPGPNQVDVHHHVATHIVGKEMGAQIAIQGQHATYRQNGKDLXSNRGVASGNPQCRHRAHRRATDCQTVIKQPVFFGYCRT

SEQ ID NO: 52151 - protein, 634 aa, Homo sapiens
  DOMAIN (504)..(548): Sigma-54 interaction domain proteins ATP-binding region A proteins domain identified by eMATRIX, accession number BL00675A, p -value=1.000e-40, raw score of 24.86
  DOMAIN (480)..(630): Sigma-54 transcription factors domain identified by PFam, accession name sigma54, E-value=1.2e-102, PFam score of 354.4
YITATSCSGWMIRWCAKAAKCCACSRGPGGKLRRHKGAEETLCGNTRVLIAPQLPAVIIATLSGSRSQTGRREGPTPTTVMIQDHTGSSTDDECSANVQRIFNRIMLCSIVSRPRTIPFHDLAQSFRQFRNVKCLWCAFEGAQLMRIQPAIVMVKTIHRERLNSGQFRCHQEARNIPPHRQSRFLASRGLLAELMFMLYGIGELPEIVTLPKEIRGNVDNSRHAVFLANSGMPELRFIRTHGSRFTSQDCTLFNWLARIITPVLQSWLNDEEQQVALRLLEKDRDHHRVLVDITNAVLSHLDLDDLIADVAREIHHFFGLASVSMVLGDHRKNEKFSLWCSDLSASHCACLPRCMPGESVLLTQTLQTRQPTLTHRADDLFLWQRDPLLLLLASNGCESALLIPLTFGNHTPGALLLAHTSSTLFSEENCQLLQHIADRIAIAVGNADAWRSMTDLQESLQQENHQLSEQLLSNLGIGDIIYQSQAMEDLLQQVDIVAKSDSTVLICGETGTGKEVIARAIHQLSPRRDKPLVKINCAAIPASLLESELFGHDKGAFTGAINTHRGRFEIADGGTLFLDEIGDLPLELQPKLLRVLQEREIERLGGSRTIPVNVRVIAATNRDLWQMVEDRGVI

SEQ ID NO: 52152 - protein, 48 aa, Homo sapiens
  misc_feature (1)...(48): Xaa = X or * as defined in Table 2
MTIRAICSCCPLPDAXNVLMXIYMSTFQASGNGQQLQIARIVIQNITG

SEQ ID NO: 52153 - protein, 194 aa, Homo sapiens
  misc_feature (1)...(194): Xaa = X or * as defined in Table 2
FCPSSCLAATAPAAXAGWSFLPSPAEQNRWRFPLSRFCQIPAPLLGTLIISLSVFCSILAASAAEIPGSVDGIYNKSPSLIWVKIPRQLYXAAREPSAPKAPPPAAWFSASAVLSATAMINTNQKAIERVTAFRRNFATDPVAHQDRDHYDRQQRRTRHRIRFGERQRAKQTPFLPFQGEDRDKRQRDNQQTDK

SEQ ID NO: 52154 - protein, 383 aa, Homo sapiens
  DOMAIN (128)..(164): Thiamine pyrophosphate enzymes proteins domain identified by eMATRIX, accession number BL00187C, p-value=4.857e-27, raw score of 26.34
  DOMAIN (84)..(328): Thiamine pyrophosphate enzymes domain identified by PFam, accession name TPP_enzymes, E-value=4.1e-138, PFam score of 446.2
  misc_feature (1)...(383): Xaa = X or * as defined in Table 2
MTTSMLNAKLLPSAPSAAVVVVRVVVVVGNAPTSRKVGPEEKDWSMASSGTTSTRKRFTGAEFIVHFLEQPGHXDCDRHSGSCSILPVYDALSQSTQIRHILARHEQGAGFIAQGMARTDGKPAVCMACSGPGATNLVTAIADARLDSIPLICITGQVPASMIGTDAFQEVDTYGISIPITKHNYLVRHIEELPQVMSDAFRIAQSGRPGPVWIDIPKDEQTAVFEIETQPAMAEKAAAPAFSEESIRDAAAMINAAKRPVLYLGGGVINANARVRELAEKAQLPTTMTLMALGMLPKAHPLSLGMLGMHGVRSTNYILQEADLLIVLELAGVQTVDTDVNASKPASATRHIAFQTVTIGCDRNLADSVVFPHSVDDIGKVAA

SEQ ID NO: 52155 - protein, 385 aa, Homo sapiens
  DOMAIN (58)..(94): Thiamine pyrophosphate enzymes proteins domain identified by eMATRIX, accession number BL00187C, p-value=4.857e-27, raw score of 26.34
  DOMAIN (15)..(276): Thiamine pyrophosphate enzymes domain identified by PFam, accession name TPP_enzymes, E-value=9.3e-131, PFam score of 422.6
  misc_feature (1)...(385): Xaa = X or * as defined in Table 2
MVGMASSCMPAFTRLELYSVISQSTQIRHILARHEQGAGFIAQGMARTDGKPAVCMACSGPGATNLVTAIADARLDSIPLICITGQVPASMIGTDAFQEVDTYGISTMTLMALGMLPKAHALSLGMLGMHGVRSTNYFCQEADLSIVLGALFDAGQIGKTSSFCPNAKIIHVDIDRAEREFPCPIPKACDLLSHYGLINAVAACVDDNAIITTDVGQHQMWTAQAYPLNRPRQWLTSGGLGTMGFGLPAAIGAALANPDRKVLCFSGDGSLMMNIQXMIIAIPTGVKIFNWCSPCIRPHRVPFCDAVAIGFIVTFSDVIQIASIYEIPCRDPTGVASTEYSSSSCRRRRNTTLCDPGSPAQRQSPQAGQNPSCPAHRRSATGVGD

SEQ ID NO: 52156 - protein, 104 aa, Homo sapiens
MRKFIFVLLTLLLVSPFSFAMKGIIWQPQNRDSQVTDTQWQGLMSQLRLQGFDTLVLQWTRYGDAFTQPEQRTLLFKRAAHAQQVGLKLVVGINADLRVRSLNS

SEQ ID NO: 52157 - protein, 69 aa, Homo sapiens
TICLSMSARAKPSGSIFATPTVLSARRFQAISPRRTAIRGWQPILSKRTSTAPQARASACGTRAAWNCT

SEQ ID NO: 52158 - protein, 112 aa, Homo sapiens
  misc_feature (1)...(112): Xaa = X or * as defined in Table 2
IGIAKHAQQLLLNVMQTRAVGAEVQTVSATGSAVRQALANNLQPFAIFFQINAWXXRAGRYPDDHGISPETALYGWHTSATGTAGMRXSVRPWLQSGQGCSGWRRQQPRWSP

SEQ ID NO: 52159 - protein, 258 aa, Homo sapiens
MQHLSHSSGGTDPSFGKVSGRSMSRKGFSPARRWELGALPHVKVIILAGIFIGVLYSVSSVLINVFVSSKELKFTGGSVQVFHGMAAYFGLPEALMNRFVGLVSFTAMFGSLLMWTATPVKIFFSEIPEGIFGKKTVELNENGVPARAAWIQFLIVIPLMIIPMLGSNTVQDLMNTIINMTAAATLIRIFALHELHRLKEHGLTRGALLDYHSRYKLVFLAHSQPEYRKLGPFVADIHQWQNLDDYYNQYRQRVVVLL

SEQ ID NO: 52160 - protein, 304 aa, Homo sapiens
  misc_feature (1)...(304): Xaa = X or * as defined in Table 2
RHIRTPAHLERFIVDIALNVADGHRAKLIVQSAGTFAQTVLRADSSANFRQGVGLVRQFRRFKNTPLVGELQPVRDVVVYRAFPLAVWVAARQAAVSLRFGLAFGKRLVNFNKLNFADLQRFLWRINAAQLSCATTTADPAVLLHHWTSVXPAQIXWRSXPVRQNLFTALRAGMLHMLGDKTTQMLFMDRQSVNAXDLDQFRVNAFAEIAAFIENVSETAGHARTEVNAGFTQNADDTTRHIFTTVVANAFYHGDSTGVTHAETFTRAACGIQTTTGRAIQAGVADNACFMAAEGGTNRRTNGD

SEQ ID NO: 52161 - protein, 55 aa, Homo sapiens
  misc_feature (1)...(55): Xaa = X or * as defined in Table 2
PGPAGAQSAALYRWSPGQAVSRADWFRFADCXIYPENRRNAGSAYRPRLSPAYCG

SEQ ID NO: 52162 - protein, 101 aa, Homo sapiens
  misc_feature (1)...(101): Xaa = X or * as defined in Table 2
TPDTAPAGCRSRAPDGPSLPRQMPRRRGXFHTARYCRTPRAITAXRXTEXSTCPARTGEWYAHARYAPGTSRQTATMPPTMPRRRASSYSSTQPDGRRQNC

SEQ ID NO: 52163 - protein, 47 aa, Homo sapiens
TSARISRAPLFSSSSASEIPICSASCGAPPASPGIILRTVRRADQRT

SEQ ID NO: 52164 - protein, 104 aa, Homo sapiens
  misc_feature (1)...(104): Xaa = X or * as defined in Table 2
TNSSNQQLAEGNRERLIGRNTAGPERITAGRRXLFSCQNRPCGWRFNKCHIGMPVVVIWRIIVMGIQHDDLVNPFGMRVNRVNMQFAKTLGQRALLLRRNSLIA

SEQ ID NO: 52165 - protein, 234 aa, Homo sapiens
  misc_feature (1)...(234): Xaa = X or * as defined in Table 2
AGAHSGPSHPALATTAARQSVAGNRSGISGFSGHSRNPTRMSARCLXSSALERLMRRLNGGEIQISDVTTTTPSLSPQVYCSAMSRNLCTRATPRWQSAGHPYCRWTASYCAIYSDRSIRGNYSTRQSFASGRRVPTGSWQKTESEKDCSTCCANWANDRTPLPTSTSSANCSTNVQTSVVPVLRRWIWLTSLRVVLTVSLKSVCARGTSPQASCWFVKRAASSATSPVVITTC

SEQ ID NO: 52166 - protein, 97 aa, Homo sapiens
  misc_feature (1)...(97): Xaa = X or * as defined in Table 2
TRYPDDHGISPETALYGWHTSATGTAGMRXSVRPWLQSGQGCSGWRRQQPRWSPXXRSCXXCSVYPATLXFCRLYNQTSGPGHSDLPAFPDSDRRKI

SEQ ID NO: 52167 - protein, 1213 aa, Homo sapiens
  DOMAIN (887)..(905): P450 SUPERFAMILY SIGNATURE domain identified by eMATRIX, accession number PR00385A, p-value=9.455e-10, raw score of 14.97
  DOMAIN (1038)..(1212): Domain of unknown function DUF14 domain identified by PFam, accession name DUF14, E-value=1.3e-76, PFam score of 267.9
  misc_feature (1)...(1213): Xaa = X or * as defined in Table 2
PKKDLKIATSAMMEAAYSVXSRTLFWSPVRDSQVTDTQWQGLMSQLRLQGFDTLVLQWTRYGDAFTQPEQRTLLFKRAAAAQQAGLKLIVGLNADPEFFMHQKQSSAALESYLNRLLAADLQQARLWSAAPGITPDGWYISAEIDDLNWRSEAARQPLLTWLNNAQRLISDVSAKPVYISSFFAGNMSPDGYRQLLEHVKATGVNVWVQDGSGVDKLTAEQRERYLQASADCHDGAAPHGKVFKLIIAXRARRRRDKPALQTSTVLSRKFDGFRRPGIGTHGFNNARVTSNDVTGQHVVMTTGEVADDAARFTNQQLACGEVPRAQTDFKETVNTTRSDVSQIQRRRTGTTEVCTFVEQFADDVDNAFSELIPSAIPDINTSQSLASSTENLIEDEPQLITKTTGNSFISFLILSYGLKQFVYDVQDGQQTNHGNKHVIQTTTVFRQRRRFTDGIHRQQAQQGCDNRCAHGFNQVKDVRVGVGNNPGGAHDEDHADSVQFTQRHFSFVAFITKLQDQAIQTFQRSQIVTEERFEDSHECDDGSRIFSVIANVVLVPVRDSQVTDTQWQGLMSQLRLQGFDTLVLQWTRYGDAFTQPEQRTLLFKRAAAAQQAGLKLIVGLNADPEFFMHQKQSSAALESYLNRLLAADLQQARLWSAAPGITPDGWYISAEIDDLNWRSEAARQPLLTWLNNAQRLISDVSAKPVYISSFFAGNMSPDGYRQLLEHVKATGVNVWVQDGSGVDKLTAEQRERYLQASADCHDGAAPHGKAVQTDYRLTGASGRHPKFVRRYTAPAGSAATSVDQPTPRPIRNPVRISGSAPGKMTNHSTCARLAPSDWAARMRTCCTLFTPASADIATALPVDQQVAVIVDPEKTQSAENARPPAPVCAGVETTSAMVSFAIAFALTVALSATAETRHRQQNHHRFDDHLTRTAQNHRSNSIQLIASPRRGLCGGETRHFNDPGQRCQQTTKRIDDDFDFIDVDTRKTRCRFVAAQRVDVTPQTRVMQHVPGREEDNPHDPDWRRYAQRTTNTKPAKQIGVLSKAGYIAQTHGDQGLAADPIKAYFNGTAGQSFGVWNAGGVELYLTGDANDYVGKGMAGGLIAIRPPVGSAFRSHEASIIGNTCLYGATGGRLYAAGRAGERFGVRNSGAITVVEGIGDNGCEYMTGGIVCILGKTGVNFGAGMTGGFAYVLDESGDFRKRVKTGTGRSLKR

SEQ ID NO: 52168 - protein, 207 aa, Homo sapiens
  DOMAIN (151)..(180): kw REPLICATION REPB REPA INITIATION domain identified by eMATRIX, accession number DM00653A, p-value=1.652e-11, raw score of 20.40
  misc_feature (1)...(207): Xaa = X or * as defined in Table 2
VNVSKSDDTLKINGVEDHKTIFDGDGKTYQNVQQFIDEGNYTSGDNHTLRDPHYVEDKGHKYLVFEANTGTENGYQGEESLFNKAYYGGGTNFFRKESQKLQQSAKKRDAELANGALGIIELNNDYTLKKVMKPLITSNTVTDEIERANVFKMNGKXRINTKEITNPYAMRLYESLCQYRKPDGSGIVSLKIDWIIERYQLPQSNQX

SEQ ID NO: 52169 - protein, 747 aa, Homo sapiens
  DOMAIN (144)..(173): kw REPLICATION REPB REPA INITIATION domain identified by eMATRIX, accession number DM00653A, p-value=7.207e-27, raw score of 20.40
  DOMAIN (309)..(423): ParA family ATPase domain identified by PFam, accession name ParA, E-value=2.7e-28, PFam score of 107.5
MAETAVINHKKRKNSPRIVQSNDLTEAAYSLSRDQKRMLYLFVDQIRKSDGTLQEHDGICEIHVAKYAEIFGLTSAEASKDIRQALKSFAGKEVVFYRPEEDAGDEKGYESFPWFIKRAHSPSRGLYSVHINPYLIPFFIGLQNRFTQFRLSETKEITNPYAMRLYESLCQYRKPDGSGIVSLKIDWIIERYQLPQSYQRMPDFRRRFLQVCVNEINSRTPMRLSYIEKKKGRQTTHIDLALKGLRVLLVEGNDPQGTASMYHGWVPDLHIHAEDTLLPFYLGEKDDVTYAIKPTCWPGLDIIPSCLALHRIETELMGKFDEGKLPTDPHLMLRLAIETVAHDYDVIVIDSAPNLGIGTINVVCAADVLIVPTPAELFDYTSALQFFDMLRDLLKNVDLKGFEPDVRILLTKYSNSNGSQSPWMEEQIRDAWGSMVLKNVVRETDEVGKAAPMVDSLIARVGVMARGNAITLPVCGRDVKFTLEVLRGDSVEKTSRVWSGNERDQELLTEDALDDLIPSFLLTGQQTPAFGRRVSGVIEIADGSRRRKAAALTESDYRVLVGELDDEQMAALSRLGNDYRPTSAYERGQRYASRLQNEFAGNISALADAENISRKIITRCINTAKLPKSVVALFSHPGELSARSGDALQKAFTDKEELLKQQASNLHEQKKAGVIFEAEEVITLLTSVLKTSSASRTSLSSRHQFAPGATVLYKGDKMVLNLDRSRVPTECIEKIEAILKELEKPAP

SEQ ID NO: 52170 - protein, 96 aa, Homo sapiens
  misc_feature (1)...(96): Xaa = X or * as defined in Table 2
NKRIFPSDVKVAEPDHSCVXSFRIGSLASNLSLSLKTRPAFFQLLIKHVDSMCHQRLSGSRKSKHNVIAVVFSYCSVSVFSASCPTHQVLLQTQYF

SEQ ID NO: 52171 - protein, 1320 aa, Homo sapiens
  DOMAIN (877)..(900): HIGH MOBILITY GROUP (HMG1/HMG2) PROTEIN SIGNATURE domain identified by eMATRIX, accession number PR00886A, p-value=2.703e- 11, raw score of 10.08
  DOMAIN (368)..(470): Bacterial regulatory proteins, merR family domain identified by PFam, accession name merR, E-value=6e-05, PFam score of 29.6
YSIATVLAAEEKLDPRRDEAKRLRPQRNFNITFTHGTVFRPLTLESTFFNSALLFTTIKQDLPPLPKTIITNAFHRFRNHHQTGFKLSAANQRGPLAATLSGPGGEGQSAVARLTGEKKNHPGAQYANRLSPRVGRFINAAGTTGFPTGKRARSDSSLAKENNQKAYKETYGVSHITRHDMLQIPKQQQNEKYQVPQFDQSTIKNIESAKGLDVWDSWPLQNADGTVAEYNGYHVVFALAGSPKDADDTSIYMFYQKVGDNSIDSWKNAGRVFKDSDKFDANDPILKDQTQEWSGSATFTSDGKIRLFYTDYSGKHYGKQSLTTAQVHNKPSEDLQTCSLNLGHILPIIKFNDDSPEARKITRRWRIGEAADLVGVSSQAIRDAEKAGRLPHPDMEIRGRVEQRVGYTIEQINHMRDVFGTRLRRAEDVFPPFNDDSPEARKITRRWRIGEAADLVGVSSQAIRDAEKAGRSTATRILEIRGRVEQRVGYTIEQINHMRDVFGTRLRRAEDVFPPVIGVAAHKELNNDYTSKKVMKPLITSNTVTDEIERANVLKMNGKWYLFTDSRGSKMTIDGINSNDIYMLGYVSNSLTGPYKPLNKTGLVLQMALDPNDVTFTYSHFAVPQTKGNNVVITSYMTNRGFFEDKKATFAPSFLMNIKGNKTSVVKNSILEQGQLTWLQVAKRAGLGGGQSGRTVLRERVRIEIASTHIALAARHSDWRCCRNGRYPARGPAVACQFPEKNDFRFSGFLSTKSDCHIVGPQPIFAEHNQAEGCRLEHFCSTPTLVSMLNFLGRRTKKPGTSSENKKLLHYGALAKLQPYFGAGRRDHQKGGRGSVNMGKGDPNKPRGKMSSYAFFVQTCREEHKKKHPDSSVNFAEFSKKCSERWKVLEKSKSQMSVDNFSLVGRLLCNPRSRYGQRALGMPVGPGGEGQSAVARLTGEKKNHPGAQYANRLSPRVGRFINAAGTTGFPTGKAGSERNAINGQGGERAIKSFARFIGEKEKPPWRPNTQTASPRALADSINSAGTTGFPTGNRSVSPTQLMFVWNWGADNQFHTGIGYDHVYEFRARYPFLFGLRQGFCRFRNHHQTGFSPAGANQRGPLAATLSGPGGEGQSAVARLTGEKKNHPGAQYANRLSPRVGRFINAAGTTGFPTGKRAVSATQLMDFADFGTTIKQDFRLLGQTSVDRLLQLSQGQAVKGNQLLPVSLVKRKTTLAPNTQTASPRALADSLMQLARQVSRLESGQRRDLVPPGAKHQLGQQNKGASIPEELPGCKKTTLGPQCDGPLCFVSRSQRRRKREDCAGETQAAGGSSRVDLQACK

SEQ ID NO: 52172 - protein, 427 aa, Homo sapiens
  DOMAIN (138)..(167): kw REPLICATION REPB REPA INITIATION domain identified by eMATRIX, accession number DM00653A, p-value=7.207e-27, raw score of 20.40
  DOMAIN (122)..(164): Initiator RepB protein domain identified by PFam, accession name RepB_protein, E-value=0.0091, PFam score of 12.3
MAETAVINHKKRKNSPRIVQSNDLTEAAYSLSRDQKRMLYLFVDQIRKSDGTLQEHDGICEIHVAKYAEIFGLTSAEPALKSFAGKEVVFYRPEEDAGDEKGYESFPWFIKRAHSPSRGLYSVHINPYLIPFFIGLQNRFTQFRLSETKEITNPYAMRLYESLCQYQTYGVSQIYKNDILQIPKQQQNEKYQVPQFDQSTIKNIESAKGLDVWDSWPLQNADGTVAEYNGYHVVFALAGSPKDADDTSIYMFYQKVGDNSIDSWKNAGRVFKDSDKFDANDPILKDQTQEWSGSATFTSDGKIRLFYTDYSGKHYGKQSLTTAQVNVSKSDDTLKINGVEDHKTIFDGDGKTYQNVQQFIDEGNYTSGDNHTLRDPHYVEDKGHKYLVFEANTGTENGYQGEESLFNKAYYGGGTNFFRKESQKLQQ

SEQ ID NO: 52173 - protein, 497 aa, Homo sapiens; identical to SEQ ID NO: 43796
  DOMAIN (79)..(121): Chloramphenicol acetyltransferase proteins domain identified by eMATRIX, accession number BL00100C, p-value=1.000e-39, raw score of 23.60
  DOMAIN (6)..(209): Chloramphenicol acetyltransferase domain identified by PFam, accession name CAT, E-value=7.3e-153, PFam score of 521.2

SEQ ID NO: 52174 - protein, 418 aa, Homo sapiens
MNMNIKKIVKQATVLTFTTALLAGGATQAFAKENNQKAYKETYGVSHITRHDMLQIPKQQQNEKYQVPQFDQSTIKNIESAKGLDVWDSWPLQNADGTVAEYNGYHVVFALAGSPKDADDTSIYMFYQKVGDNSIDSWKNAGRVFKDSDKFDANDPILKDQTQEWSGSATFTSDGKIRLFYTDYSGKHYGKQSLTTAQVNVSKSDDTLKINGVKRILLRRIFYLTKQYYGGGTNFFRKESQKLQQSAKKRDAELANGALGIIELNNDYTLKKVMKPLITSNTVTDEIERANVFKMNGKWYLFTDSRGSKMTIDGINSNDIYMLGYVSNSLTGPYKPLNKTGLVLQMGLDPNDVTFTYSHFAVPQAKGNNVVITSYMTNRGFFEDKKATFAPSFLMNIKGNKTSVVKNSILEQGQLTVN

SEQ ID NO: 52175 - protein, 241 aa, Homo sapiens
MNMNIKKIVKQATVLTFTTALLAGGATQAFAKENNQKAYKETYGVSHITRHDMLQIPKQQQNEKYQVPQFDQSTIKNIESAKGLDVWDSWPLQNADGTVAEYNGYHVVFALAGSPKDADDTSIYMFYQKFFDIFRDLFKNVDLKGFEPDVRILLTKYSNSNGSQSPWMEEQIRDAWGSMVLKNVVRETDEVGKGQIRMRTVFEQAIDQRSSTGAWRNALSIWEPVCNEIFDRLIKPRWEIR

SEQ ID NO: 52176 - protein, 46 aa, Homo sapiens
  misc_feature (1)...(46): Xaa = X or * as defined in Table 2
NKRIFPSDVKVAEPDHSCVXSFRIGSLASNLSLSLKTRPGFFPTVN

SEQ ID NO: 52177 - protein, 397 aa, Homo sapiens
  DOMAIN (244)..(287): 1 kw MIND INHIBITOR DIVISION CONTROL domain identified by eMATRIX, accession number DM01756B, p-value=4.822e-15, raw score of 22.91
  DOMAIN (211)..(323): ParA family ATPase domain identified by PFam, accession name ParA, E-value=3.5e-18, PFam score of 73.8
MQEISSLGKYFIKCANRRLDVWDSWPLQNADGTVAEYNGYHVVFALAGSPKDADDTSIYMFYQKIRKSDGTLQEHDGICEIHVAKYAEIFGLTFAEAMLIERGQRYASRLQNEFAGNISALADAENISRKIITRCINTAKLPKSVVALFSHPGELSARSGTVTAANASTLNDGAAAPVGKPVVPAALMNRPTARERRFAYWAPGWFFFSPVRPATADCPSPPGPERVEASGPPWSPIETVAHDYDVIVIDSAPNLGIGTINVVCAADVLIVPTPAELFDYTSALQFFDMLRDLLKNVDLKGFEPDVRILLTKYSNSNGSQSPWMEEQIRDAWGSMVLKNVVRETDEVGKGQIRMKTCFEQAIDQRSSTGAWRNAFSIWEPVCNENFDRLNKPRWEIR

SEQ ID NO: 52178 - protein, 72 aa, Homo sapiens
RFFALVSVFCSRVGFEYKVFMGFVFNVVRVSQRMVVAGCIIAFIDKLLNVLICFFVSVKNRFVIFHSPLVLH

SEQ ID NO: 52179 - protein, 475 aa, Homo sapiens
  DOMAIN (372)..(401): kw REPLICATION REPB REPA INITIATION domain identified by eMATRIX, accession number DM00653A, p-value=7.207e-27, raw score of 20.40
  DOMAIN (6)..(79): Chloramphenicol acetyltransferase domain identified by PFam, accession name CAT, E-value=2.4e-38, PFam score of 140.8
MEKKITGYTTVDISQWHRKEHFEAFQSVAQCTYNQTVQLDIKKKLKTVKKNKHKFYPAFIHILARLMNAHPEFRMAMKDVAEYNGYHVVFALAGSPKDADDTSIYMFYQKVGDNSIDSWKNAGRVFKDSDKFDANDPILKDQTQEWSGSATFTSDGKIRLFYTDYSGKHYGKQSLTTAQVNVSKSDDTLKINGVEDHKTIFDGDGKTYQNVQQFIDEGNYTSGDNHTLRDPHYVEDKGHKYLVFEANTGTENGYQGEESLFNKAYYGGGTASSIRKSDGTLQEHDGICEIHVAKYAEIFGLTSAEASKDIRQALKSFAGKEVVFYRPEEDAGDEKGYESFPWFIKRAHSPSRGLYSVHINPYLIPFFIGLQNRFTQFRLSETKEITNPYAMRLYESLCQYRKPHGSGIVSLKIEWIIERYQLPQSYQRMPDFRRRFLQTAKGRHLIWSFDHLVDRGHKNGTKEVVEYLLVWERTL

SEQ ID NO: 52180 - protein, 928 aa, Homo sapiens
  DOMAIN (821)..(850): kw REPLICATION REPB REPA INITIATION domain identified by eMATRIX, accession number DM00653A, p-value=7.207e-27, raw score of 20.40
  DOMAIN (457)..(663): DNA gyrase/topoisomerase IV, subunit A domain identified by PFam, accession name DNA_topoisoIV, E-value=3.8e-56, PFam score of 179.6
MNMNIKKIVKQATVLTFTTALLAGGATQAFAKENNQKAYKETYGVSHITRHDMLQIPKQQQNEKYQVPQFDQSTIKNIESAKGLDVWDKWPLANADGTVAEYNGYNVVDKFDANDPILKDQTQEWSGSATFTCDGKIRLFYTDYSGKHYGKQSLTTAQVNVLKSDDTLKINGVEDHKAIFDGDGKTYQNVQQLIDEGNYTSGDNHTLRDPHYVEDKGHKYLVFEANTGTENGYQGEESLFNKAYYGGGTNFFRKESQKLQQSAKKRDAELANGALGIIELNNDYTLKKVMKPLITSNTVTDEIERANVFKMNGKWYLFTDSRGSKMTIDGINSNDIYMLGYVSNSLTGPYKPLNKTGLVLQMGLDPNDVTFTYSHFAVPQAKGNNVVITSYMTNRGFFEDKKATFAPSFLMNIKGNKTSVVKNSILEQGQLTWLQVAKRAGLGGGQSGRTVLRERLPNYKNFKGTIQELGQNQYAVSGEIFVVDRNTVEITELPVRTWTQVYKEQVLEPMLNGTDKTPALISDYKEYHTDTTVKFVVKMTEEKLAQAEAAGLHKVFKLQTTLTCNSMVLFDHMGCLKKYETVQDILKEFFDLRLSYYGLRKEWLVGMLGAESTKLNNQARFILEKIQGKITIENRSKKDLIQMLVQRGYESDPVKAWKEAQEKCDNLKTCHTSHGSVMAETAVINHKKRKNSPRIVQSNDLTEAAYSLSRDQKRMLYLFVDQIRKSDGTLQEHDGICEIHVAKYAEIFGLTSAEASKDIRQALKSFAGKEVVFYRPEEDAGDEKGYESFPWFIKRAHSPSRGLYSVHINPYLIPFFIGLQNRFTQFRLSETKEITNPYAMRLYESLCQYRKPDGSGIVSLKIDWIIERYQLPQSYQRMPDFRRRFLQVCVNEINSRTPMRLSYIEKKKGRQTTHIVFSFRDITSMTTG

SEQ ID NO: 52181 - protein, 264 aa, Homo sapiens
  DOMAIN (157)..(186): kw REPLICATION REPB REPA INITIATION domain identified by eMATRIX, accession number DM00653A, p-value=7.207e-27, raw score of 20.40
  DOMAIN (141)..(253): Initiator RepB protein domain identified by PFam, accession name RepB_protein, E-value=1.1e-07, PFam score of 29.7
DNLKTCHTSHGSVMAETAVINHKKRKNSPRIVQSNDLTEAAYSLSRDQKRMLYLFVDQIRKSDGTLQEHDGICEIHVAKYAEIFGLTSAEASKDIRQALKSFAGKEVVFYRPEEDAGDEKGYESFPWFIKRAHSPSRGLYSVHINPYLIPFFIGLQNRFTQFRLSETKEITNPYAMRLYESLCQYRKPDGSGIVSLKIEWIIERYQLPQSYQRMPDFRRRFLQVCVNEINSRTPMRLSYIEKKKGRQTTHIVFSFRDITSMTTG

SEQ ID NO: 52182 - protein, 1095 aa, Homo sapiens; identical to SEQ ID NO: 51961
  DOMAIN (242)..(282): Chloramphenicol acetyltransferase proteins domain identified by eMATRIX, accession number BL00100B, p-value=4.333e-30, raw score of 25.01
  DOMAIN (223)..(320): Chloramphenicol acetyltransferase domain identified by PFam, accession name CAT, E-value=1e-40, PFam score of 148.7

SEQ ID NO: 52183 - protein, 595 aa, Homo sapiens; identical to SEQ ID NO: 35573
  DOMAIN (232)..(261): kw REPLICATION REPB REPA INITIATION domain identified by eMATRIX, accession number DM00653A, p-value=7.207e-27, raw score of 20.40
  DOMAIN (410)..(535): ParA family ATPase domain identified by PFam, accession name ParA, E-value=1.7e-22, PFam score of 88.2

SEQ ID NO: 52184 - protein, 80 aa, Homo sapiens
  misc_feature (1)...(80): Xaa = X or * as defined in Table 2
TDFSVRCKGCRTGPFLRLIFQDRIVGVELIAVFXNTGPRFSSCRLSWRRPFDKTCRMRWHQRLSGFPQEQNDGKQQPILC

SEQ ID NO: 52185 - protein, 296 aa, Homo sapiens
  DOMAIN (111)..(140): kw REPLICATION REPB REPA INITIATION domain identified by eMATRIX, accession number DM00653A, p-value=7.207e-27, raw score of 20.40
  DOMAIN (95)..(144): Initiator RepB protein domain identified by PFam, accession name RepB_protein, E-value=0.002, PFam score of 14.6
ALQNFQRYTGIQHVHRIGMAERMWCDRNRERHTVSSSGGNRLPNPGKDIGQALKSFAGKKVVFYRPEEDAGDEKGYESFPWFIKRAHSPSRGLYSVHINPYLIPFFIGLQNRFTQFRLSETKEITNPYAMRLYESLCQYQNGYQGEESLFNKAYYGGGTNFFRKESQKLQQSAKKRDAELANGALGIIELNNDYTLKKVMKPLITSNTVTDEIERANVFKMNGKWYLFTDSRGSKMTIDVPQAKGNNVVITSYMTNRGFFEDKKATFAPSFLMNIKGNKTSVVKNSILEQGQLTVN

SEQ ID NO: 52186 - protein, 51 aa, Homo sapiens
  misc_feature (1)...(51): Xaa = X or * as defined in Table 2
RKNPFILHXLFRXTLRQTKPDDSAGKGVKIXXHTQNQRSGRSQNDFXRRLW

SEQ ID NO: 52187 - protein, 597 aa, Homo sapiens
  DOMAIN (158)..(204): kw TRANSCRIPTASE REVERSE II ORF2 domain identified by eMATRIX, accession number DM01354O, p-value=1.000e-40, raw score of 8.73
  DOMAIN (191)..(411): Reverse transcriptase domain identified by PFam, accession name rvt, E-value=1.7e-14, PFam score of 61.6
MIAYRIVVQGAKRAGLGGGQSGRTVLRERHAIVTGDAVGMDDIRQEARQYRHNQAYAYSIQGDGAEDDDERIVRFHTRVTVDTDTLASDAARLTCRHGLGNQVFCPHNRAQNVGISRTQQQSTAGIQPHTEVSPFTRCPSMHSLLDIWVKIVAIINSLPTKKSPGPDGFTAEFTRRYKEELRPFLLKLFQSIEKEGILPNSFYEASIILIPKPGRDTTKKENFRPISLMNIDAKILNKILAKRIQQHIKKLIHHDQVGFIPGMQGWFNIRKSINVIQHINRAKDKNHMIISIDAEKAFDKIQQPFMLKTLKKLGIDDRSMRQKIIKDIQDLNSALDQADLIDIYRTRHPTGGGSLQKVEILNQQRNEKYQVPQFDQSTIKNIESAKGLDVWDSWPLQNADGTVAEYNGYHVVFALAGSPKDADDTSIYMFYQKVGDNSIDSWKNAGRVFKDSDKFDANDPILKDQTQEWSGSATFTSDGKIRLFYTDYSGKHYGKQSLTTAQVNVSKSDDTLKINGVEDHKTIFDGDGKTYQNVQQFIDEGNYTSGDNHTLRDPHYVEDKGHKGKLFSLIRSHLSILASVAIAFGVLDMKYLPMPMS

SEQ ID NO: 52188 - protein, 359 aa, Homo sapiens
  misc_feature (1)...(359): Xaa = X or * as defined in Table 2
PNPRGLLNTITPEHFKSKLHIPTTYRQSNGITASHYSYARNXRVGVMARGNAITLPVCGRDVKFTLEVLRGDSVEKTSRVWSGLLELLKAAASLVFLEQHKPYEEIGTSFGSVLVSVVGEGPFVEEDLRKSFPGRWDKKHKMFDAIEEPKKDSDKFDANDPILKDQTQEWSGSATFTSDGKIRLFYTDYSGKHYGKQSLTTAQVNVSKSDDTLKINGVEDHKTIFDGDGKTYQNVQQFIDEGNYTSGDNHTLRDPHYVEDKGHKYLVFEANTGTENGYQGEESLFNKAYYGGGTNFFRKESQKLQQSAKKRDAELANGALGIIELKYDYTLKKVMKAADHFQTPVTDEIERANVFKMNG

SEQ ID NO: 52189 - protein, 51 aa, Homo sapiens
  misc_feature (1)...(51): Xaa = X or * as defined in Table 2
NKRIFPSHVKVAEPDHSCVXSFRIGSLASNLSLSLKTRPAFFQLSIELSPT

SEQ ID NO: 52190 - protein, 479 aa, Homo sapiens
  DOMAIN (144)..(173): kw REPLICATION REPB REPA INITIATION domain identified by eMATRIX, accession number DM00653A, p-value=7.207e-27, raw score of 20.40
  DOMAIN (128)..(170): Initiator RepB protein domain identified by PFam, accession name RepB_protein, E-value=0.0091, PFam score of 12.3
MAETAVINHKKRKNSPRIVQSNDLTEAAYSLSRDQKRMLYLFVDQIRKSDGTLQEHDGICEIHVAKYAEIFGLTSAEASKDIRQALKSFAGKEVVFYRPEEDAGDEKGYESFPWFIKRAHSPSRGLYSVHINPYLIPFFIGLQNRFTQFRLSETKEITNPYAMRLYESLCQYRKPDGSGIVSLKIDWIIERYQLPQSYQRVWTPGINCPEPCPGVWTPGINCPGAWGIHGPHGSAENTGPLHPGQTSAQLETSLLPSLRSARELELAQLSPRRKQNRSLQNIGVTPSLRVPWPKASNVQQFIDEGNYTSGDNHTLRDPHYVEDKGHKYLVFEANTGTENGYQGEESLFNKAYYGGGTNFFRKESQKLQQSAKKRDAELANGALGIIELNNDYTLKKVMKPLITSNTVTDEIERANVFKMNGKWYLFTDSRGSKMTIDVPQAKSNNVGITSYMTNRSFFEDKKPHLRQASYGTSKPLKLP

SEQ ID NO: 52191 - protein, 546 aa, Homo sapiens
GQVLRRQHSKLVGTKALSTTGKALRTLPTAKVFISLPPNLDFKVAPSILKPRKSIREDRNGRSQKTVHTEGDMNMNIKKIVKQATVLTFTTALLAGGATQAFAKENNQKAYKETYGVSHITRHDMLQIPKQQQNEKYQVPQFDQSTIKNIESAKGLDVWDSWPLQNADGTVAEYNGYHVVFALAGSPKDADDTSIYMFYQKVGDNSIDSWKNAGRVFKDSDKFDANDPILKDQTQEWSGSATFTSDGKIRLFYTDYSGKHYGKQSLTTAQVNVSKSDDTLKINRVEDHKTIFDGDGKTYQNVQQFIDEGNYTSGDNHTLRDPHYVEDKGHKYLVFEANTGTENGYQGEESLFNKAYYGGGTNFFRKESQKLQQSAKKRDAELANGALGIIELNNDYTLKKVMKPLITSNTVTDEIERANVFKMNGKWYLFTDSRGSKMTIDGINSNDIYMLGYVSNSLTGPYKPLNKTGLVLQMGLDPNDVTFTYSHFAVPQAKGNNVVITSYMTNRGFFEDKKATFAPSFLMNIKGNKTSVVKNSILEPGQLAVN

SEQ ID NO: 52192 - protein, 343 aa, Homo sapiens
MTHNQGKNQSIEIYPKMTLMIELADKDIKILIIIILHMFKKVQRSMDIMQEKSSTMPESTCISGKKVVYAQGLQGWKWHPMRGLCRWSCEGVDLILTGLLRLCVAVVCDNSIDSWKNAGRVFKDCFKFDANDPILKDQTQEWSGSATFTSDGKIRLFYTDYSGKHYGKQSLTTAQVNVSKSDDTLKINGVEDHKTIFDGDGKTYQNVQQFIDEGNYTSGDNHTLRDPHYVEDKGHKYLVFEANTGTENGYQGEESLFNKAYYGGGTNFFRKESQKLQQSAKKRDAELANGALGIIELNNDYTLKKVMKPLITLNTVTDEIDRANVFKMNSKWYLFIEDPHSPM

SEQ ID NO: 52193 - protein, 657 aa, Homo sapiens; identical to SEQ ID NO: 51971

SEQ ID NO: 52194 - protein, 107 aa, Homo sapiens
  misc_feature (1)...(107): Xaa = X or * as defined in Table 2
SVYNKRIFPSDVKVAEPDHSCVXSFRIGSLASNLSLSLKTRPAFFQLSIEFRRPFDKTCRLMCHQRLSGFPHEQTQRDSTCIQLLFRQRFAAASCPTHQVLLQTQYF

SEQ ID NO: 52195 - protein, 566 aa, Homo sapiens
  DOMAIN (440)..(451): RNase H domain identified by eMATRIX, accession number PF00075B, p-value=7.517e-12, raw score of 12.56
  DOMAIN (373)..(558): Reverse transcriptase domain identified by PFam, accession name rvt, E-value=2.4e-37, PFam score of 137.5
  misc_feature (1)...(566): Xaa = X or * as defined in Table 2
MNIKKIVKQATVLTFTTALLAGGATQAFAKENNQKAYKETYGVSHITRHDMLQIPKQQQNEKYQVPQFDQSTIKNIESAKGLDVWDSWPLQNADGTVAEYNGYHVVFALAGSPKDADDTSIYMFYQKVGDNSIDSWKNAGRVFKDSDKFDANDPILKDQTQEWSGSATFTSDGKIRLFYTDYSGKHYGKQSLTTAQVNVSKSDDTLKINGVEDHKTIFDGDGKTYQNVQQFIDEGNYTSGDNHTLRDPHYVEDKGHKYLVFEANTGTENGYQGEESLFNKAYYGGGTNFFRKESQKLQQSAKKRDAELANGALGIIELNNDYTLKKVMKPLITSNTVTDEIERANVFKMNGKWQYPLRPKAQQGLQKIVKDLKAQGLVKSCNSPCNTPILGVQKPSRQWRLVQELRIINEAVVPLDPAVPNPHTLLSQIPEEAVWFTVLDLKDAFFSIPVHPDSQFLFAFEDPSNPTSQLTWTVLPQGFRDSPHLFGQALAQDLSQFSYLDTLVLRYMDDLLLAASSETLCHQATQALLNFLATCGYKVSKPNAQHCSQQVKYLGLKLSKGTKALX

SEQ ID NO: 52196 - protein, 46 aa, Homo sapiens
  misc_feature (1)...(46): Xaa = X or * as defined in Table 2
NKRIFPSDVKVAEPDHSCVXSFRIGSLAFNLSLALKTPARVFSTVD

SEQ ID NO: 52197 - protein, 73 aa, Homo sapiens
LMVSVFCSRVGFEYKVFMAFVFNVVRVSQRMVVAGCIIAFIDKLLNVLICFSVSVKNRFVIFHSVDFECVIRF

SEQ ID NO: 52198 - protein, 338 aa, Homo sapiens
EGSDSRAFAKENNQKAYKETYGVSHITRHDMLQIPKQQQNEKYQVPQFDQSTIKNIESAKGLDVWDSWPLQNADGTVAEYNGYHVVFALAGSPKDADDTSIYMFYQKVGDNSIDSWKNAGRVFKDSDKFDANDPILKDQTQEWSGSATFTSDGKIRLFYTDYSGKHYGKQSLTTAQVNVSKSDDTLKINGVEDHKTIFDGDRKTYQNGQQFIDEGNIPPATPYAERPYYFEDKGLKYLGKPTVEPSVCGGRLESPWQTAGVSPTVQKLKSLKFDVRGQEESVWEKDEAALANWTVPNHTCDNLKTCHTLHGSVMAETAVFNPKKLKNSPRIVQSNHLI

SEQ ID NO: 52199 - protein, 369 aa, Homo sapiens
MNIKKIVKQATVLTFTTALLAGGATQAFAKENNQKAYKETYGVSHITRHDMLQIPKQQQNEKYQVPQFDQSTIKNIESAKGLDVWDSWPLQNADGTVAEYTGYHVVFALAGSRKDADDTSIYMFYQKVGDNSIDSWKNAGRVFKDSDKFDANDPILKDQTQEWSGSATFTSDGKIRLFYTDYSGKHYGKQSLTTAQVNVSKSDDTLKINGVEDHKTIFDGDGKTYQNVQQFIDEGNYTSGDNHTLRDPHYVEDKGHKYLVFEAQHGEQKTDSQGEESLFNKASFLIVLLAYASGIIFTMVLDDLPNLEDIYTSLCSSTMEDSEMDFDSGLEDDDTKSDSILEDSTIFVAFKGNIDDKDFKWKLDAILKN

SEQ ID NO: 52200 - protein, 395 aa, Homo sapiens
MNMNIKKIVKQATVLTFTTALLAGGATQAFAKENNQKAYKETYGVSHITRHDMLQIPKQQQNEKYQVPQFDQSTIKNIESAKGLDVWDSWPLQNADGTVAEYNGYHVVFALAGSPKDADDTSIYMFYQKVGDNSIDSWKNAGRVFKDSDKFDANDPILKDQTQEWSGSATFTSDGKIRLFYTDYSGKHYGKQSLTTAQVNVSKSDDTLKINGVEDHKTIFDGDGKTYQNVQQFIDEGNYTSGDNHTLRDPHYVEDKGHKYLVFEANTGTENGYQGEESLFNKAYYGGGTNFFRKESQKLQQSAKKRDAELANGALGIIELNNDYTSEKSNEAADHFKHVPQAKGNNVVITSYMTNRGFFEDKKATFAPSFLMNIKGNKTSVVKNSILEQGQLTVN

SEQ ID NO: 52201 - protein, 472 aa, Homo sapiens
  misc_feature (1)...(472): Xaa = X or * as defined in Table 2
MLQIPKLQQNEKSQVPQFDQSTIKNIESAKGLDVWDSWPLQNADGTVAEYNGYHVVFALVLSPKDADDTSIYMFYQKVGDNSIDSWKNAGRVFKDSDKFDANDPILKDQTQEWSGSATFTSDGKIRLFYTDYSGKHYGKQSLTTAQVNVSKSDDTLKINGVEDHKTIFDGDGKTYQNVQQFIDEGNYTSGDNHTLRDPHYVEDKGHKYLVFEANTGTENGYQGEESLFTXRGHTLSTRGSLWENSKVGDNSIDSWKNAGRVFKDSDKFDANDPILKDQTQEWSGSATFTSDGKIRLFYTDYSGNITSIKPDNSAVEDHKTIFDGDGKTYQNVQQFIDEGNYTSGDNHTLRDPHYVEDKGHKYLVFEANTGTENGYQGEESLFNKAYYGGGTNFFRKESQKLQQSAKKRDAELANGALGIIELNNDYTLKKVMKPLITSNTVTDEIERANVFKMNGKWYLFTDSRGSKMTIDX

SEQ ID NO: 52202 - protein, 504 aa, Homo sapiens
MAKEPMAQQAKERTSGRANTCFVSRIQGRTHTQSQQGLEQEQEGLPELEPDCFCRITQCERNLMPCLEATQVAYEEANMTHDQHLVAMKEKPTMVGRVHLMCISVDTTDPTGPFIFRFPWRSTIATFQEGISSLKKMAGRNSERKTVLVKSSFQEVNRGTEALALWENGDFEAPVLTFTTALLPEGATQAFGKENTQKASKERYGSLNITRNNMLQILNKQQTEKYQVPQFDQSTIKNIESAKGLDVWDSWPLQNADGTVAEYNGYHVVFALAGSPKDADDTSIYMFYQKVGDNSIDSWKNAGRVFKDSDKFDANDPILKDQTQEWSGSATFTSDGKIRLFYTDYSGKHYGKQSLTTAQVNVSKSDDTLKINGVEDHKTIFDGDGKTYQNVQQFIDEGNYTSGDNHTLRDPHYVEDKGHKYLVFEANTGTENGYQGGVNADVGDVVVRLPVWHRRGGEAVFMQVSRLQILRHLPHGVVAVDRDHHIAHDRRRHVAGDRSGSVRL

SEQ ID NO: 52203 - protein, 49 aa, Homo sapiens
  misc_feature (1)...(49): Xaa = X or * as defined in Table 2
RKNPFILHXLFRXTLRQTKPDNSAGKCVKIXXHTQNQRSGRSQNDFXRR

SEQ ID NO: 52204 - protein, 451 aa, Homo sapiens
  DOMAIN (368)..(397): kw REPLICATION REPB REPA INITIATION domain identified by eMATRIX, accession number DM00653A, p-value=7.207e-27, raw score of 20.40
  DOMAIN (352)..(450): Initiator RepB protein domain identified by PFam, accession name RepB_protein, E-value=0.001, PFam score of 15.7
MNMNIKKIVKQATVLTFTTALLAGGATQAFAKENNQKAYKETYGVSHITRHDMLQIPKQQQNEKYQVPQFDQSTIKNIESAKGLDVWDSWPLQNADGTVAEYNGYHVVFALAGSPKDADDTSIYMFYQKVNVSKSDDTLKINGVEDHKTIFDGDGKTYQNVQQFIDEGNYTSGDNHTLRDPHYVEDKGHKYLVFEANTGTENGYQGEESLFNKAYYGGGTNFFRKESQKLQQSAKKRDAELANGALGIIELNNDYTLKKVMKPLITSNTIRKSDGTLQEHDGICEIHVAKYAEIFGLTSAEASKDIRQALKSFAGKEVVFYRPEEDAGDEKGYESFPWFIKRAHSPSRGLYSVHINPYLIPFFIGLQNRFTQFRLSETKEITNPYAMRLYESLCQYRKPDGSGIVSLKIDWIIERYQLPQSYQRMPDFRRRFLQVCVNEINSRTPMRLSYR

SEQ ID NO: 52205 - protein, 422 aa, Homo sapiens
  misc_feature (1)...(422): Xaa = X or * as defined in Table 2
MAAQDAMVTRTSSQTDCKEPGLKWAGVVLMLLLCWLMFQVLWEACQQKTGEHKTMLQMILCNKSYQQLRLVITPMYLMLGDWLSKNCGQNSTPSLGDNPPERQTQEWSGSATFTSDGKIRLFYTDYSGKHYGKQSLTTAQVNVSKSDDTLKINGVEDHKTIFDGDGKTYQNVQQFIDEGNYTSGDNHTLRDPHYVEDKGHKYLVFEANTGTENGYQGEESLFNKAYYGGGTNFFRKESQKLQQSAKKRDAELANGALGIIELNNDYTLKKVMKPLITSNTVTDEIERANVFKMNGKWYLFTDSRGSKMTIDDLHIHAEDTLLPFYLGEKDDVTYAIKPTCWPGLDIIPSCLALHRIETELMGKFDEGKLPTDPHLMLRLAIETVAHXPAEKXHQNHSSPFXPRFFAVSLRTGSSYHCILSSH

SEQ ID NO: 52206 - protein, 37 aa, Homo sapiens
  misc_feature (1)...(37): Xaa = X or * as defined in Table 2
NKRIFPSDVKVAEPDHSCVXSFRIGSLASNLSLLINM

SEQ ID NO: 52207 - protein, 472 aa, Homo sapiens
  DOMAIN (429)..(450): Myc-type 'helix-loop-helix' dimerization domain proteins. domain identified by eMATRIX, accession number BL00038B, p-value= 1.837e-09, raw score of 16.97
  DOMAIN (397)..(449): Helix-loop-helix DNA-binding domain identified by PFam, accession name HLH, E-value=2.3e-07, PFam score of 37.9
MNMNIKKIVKQATVLTFTTALLAGGATQAFAKENNQKAYKETYGVSHITRHDMLQIPKQQQNEKYQVPQFDQSTIKNIESAKGLDVWDSWPLQNADGTVAEYNGYHVVFALAGSPKDADDTSIYMFYQKVGDNSIDSWKNAGRVFKDSDKFDANDPILKDQTQEWSGSATFTSDGKIRLFYTGSLNSSKTEKYQVPHIDQSTIKNIESAKGLDVWDSWPLQNADGTVAEYNGYHVVFALAGSPKDADDTSIYMFYQKVGDNSIDSWKNAGRVFKDSDKFDANDPILKDQTQEWSGSATFTSDGKIRLFYTDYSGKHYGKQSLTTAQVNVSKSDDTLKINGVEDHKTIFDGDGKTYQNVQQFIDEGNYTSGDNHTLRDPHYVEDKGHKYLDSKPTREQKSTPNRKERPRTQSFTSAFAERRECIPNVPADTKLSKIKTLRLATSYIAYLMDLLAKDDQNGEAEAFKAEIKKTD

SEQ ID NO: 52208 - protein, 598 aa, Homo sapiens
  DOMAIN (60)..(89): kw REPLICATION REPB REPA INITIATION domain identified by eMATRIX, accession number DM00653A, p-value=7.207e-27, raw score of 20.40
  DOMAIN (343)..(429): ParB-like nuclease domain identified by PFam, accession name ParBc, E-value=0.0053, PFam score of 15.2
ALKSFAGKEVVFYRPEEDAGDEKGYESFPWFIKRAHSPSRGLYSVHINPYLIPFFIGLQNRFTQFRLSETKEITNPYAMRLYESLCQYQTYGVSQIYKNDILQIPKQQQNEKYQVPQFDQSTIKNIESAKGLDVWDSWPLQNADGTVAEYNGYHVVFALAGSPKDADDTSIYMFYQKVGDNSIDSWKNAGRVFKDSDKFDANDPILKDQTQEWSGSATFTSDGKIRLFYTDYSGKHYGKQSLTTAQVNVSKSDDTLKINGVEDHKTIFDGDGKTYQNVQQFIDEGNYTSGDNHTLRDPHYVEDKGHKYLVFEANTGTENGYQGEESLFNKAYYGGGTNFFRKESQKLQQSAKKRDAELGVYALAVSSVRGTELELGLTPAFGRRVSGVIEIADGSRRRKAAALTESDYRVLVGELDDEQMAALSRLGNDYRPTSAYERGQRYASRLQNEFAGNISALADAENISRKIITRCINTAKLPKSVVALFSHPGELSARSGDALQKAFTDKEELLKQQASNLHEQKKAGVIFEAEEVITLLTSVLKTSSASRTSLSSRHQFAPGATVLYKGDKMVLNLDRSRVPTECIEKIEAILKELEKPAP

SEQ ID NO: 52209 - protein, 391 aa, Homo sapiens
  misc_feature (1)...(391): Xaa = X or * as defined in Table 2
MPPLGQEGVFGYDSPESRATALPVAVHAASADNPGLLCNKNRFFWNVFPMAHPHGSTKAIPQRGTKETAMTSKANTTQNNTHKYHSWPLQNADGTVAEYNGYHVVFALAGSPKDADDTSIYMFYQKVGDNSIDSWKNAGRVFKDSDKFDANDPILKDQTQEWSGSATFTSDGKIRLFYTDYSGKHYGKQSLTTAQVNVSKSDDTLKINGVEDHKTIFDGDGKTYQNVQQFIDEGNYTSGDNHTLRDPHYVEDKGHKYLVFEANTGTENGYQGEESLFNKAYYGGGTNFFRKESQKLQQSAKKRDAELANGALGIIELNNDYTLKKVMKPLITSNTVTDEIERANVFKMNGKWHSKILVSGTHRARTEVEVTDPIHQQRMGCCFTVGAGEIX

SEQ ID NO: 52210 - protein, 47 aa, Homo sapiens
  misc_feature (1)...(47): Xaa = X or * as defined in Table 2
NKRIFPSDVKVAEPDHSCVXSFRIGSLASNLSLSLKTRPGGASRVPK

SEQ ID NO: 52211 - protein, 845 aa, Homo sapiens
  DOMAIN (493)..(535): Chloramphenicol acetyltransferase proteins domain identified by eMATRIX, accession number BL00100C, p-value=1.000e-39, raw score of 23.60
  DOMAIN (432)..(566): Chloramphenicol acetyltransferase domain identified by PFam, accession name CAT, E-value=2e-88, PFam score of 307.1
MNMNIKKIVKQATVLTFTTALLAGGATQAFAKENNQKAYKETYGVSHITRHDMLQIPKQQQNEKYQVPQFDQSTIKNIESAKGLDVWDSWPLQNADGTVAEYNGYHVVFALAGSPKDADDTSIYMFYQKVGDNSIDSWKNAGRVFKDSDKFDANDPILKESDADGYDFDTQYAFVGDYSGQITLLKLEQNTCSVITTLKGHEAQVNVSKSDDTLKINGVEDHKTIFDGDGKTYQNVQQFIDEGNYTCGDNHTLRDPHYVEDKGHKYLVFEANTGTENGYQGEESLFNKAYYGGGTNFFRKESQKLQQSAKKRDAELANGALGIIELNNDYTLKKVMKPLITSNTVTDEIERANVFKMNGKWYLFTDSRGSKMTIDGCQPTCSEALQNFQRYTGIQHVHRIGMAERMWCDRNRERHTVSSSGGTRLPNPGPARSEHFEAFQSVAQCTYNQTVQLDITAFLKTVKKNKHKFYPAFIHILARLMNAHPEFRMAMKDGELVIWDSVHPCYTVFHEQTETFSSLWSEYHDDFRQFLHIYSQDVACYGENLAYFPKGFIENMFFVSANPWSSLELAVIMGPILANKCDNLKTCHTSHGSVMAETAVINHKKRKNSPRIVQSNDLTEAAYSLSRDQKRMLYLFVDQIRKSDGTLQEHDGICEIHVAKYAEIFGLTSAEASKDIRQALKSFAGKEVVFYRPEEDAGDEKGYESFPWFIKRAHSPSRGLYSVHINPYLIPFFIGLQNRFTQFRLSETKEITNPYAMRLYESLCQYRKPDGSGIVSLKIDWIIERYQLPQSYQRMPDFRRRFLQVCVNEINSRTPMRLSYIEKKKGRQTTHIVFSFRDITSMTTG

SEQ ID NO: 52212 - protein, 51 aa, Homo sapiens
  misc_feature (1)...(51): Xaa = X or * as defined in Table 2
NKRIFPSDVKVAEPDHSCVXSFRIGSLASNLSLSLKTRPAFFQLSIELSAT

SEQ ID NO: 52213 - protein, 535 aa, Homo sapiens
MSGAWLPVRWSDEGYWAECLLSSIREGVCTGSHTSPETQAGAGQHHFESLAFTRLHPAQRPNSTCISIFPEPHNILLYLPVRTLSCRSVGVCLGISGGGCRTVNIAEQEMLLSDHSSGGFVSEGGVNVSVLLAFLVPLGYEIYQVPQFDQSTIKNIESAKGLDVWDSWPLQNADGTVAEYNGYHVVFALAGSPKDADDTSIYMFYQKVGDNSIDSWKNAGRVFKDSDKFDANDPILKDQTQEWSGSATFTSDGKIRLFYTDYSGKHYGKQSLTTAQVNVSKSDDTLKINGVEDHKTIFDGDGKTYQNVQQFIDEGNYTSGDNHTLRDPHYVEDKGHKYLVFEANTGTENGYQGEESLFNKAYYGGGTNFFRKESQKLQQSAKKRDAELANGALGIIELNNDYTLKKVMKPLITSNTVTDEIERANVFKMNGKWYLFTDSRGSKMTIDETVTTHPPGAQAQGDLNSVPETLAEVIGDPAGNPPPAEEGWVRVRPEEALWLQTATAVDLVCLDQLGSYFGASVCAVDLNADGFSDLL

SEQ ID NO: 52214 - protein, 621 aa, Homo sapiens
MAVLQGALARCLRRLELCLQGMPWRCLCRRRAQARLPAKGQCHIGTRCALRKDEEKQRKIGTGLFAHEQGCRWTSIVVVVGSQLFLHLAEFTIVSEPGTMGGSDASFLRLGPNRSLHLGINQGGLPVGVDARVGPGGATQAFAKENNQKAYKETYGVSHITRHDMLQIPKQQQNEKYQVPQFDQSTIKNIESAKGLDVWDSWPLQNADGTVAEYNGYHVVFALAGSPKDADDTSIYMFYQKVGDNSIDSWKNAGRVFKDSDKFDANDPILKDQTQEWSGSATFTSDGKIRLFYTDYSGKHYGKQSLTTAQVNVSKSDDTLKINGVEDHKTIFDGDGKTYQNVQQFIDEGNYTSGDNHTLRDPSLHKGHKYLVFEANTGTENGYQGEESLFNKAYYGGGTNFFRKESQKLQQSAKKRDAELANGALGIIELNNDYTLKKVMKPLITSNTVTDEIERANVFKMNGKWYVFPDSRGSTMTIDEGGREGDQPVQPPAPAPWGKEAADDLMEATVVNHGPDHIHISPGVGKRVDHRRGSFNTQRDGGQGQVIQKLIACQRTNDPLPFSLFTGAFAREGVFLFTSVIRNCQDKAGGWPLLEDFQALSPLQSLKHFGRRERPGTLGPT

SEQ ID NO: 52215 - protein, 981 aa, Homo sapiens
  DOMAIN (482)..(509): Mrp family proteins domain identified by eMATRIX, accession number BL01215A, p-value=4.964e-11, raw score of 9.75
MNMNIKKIVKQATVLTFTTALLAGGATQAFAKENNQKAYKETYGVSHITRHDMLQIPKQQQNEKYQVPQFDQSTIKNIESAKGLDVWDSWPLQNADGTVAEYNGYHVVFALAGSPKDADDTSIYMFYQKVGDNSIDSWKNAGRVFKDSDKFDANDPILKDQTQEWSGSATFTSDGKIRLFYTDYSGKHYGKQSLTTAQVNVSKSDDTLKINGVEDHKTIFDGDGKTYQNVQQFIDEGNYTSGDNHTLRDPHYVEDKGHKYLVFEANTGTENGYQGEESLFNKAYYGGGTNFFRKESQKLQQSAKKRDAELANGALGIIELNNDYTLKKVMKPLITSNTVTDEIERANVFKMNGKWYLFTDSRGSKMTIDVPQAKGNNVVITSYMTNRGFFEPEGSKGSITAAVMAKGLSVASGNSTPERRRATANENVQPRAIRDAEKAGRLPHPDMEIRGRVEQRVGYTIEQINHMRDVFGTRLRRAEDVFPPVIGVAAHKGGVYKTSVSVHLAQDLALKGLRVLLVEGNDPQGTASMYHGWVPDLHIHAEDTLLPFYLGEKDDVTYAIKPTCWPGLDIIPSCLALHRIETELMRKFDESAPYLGIGTINGLCAADLLIVPRLLDCLTTPADWSFFEWLQNIVKNLDLRVWDHGPTRIVGLIISLGPRSHSYRRSDYYSGTTVPLVSSEERLKPSRKKITKKAYKETYGVSHITRHDMLQIPKQQQNEKYQVPQFDQSTIKNIESAKGLDVWDSWPLQNADGTVAEYNGYHVVFALAGSPKDADDTSIYMFYQKVGDNSIDSWKNAGRVFKDSDKFDANDPILKDQTQEWSGSATFTSDGKIRLFYTDYSGKHYGKQSLTTAQPEVDFPVPPGRGRSVESVQSQPQEPVSVPQTLTSTLEHIVGQLDVLTQALQNFHRYTGIQHVHRIGMAERMWCDRNRERHTVSSSGGNRLPNPGPDRSVRHFPDPRFLCPSCATVTPLHELITNKYL

SEQ ID NO: 52216 - protein, 26 aa, Homo sapiens
IAFLRKPVNLLVLFFLFRQNRFGTFP

SEQ ID NO: 52217 - protein, 771 aa, Homo sapiens
  DOMAIN (426)..(455): kw REPLICATION REPB REPA INITIATION domain identified by eMATRIX, accession number DM00653A, p-value=7.207e-27, raw score of 20.40
  DOMAIN (683)..(771): ParA family ATPase domain identified by PFam, accession name ParA, E-value=6.1e-17, PFam score of 69.7
MIHVSVGTQESPVNQYPGDFDPAPRSALIHAWFLEEVLGQHALSVGLIPLSMTALAVQQCRYPCDNMASGEAALLQCLPASSAPLDLGERIPKQQQNEKYQVPQFDQSTIKNIESAKGLDVWDSWPLQNADGTVAEYNGYHVVFALAGSPKDADDTSIYMFYQKVGDNSIDSWKNAGRVFKDSDKFDANDPILKDQTQEWSGSATFTSDGKIRLFYTDYSGKHYGKQSLTTAQVNVSKSDDTLKINGVEDHKTIFDGDGKTYQNVQQFIDEGNYTSGDNHTLRDPHYVEDKGHKYLVFEANTGTENGYQGEESLFNKAYYGGGTASSIRKSDGTLQEHDGICEIHVAKYAEIFGLTSAEASKDIRQALKSFAGKEVVFYRPEEDAGDEKGYESFPWFIKRAHSPSRGLYSVHINPYLIPFFIGLQNRFTQFRLSETKEITNPYAMRLYESLCQYRKPHGSGIVSLKIEWIIERYQLPQSYQRMPDFRRRFLQCINAGHEMTKAIAIAQFNDDSPEARKITRRWRIGEAADLVGVSSQAIRDAEKAGRLPHPDMEIRGRVEQRVGYTIEQINHMRDVFGTRLRRAEDVFPPVIGVAAHKGGVYKTSVSVHLAQDLALKGLRVLLVEGNDPQGTASMYHGWVPDLHIHAEDTLLPFYLGEKDDVTYAIKPTCWPGLDIIPSCLALHRIETELMGKFDEGKLPTDPHLMLRLAIETVAHDYDVIVIDSAPNLGIGTINVVCAADVLIVPTPAELFDYTSALQFFDMLRDLLKNA

SEQ ID NO: 52218 - protein, 405 aa, Homo sapiens
MNMNIKKIVKQATVLTFTTALLAGGAPQAFAKENNQKAYKETYGVSHITRHHMLQIPKQQQNEKYQVPQFDQSTIKNIESAKGLDVWDSCPLQNADGTVAEYNGYHVVFALAGSPKDADDTSIYMFYQKVGDNSIDSWKNAGRVFKDSDKFDANDPILKDQTQEWSGSATFTSDGKIRLFYTDYSDKGHKYLVFEANTGTENGYQGEESLFNKAYYGGGTNFFRKESQKLQQSAKKRDAELANGALGIIELNNDYTLKKVMKPLITSNTVTDEIERANVFKMNGKWYLFTNSRGSKMTIDGINSNDINMLGYVSNSLTGPYKPLNKTGLVLQMGLDPNDVTLTNSHFAVPQAKGNNVVITSYMTNRGFFEDKKATFAPSFLMNIKGNKTSVVKNSILEQGQLTVN

SEQ ID NO: 52219 - protein, 616 aa, Homo sapiens
  DOMAIN (322)..(351): kw REPLICATION REPB REPA INITIATION domain identified by eMATRIX, accession number DM00653A, p-value=7.097e-13, raw score of 20.40
PWISAPVPVDVVEGAMDSVTVLSFGGLMLYFCAGWPPARRWCFPESISCGSMERDQWWGLQVAKRAGLAGGQSGRTVLRERVRIEIASTHIALAARHSDWRCCRNGRYPARGPAALQNFQRYTGIQHVHRIGMAERMWCDRNRERHTVSSSGGNRLPNPGPDRSCDNLKTCHTSHGSVMAETAVINHKKRKNSPRIVQSNDLTEAAYSLSRDQKRMLYLFVDQIRKSDGTLQEHDGICEIHVAKYVEIFGLPFAEASKDIRQALKSFAGKEVVFYRPEEDAGDEKGYESFPWFIKRAPSPSKGLYSVHINPYLIPFFIGLQNRLTQFRLSETKEIPNPYAMRLYTNTLCQYRKPDGSGIVSLKIDWIIERYQLPQSYQRVWTPGINCPEPCPGVWTPGINCPGAWGIHGPHGSAENTGPLHPGQTSAQLETSLLPSLRSARELELAQLSPRRKQNRSLQNIGVTPSLRVPWPKASNVQQFIDEGNYTSGDNHTLRDPHYVEDKGHKYLVFEANTGTENGYQGEESLFNKAYYGGGTNFFRKESQKLQQSAKKRDAELANGALGIIELNNDYTLKKVMKPLITSNTVTDEIERANVFKMNGKWYLFTDSRGSKMTID

SEQ ID NO: 52220 - protein, 726 aa, Homo sapiens
  DOMAIN (317)..(360): 1 kw MIND INHIBITOR DIVISION CONTROL domain identified by eMATRIX, accession number DM01756B, p-value=4.822e-15, raw score of 22.91
  DOMAIN (282)..(396): ParA family ATPase domain identified by PFam, accession name ParA, E-value=9.9e-28, PFam score of 105.6
TSKAIKHPLSKTASWSKDSGYRARIRNHVWDHDPTRVVGLILGLGPRSLLSCSSDCPAWDCGFRQWPVLVRGVGVVVGSVLTVGSPRCGPPSPKDADDTSIYMFYQKVGDNSIDSWKNAGRVFKDSDKFFANFSFLKDQTQEWGGSATFTSDGKIRLFYTDYSGKHYGKQSLTTAQVNVSKSDDTLKINGVEDHKTIFDGDGKTYQNVQQFIDEGNYTSGDNHTLRDPHYDSLNAHGWVPDLHIHAEDTLLPFYLGEKDDVTYAIKPTCWPGLDIIPFCLALHRIETELMGKFDEGKLPTDPHLMLRLAIETVAHDYDVIVIDSAPNLGIGTINVVCAADVLIVPTPAELFDYTSALQFFDMLRDLLKNVDLKGFEPDVRILLTKYSNSNGSQSPGMEEQIRDAWGSMVLKNVVRETDEVGKGQIRMRTVFEQAIDQRSSTESIIPNDGKKLSFSVSGKMRKGHYFSSEESHVRTDILADTKMQSANGLDVWDSWPLQNADGTVAEYNGYHVVFALAGSPKDADDTSIYMFYQMVGDNSIDSWKNAGRVFKDSDKFDAHDPILKDQTQEWSGSATFTSDGKIRLFYTDYSGKHYGKQSLTTAQVNVSKSDDTLKINGVEDHKTIFDGDGKTYQNVQQFIDEGNYTSGDNHTLRDPHYVEDKGHKYLVFEANTGTENGYQSEESLFNKAYYGGGTNFFRKESQKLQQSAKKRDAELTNGAPSYHRVK

SEQ ID NO: 52221 - protein, 54 aa, Homo sapiens
  misc_feature (1)...(54): Xaa = X or * as defined in Table 2
RKNPFILHXLFRXTLRQTKPDNSAGKCVKIXXHTQNQRSGRSQNDFXRRWSRSY

SEQ ID NO: 52222 - protein, 124 aa, Homo sapiens
  misc_feature (1)...(124): Xaa = X or * as defined in Table 2
ETLTTLKTKAINTLYSKPTREQKTDTKAKNLYLTKRTTAAARTSSVKKAISFNRALKNAMLSXRTAPSVSXIRHRVXNLTMRSSSSSAPSPWMLXAXAWLCRYCRASCGISSIPTASPVTMACC

SEQ ID NO: 52223 - protein, 287 aa, Homo sapiens
AVPELLVQLASISIRGATQAFAKENNQKAYKETYGVSHITRHDMLQIPKQQQNEKYQVPQFDQSTIKNIESAKGLDVWDSWPLQNADGTVAEYNGYHVVFALAGSPKDADDTSIYMFYQKVGDNSIDSWKNAGRVFKDSDKFDANDPILKDQTQEWSGSATFTSDGKIRLFYTDYSGKHYGKQSLTTAQFFDMLRDLLKNVDLKGFEPDVRILLTKYSNSNGSQSPWMEEQIRDAWGSMVLKNVVRETDEVGKGQIRMRTVFEQAIDQRSSTGAWRNALSIWEPVCN

SEQ ID NO: 52224 - protein, 102 aa, Homo sapiens
DACFAYFCLLGSLGTFHTLTDTHSTASAICVDAISMRTRSRSTVRPLWPPPSPARFATWSHVSCPCSRMLFLTTDVLLPLMFIKKLGANVAFLSSKKPLFVM

SEQ ID NO: 52225 - protein, 581 aa, Homo sapiens
  DOMAIN (52)..(95): 1 kw MIND INHIBITOR DIVISION CONTROL domain identified by eMATRIX, accession number DM01756B, p-value=4.822e-15, raw score of 22.91
  DOMAIN (13)..(131): ParA family ATPase domain identified by PFam, accession name ParA, E-value=8.7e-17, PFam score of 69.2
MRLGFESRGEIAKDQAKLDLAGQKERDNQSSTLGEAETPLIICWSTLEDPHYDVIVIDSAPNLGIGTINVVCAADVLIVPTPAELFDYTSALQFFDMLRDLLKNVDLKGFEPDVRILLTKYSNSNGSQSPWMEEQIRDAWGSMVLKNVVRETDEVGKAAPMVDSLIARVGVMARGNAITLPVCGRDVKFTLEVLRGDSVEKTSRVWSGNERDQELLTEDALDDLIPSFLLTGQQTPAFGRRVSLYPLAGGATQAFAKENNQKAYKETYGVSHITRHDMLQIPKQQQNEKYQVPQFDQSTIKNIESAKGLDVWDSWPLQNADGTVAEYNGYHVVFALAGSPKDADDTSIYMFYQKVGDNSIDSWKNAGRVFKDSDKFDANDPILKDQTQEWSGSATFTSDGKIRLFYTDYSGKHYGKQSLTTAQVNVSKSDDTLKINGVEDHKTIFDGDGKTYQNVQQFIDEGNYTSGDNHTLRDPHYVEDKGHKYLVFEANTGTENGYQGEESLFNKAYYGGGTNFFPCRGRLAATRLAGPERQPRGGDGVAPRQRRFCGRLEVGSGREKEEGKRGWASASGAAVPFVSAA

SEQ ID NO: 52226 - protein, 1048 aa, Homo sapiens
  DOMAIN (410)..(439): kw REPLICATION REPB REPA INITIATION domain identified by eMATRIX, accession number DM00653A, p-value=7.207e-27, raw score of 20.40
  DOMAIN (651)..(765): ParA family ATPase domain identified by PFam, accession name ParA, E-value=2.7e-28, PFam score of 107.5
MEWGKFKRLVLPSQGKSKPEQRCQYRHTVGDQATLPLRSRVEKRNGEAEGRIYRKLWDVALLCCVQEVINGERKPLRALTEVKSGFRLREDSDKFDANDPILKDQTQEWSGSATFTSDGKIRLFYTDYSGKHYGKQSLTTAQNVQQFIDEGNYTSGDNHTLRDPHYVEDKGHKYLVFEANTGTENGYQGEESLFNKAYYGGGTNFFRKESQKLQQSAKKRDAELANGALGIIELNNDYTLKKVMKPLITSNTCDNLKTCHTSHGSVMAETAVINHKKRKNSPRIVQSNDLTEAAYSLSRDQKRMLYLFVDQIRKSDGTLQEHDGICEIHVAKYAEIFGLTSAEASKDIRQALKSFAGKEVVFYRPEEDAGDEKGYESFPWFIKRAHSPSRGLYSVHINPYLIPFFIGLQNRFTQFRLSETKEITNPYAMRLYESLCQYSKTNGSGIVSLKIDWIIERYQLPQSYQRMPDFRRRFLQVCVNEINSRTPMRLSYIEKKKGRQTTHIAIRDAEKAGRLPHPDMEIRGRVEQRVGYTIEQINHMRDVFGTRLRRAEDVFPPVIGVAAHKGGVYKTSVSVHLAQDLALKGLRVLLVEGNDPQGTASMYHGWVPDLHIHAEDTLLPFYLGEKDDVTYAIKPTCWPGLDIIPSCLALHRIETELMGKFDEGKLPTDPHLMLRLAIETVAHDYDVIVIDSAPNLGIGTINVVCAADVLIVPTPAELFDYTSALQFFDMLRDLLKNVDLKGFEPDVRILLTKYSNSNGSQSPWMEEQIRDAWGSMVLKNVVRETDEVGKVAEYNGYHFVFALAGSPKDAVDTSIYMFYQKVGDNSIDSWKNAGRVFKDSDKFVANDPILKDQTQEWSGSATFTSDGKIRLFYTGYAGKHYGKQSLTTAQVNVSKSDDTLKINGVEDHKTIFDGDGKTYQNVQQIIDEGNYTSGDNHTLRDPHYVEDKGHKYLVFEANTGTENGYQGEESLFNKAYYGGGTNFFRKESQKLQQSAKKRDAELANGALGVTHPVQFRLLTVTIHSFDSSVVLQRTRRLLIGMDNSITYL

SEQ ID NO: 52227 - protein, 1034 aa, Homo sapiens
  DOMAIN (894)..(923): kw REPLICATION REPB REPA INITIATION domain identified by eMATRIX, accession number DM00653A, p-value=2.125e-25, raw score of 20.40
  DOMAIN (881)..(994): Initiator RepB protein domain identified by PFam, accession name RepB_protein, E-value=1.9e-05, PFam score of 21.8
MNEMKREEKFREKRRERNEQILQEIRDYVKRSNLHLIGVSKSDGENGTELENTLQDIIQENFPNLARQANIQIQEIQRMLQRYSSRRTTPRHIIVRFTKVEMKEKMLRAAREKGRVTHKGKPIRLTADLSAETLQATKEWRPIFNILKEKNFQPRISYPAKLSFISEGETKYFTDKQMLRDFVTTRPALKELLKEALNMERNNRLVKSLAWASQNGFRSPALLPLSLMLCAPLQEADGTNLGWLAHCGLLCTGDHPSGLGKPGRHGADRHHPEGLDRELTGDNRGQLVGGATQAFAKENNQKAYKETYGVSHITRHDMLQIPKQQQNEKYQVPQFDQSTIKNIESAKGLDVWDSWPLQNADGTVAEYNGYHVVFALAGSPKDADDTSIYMFYQKVGDNSIDSWKNAGRVFKDSDKFDANDPILKDQTQEWSGSATFTSDGKIRLFYTDYSGKHYGKQSLTTAQVNVSKSDDTLKINGVEDHKTIFDGDGKTYQNVQQFIDEGNYTSGDNHTLRDPHYVEDKGHKYLVFEANTGTENGYQGEESLFNKAYYGGGTNFFRKESQKLQQSAKKRDAELANGALGIIELNNDYTLKKVMKPLITSNTVTDEIERANVFKMNGKWYLFTDSRGSKMTIDGINSNVIHMNGYVSGSTKLPLMATGVSPSGDLMRDCVGHTSELSHQGPRKLGCLSSNSCLSLVESCSQGNLQPTPHVPMAGEGSSGKETQCPPFSAAARDWCDNLKTCHTSHGSVMAETAVINHKKRKNSPRIVQSNDLTEAAYSLSRDQKRMLYLFVDQFKKFDGTLQEHAGICEIHVANYAEIFGIGTSPKASKNIRQALKSFAGKEVVFYRPEEDAGDEKGYESFPWFIKRAHSPSRGLYSVHINPYLIPFFIGLQNRFTQFRLSETKEIPNPYAMRLYESLCQYRKPDGSGIVSLKIDWIIERYHLPQSYQRMPDFRRRFLQVCVNEINSRTPMRLSYIEKKKGRQTTHIVFSFRDITSMTTGNSWGVICPRIGGGSPPILPLTHLAAPVGPRFRP

SEQ ID NO: 52228 - protein, 621 aa, Homo sapiens
  misc_feature (1)...(621): Xaa = X or * as defined in Table 2
MFYQKVGDNSIDSWKNAGRVFKDSDKFDANDPILKDQTQEWSGSATFTSDGKIRLFYTDYSGKHYGKQSLTTAQVNVSKSDDTLKINGVEDHKTIFDGDGKTYQNVQQFIDEGNYTSGDNHTLRDPHYVEDKGHKYLVFEANTGTENGYQGEESLFNKAYYGGGTNFFRKESQKLQQSAKKRDAELANGALGIIELNNDYTLKKVMKPLITSNTVTDEIERANVFKMNGKXRNPLQIPKQQQNEKYQVPQFDQSTIKNIESAKGLDVWDSWPLQNADGTVAEYNGYHVVFALAGSPKDADDTSIYMFYQKVGDNSIDSWKNAGRVFKDSDKFDANDPILKDQTQEWSRWVTTMHGAMPHPGHIPTAPASLPAKVKGSGKVCWLAFPLSELTPPSALQTKAINTLYSKPTRGTENGYQGEESLFNKAYYGGGTNFFRKEGEKLQQSAKKRDAELANGALGIIELNNDYTLKKVMKPLITSNTVTDEIERANVFKMNGKWYLFTDSRGSKMTIDGINSNDIYMLGYVSNSLTGPYKPLNKTGLVLQMGLDPNDVTFTYSHFAVPQGQSNNVVITSYMTNRGFFRDKKATFAPSFLMNIKSNKTSPTCWPGADNYPFLSGSAPY

SEQ ID NO: 52229 - protein, 1195 aa, Homo sapiens
  DOMAIN (971)..(1005): Myelin proteolipid protein domain identified by eMATRIX, accession number BL00575C, p-value=5.800e-34, raw score of 14.57
  DOMAIN (816)..(970): Chloramphenicol acetyltransferase domain identified by PFam, accession name CAT, E-value=2.2e-110, PFam score of 380.1
TANGTCSLISRGSKMTIDGINSNDIYMLGYVSNSLTGPYKPLNKTGLVLQMGLDPNDVTFTYSHFAVPQAKGNNVVITSYMTNRGFFEDKKATFAPSFLMNIKGNKTSVVKNSILEQGQLTVGGQPLRPVKNRGRVFKNSDSSTPNDPILKDQTQEWSGSATFTSEGKIRLFYTDYSGKHSGKQSLTTAQVNVSKSDDTLKINGVEDHKTIFDGDGKTYQNVQQFIDEGNYTSGDNHTLRDPHYVEDKGHKYLVFEANTGTENGYQGEESLFNKAYYGGGTNFFRKESQKLQQSAKKRDAELANGALGIIELNNDYTLKKVMKPLITSNTVTDEIERANGFKMNGKCSGSVDVCGLWQGASQRRGASLHAGICSSWVAAWLEEGRGSLQGIELGTHGGSLLFSMLSFGQAAVSAAGAGGLIAASAPMTVVVYSRGSPILKDQTQEWSGSATFTSDGKIRLFYTDYSGKHYGKQSLTTAQVNVSKSDDTLKINGVEDHKTIFDGDGKTYQNVQQFIDEGNYTSGDNHTLRDPHYVEDKGHKYLVFEANTGTENGYQGEESLFNKAYYGGGTNFFRKESQKLQQSAKKRDAELANGALGIIELNNDYTLKKVMKPLITSNTVTDEIERANVFKMNGKWYLFTDSRGSKMTIDVSSHRKATPRTPPSDRPPPACGSKATQKQAPPTRRPGKDRKPTTRRRQLGKTRKRAREQSGRPRAQEGNAEQEDPAQHKTSKGKRERATKHRKRRDRPPANKASHTPPTTKYDLTLTRTRQCPVHVARVLLQLKWVTFHDSNSRVLVQMFCAGEEHNERGLLESKTVQLDITAFLKTVKKNKHKFYPAFIHILARLMNAHPEFRMAMKDGELVIWDSVHPCYTVFHEQTETFSSLWSEYHDDFRQFLHIYSQDVACYGENLAYFPKGFIENMFFVSANPWVSFTSFDLNVANMDNFFAPVFTMGKYYTQGDKVLMPLAIQFIMLTYLFMLAWLGVTAFTSLPVYMYFNLWTICRNTTLVEGANLCLDLRQFASKDIRQALKSFAGKEVVFYRPEEDAGDEKGYESFPWFIKRAHSPSRGLYSVHINPYLIPFFIGLQNRFTQFRLSETKEITNPYAMRLYESLCQYRKPDGSGIVSLKIEWIIERYQLPQSYQRMPDLPARFLQVCVNEINSRTPMRLSYIEKKKGRQTTHIVFSFRDITPMTTG

SEQ ID NO: 52230 - protein, 1237 aa, Homo sapiens
  DOMAIN (773)..(811): Chloramphenicol acetyltransferase proteins domain identified by eMATRIX, accession number BL00100D, p-value=7.677e-36, raw score of 17.22
  DOMAIN (726)..(824): Chloramphenicol acetyltransferase domain identified by PFam, accession name CAT, E-value=7.8e-59, PFam score of 208.9
  misc_feature (1)...(1237): Xaa = X or * as defined in Table 2
MEVIPEGYRLSELKKCSKWIVVMVARLYEYTKNQQIIHLKWVNHMLGCLLDRNDPLRDVDEAAVPVLCICSADDPVCGPPDHTLTTELFHSNPYFFLLLSRHGGHCGFLRQEPLPAWSHEVILESFRALTEFFRTEERIKGLSRHRASFLGGRRRGGALQRREVSSSSNLEEIFNWKRSYTRLMAAAAGAAAAPGSREPQDRPECGAGHPGPRYYRHPERWLLRPEAFLGPLRTRAPSAEDSQRERPAARSGPEMRVRYPVVAAVLAPYLALSQDPMVKSSASGQGASGSYNHVREEMLIKAGGAMSRRVVRQSKFRHVFGQAAKADQAYEDIRVSKVTWDSSFCAVNPKFLAIIVEAGGGVPSSSCLWPRWWLAGYRCVPAHTVDDVWVHIIQAQQHLPGAHIPDDDHIVTTCPEWPGMVAGNPMAPDFSLNSFAPPFANGLPRNVLQDPPESPKAFSLPSLRLLLKCHLLRKAHPDSPSEEVRGASARPPPRLGGVPNSSLRTGHDDNRRFCGIERGERRSDSSFAKENNQKAYKETYGVSHITRHDMLQIPKQQQNEKYQVPQFDQSTIKNIESAKGLDVWDSWPLQNADGTVAEYNGYHVVFALAGSPKDADDTSIYMFIKSRDNSIDNDELNPGWASISRGVLVCDECCSVHRSLGRHISIVKHLRHSAWPPTLLQALQNFQRYTGIQHVHRIGMAERMWCDRNRERHTVSSSGATASPIQTVQLDITAFLKTVKKNKHKFYPAFIHILARLMNAHPEFRMAMKDGFIENMFFVSANPWVSFTSFDLNVANMDNFFAPVFTMGKYYTQGDKVLMPLAIQEYGWNLDRAYDYVKERRTVTKPNPSFMRQLEEYQGILLASVINHKKRKNSPRIVQSNDLTEAAYSLSRDQKRMLYLFVDQIRKSDGTLQEHDGICEIHVAKYAEIFGLTSAEASKDIRQALKSFAGKEVVFYRPEEDAGDEKGYESFPWFIKRAHSPFQRALYSCTICNPXILIPFFIGLQNRFTQFRLSETKEITNPYAMAFIRNPCCQYRKPGMGSRHSPLLKIDWIIERYQLPQSYQRMPDFRRRFLQHFLAHAGCPKGTQNFTFRMKFIIFSIKKVLPPVDTILAHDPVIHTCHLRESFGSVSPSSPKSNRLPCPEVILFHYGESWNLLRADQRLIFAKSWPRASRYQQGHQDLFILRSDLPSQVFIRDKLMERRNRRTGRTEKARIWGSDGQNGQEPGLWRRDASRCC

SEQ ID NO: 52231 - protein, 232 aa, Homo sapiens
CDNLKTCHTSHGSVMAETAVINHKKRKNSPRIVQSNDLTEAAYSLSRDQKRMLYLFVDQIRKSDGTLQEHDGICEIHVAKYAEIFGLTSAEASKDIRQALKSFAGKEVVFYRPEEDAGDEKSYESFPWFIKRIPNLLLHPRGLRAITIAVFGKQNTYIRLEPFKINVLEQITKHIEKLQCGGVVKQLSRRGNNQHISSTYDINRADTQVRRAVNNYDIIVMSNSFNGPVGAS

SEQ ID NO: 52232 - protein, 326 aa, Homo sapiens
  DOMAIN (276)..(314): Chloramphenicol acetyltransferase proteins domain identified by eMATRIX, accession number BL00100D, p-value=1.000e-34, raw score of 17.22
  DOMAIN (274)..(326): Chloramphenicol acetyltransferase domain identified by PFam, accession name CAT, E-value=4.7e-31, PFam score of 116.6
MPRKQGDYRTPVWEIEDRYLDMLRDLLKIDDIKGFQPEVRIYLTRYINSNGSYTPRMDEQDSDACGCMDIKNARAVIFLAFRLSSLNCAMAIAFVIYDPRLCTGHLLIIQLANQNTIITFGKCSSFTTATPIGNFGYRARIRNHGHSCFLCEMGEVSITNPYAMRLYESLCEYRKPDGSGIVSLKIDWIIERYQLPQSYQRMPDFRRRFLQLECLYVDSRGPPSAATNGSSRIRRSVWNTHTPRTGIARISAAPTMPNSNRIPIGYRARIRNHGFIENMFFVSANPWVSFTSFDLNVANVDNFFAPVFTMGKYYTQGDKVLMPLAI

SEQ ID NO: 52233 - protein, 595 aa, Homo sapiens; identical to SEQ ID NO: 35573
  DOMAIN (232)..(261): kw REPLICATION REPB REPA INITIATION domain identified by eMATRIX, accession number DM00653A, p-value=7.207e-27, raw score of 20.40
  DOMAIN (410)..(535): ParA family ATPase domain identified by PFam, accession name ParA, E-value=1.7e-22, PFam score of 88.2

SEQ ID NO: 52234 - protein, 748 aa, Homo sapiens
  DOMAIN (151)..(180): kw REPLICATION REPB REPA INITIATION domain identified by eMATRIX, accession number DM00653A, p-value=7.207e-27, raw score of 20.40
  DOMAIN (135)..(576): Initiator RepB protein domain identified by PFam, accession name RepB_protein, E-value=4.7e-10, PFam score of 38.0
RSSVATVALLHAVINHKKRKNSPRIVQSNDLTEAAYSLSRDQKRMLYLFVDQIRKSDGTLQEHDGICEIHVAKYAEIFGLTSAEASKDIRQALKSFAGKEVVFYRPEEDAGDEKGYESFPWFIKRAHSPSRGLYSVHINPYLIPFFIGLQNRFTQFRLSETKEITNPYAMRLYESLCQYRKPDGSGIVSLKIDWIIERYQLPQSYQRMPDFRRRFLQVCVNEINSRTPMRLSYIEKKKGRQTTHIFFDMLRDLLKNVDLKGFEPDVRILLTKYSNSNGSQSPWMEEQIRDAWGSMVLKNVVRETDEVGKDTSLSTPAAPMVDSLIARVGVMARGNAITLPVCGRDVKFTLEVLRGDSVEKTSRVWSGAVSQGGESFIYMPLTGAAAFLSEMPCPERRNLKKQCGYSGFAACGYQSQERKNSPRIVQSNDLTEAAYSLSRDQKRMLYLFVDQIRKSDGTLQEHDGICEIHVAKYAEIFGLTSAEASKDIRQALKSFAGKEVVFYRPEEDAGDEKGYESFPWFIKRAHSPSRGLYSVHINPYLIPFFIGLQNRFTQFRLSETKEITNPYAMRLYESLCQYRKPDGSGIVSLKIDWIIERYQLPQSYQRMPDFRRRFLQDHNSSPEREQNWMENEFDELTEVGFRRWVITNSSELKEHVLTQCKEAKNLDKRLQELLTRISNLENIDDLMELKNTAQELHETYTSINSQTDQAEERISEIGDQLNEINMKTRLEEKKKGKGTNKGLQEPLW

SEQ ID NO: 52235 - protein, 81 aa, Homo sapiens
  DOMAIN (14)..(28): Phage integrase family domain identified by eMATRIX, accession number PF00589B, p-value=1.621e-11, raw score of 16.17
AAADGVTFSVPVTPHTFRHSYAMHMLYAGIPLKVLQSLMGHKSISSTEVYTKVFALDVAARHRVQFAMPESDAVAMLKQLS

SEQ ID NO: 52236 - protein, 317 aa, Homo sapiens; identical to SEQ ID NO: 48475
  DOMAIN (250)..(264): Phage integrase family domain identified by eMATRIX, accession number PF00589B, p-value=1.621e-11, raw score of 16.17
  DOMAIN (62)..(296): "Phage" integrase family domain identified by PFam, accession name Phage_integrase, E-value=1.2e-12, PFam score of 55.5

SEQ ID NO: 52237 - protein, 533 aa, Homo sapiens; identical to SEQ ID NO: 43575
  DOMAIN (466)..(480): Phage integrase family domain identified by eMATRIX, accession number PF00589B, p-value=1.621e-11, raw score of 16.17
  DOMAIN (260)..(512): "Phage" integrase family domain identified by PFam, accession name Phage_integrase, E-value=9e-10, PFam score of 45.9

SEQ ID NO: 52238 - protein, 77 aa, Homo sapiens
EWRNVCGVTGTENVTPSAAAAATASPIQVLTVLSVTSQIRAFSVLPVRRLRRSMSLSRINTCDGRSLRRIYFSWCPC

SEQ ID NO: 52239 - protein, 198 aa, Homo sapiens; identical to SEQ ID NO: 35363
  misc_feature (1)...(198): Xaa = X or * as defined in Table 2

SEQ ID NO: 52240 - protein, 509 aa, Homo sapiens
  DOMAIN (144)..(173): kw REPLICATION REPB REPA INITIATION domain identified by eMATRIX, accession number DM00653A, p-value=7.207e-27, raw score of 20.40
  DOMAIN (384)..(498): ParA family ATPase domain identified by PFam, accession name ParA, E-value=2.7e-28, PFam score of 107.5
MAETAVINHKKRKNSPRIVQSNDLTEAAYSLSRDQKRMLYLFVDQIRKSDGTLQEHDGICEIHVAKYAEIFGLTSAEASKDIRQALKSFAGKEVVFYRPEEDAGDEKGYESFPWFIKRAHSPSRGLYSVHINPYLIPFFIGLQNRFTQFRLSETKEITNPYAMRLYESLCQYRKPDGSGIVSLKIDWIIERYQLPQSYQRMPDFRRRFLQVCVNEINSRTPMRLSYIEKKKGRQTTHIAIRDAEKAGRLPHPDMEIRGRVEQRVGYTIEQINHMRDVFGTRLRRAEDVFPPVIGVAAHKGGVYKTSVSVHLAQDLALKGLRVLLVEGNDPQGTASMYHGWVPDLHIHAEDTLLPFYLGEKDDVTYAIKPTCWPGLDIIPSCLALHRIETELMGKFDEGKLPTDPHLMLRLAIETVAHDYDVIVIDSAPNLGIGTINVVCAADVLIVPTPAELFDYTSALQFFDMLRDLLKNVDLKGFEPDVRILLTKYSNSNGSQSPWMEEQIRDACGL

SEQ ID NO: 52241 - protein, 289 aa, Homo sapiens
VSGVIEIADGSRRRKAAALTESDYRVLVGELDDEQMAALSRLGNDYRPTSAYERGQRYASRLQNEFAGNISALADAECDNLKTCHTSHGSVMAETAVINHKKRKNSPRIVQSNDLTEAAYSLSRDQKRMLYLFVDQIRKSDGTLQEHDGICEIHVAKYAEIFGLTSAEASKDIRQALKSFAGKEVVFYRPEEDAGDEKGYESFPWFIKQSNNININKKDNHTETLSEGHQQQRPKVDKSTKMRKNQHKKAENSKNQNAASPPKGHNSSSAREQNRTENEFDELIEVCFR

SEQ ID NO: 52242 - protein, 1434 aa, Homo sapiens
  DOMAIN (129)..(158): kw REPLICATION REPB REPA INITIATION domain identified by eMATRIX, accession number DM00653A, p-value=7.207e-27, raw score of 20.40
  DOMAIN (386)..(1111): ParA family ATPase domain identified by PFam, accession name ParA, E-value=3.8e-55, PFam score of 196.6
MAETAVINHKKRKNSPRIVQSNDLTEAAYSLSRDQKRMLYLFVDQIRKSDGTLQEHDGICEIHVAKYAEIFGLTSAEASKDIRQALKSFAGKEVVFYRPEEDAGDEKGYESFPWFIKRAHSPSRGLYSNRFTQFRLSETKEITNPYAMRLYESLCQYRKPDGSGIVSLKIDWIIERYQLPQSYQRMPDFRRRFLQCINAGHEMTKAIAIAQFNDDSPEARKITRRWRIGEAADLVGVSSQAIRDAEKAGRLPHPDMEIRGRVEQRVGYTIEQINHMRDVFGTRLRRAEDVFPPVIGVAAHKGGVYKTSVSVHLAQDLALKGLRVLLVEGNDPQGTASMYHGWVPDLHIHAEDTLLPFYLGEKDDVTYAIKPTCWPGLDIIPSCLALHRIETELMGKFDEGKLPTDPHLMLRLAIETVAHDYDVIVIDSAPNLGIGTINVVCAADVLIVPTPAELFDYTSALQFFDMLRDLLKNVDLKGFEPDGTQAKMTQGERRNVPKQEYISRGYFTLKETVIDTSNGSRISFTTRITGKDVVRTTSIVMLAKVTFLSCITMSDFTFSGYELACFVTHSGLSRSAGHILSQCANLAATTSEYFIHKPHRLIAAETGYSQSTVVRAFREAVNKGILSVEIVIGDHRERRANLYRFTPSFLAFAQQAKNALIESKLKISSAATKCDNLKTCHTSHGSVMAETAVINHKKRKNSPRIVQSNDLTEAAYSLSRDQKRMLYLFVDQIRKSDGTLQEHDGICEIHVAKYAEIFGLTSAEASKDIRQALKSFAGKEVVFYRPEEDAGDEKGYESFPWFIKRAHSPSRGLYSVHINPYLIPFFIGLQNRFTQFRLSETKEITNPYAMRLYESLCQYRKPDGSGIVSLKIDWIIERYQLPQSYQRMPDFRRRFLQVCVNEINSRTPMRLSYIEKKKGRQTTHIDLALKGLRVLLVEGNDPQGTASMYHGWVPDLHIHAEDTLLPFYLGEKDDVTYAIKPTCWPGLDIIPSCLALHRIETELMGKFDEGKLPTDPHLMLRLAIETVAHDYDVIVIDSAPNLGIGTINVVCAADVLIVPTPAELFDYTSALQFFDMLRDLLKNVDLKGFEPDVRILLTKYSNSNGSQSPWMEEQIRDAWGSMVLKNVVRETDEVGKAAPMVDSLIARVGVMARGNAITLPVCGRDVKFTLEVLRGDSVEKTSRVWSGNERDQELLTEDALDDLIPSFLLTGQQTPAFGRRVSGVIEIADGSRRRKAAALTESDYRVLVGELDDEQMAALSRLGNDYRPTSAYERGQRYASRLQNEFAGNISALADAENISRKIITRCINTAKLPKSVVALFSHPGELSARSGDALQKAFTDKEELLKQQASNLHEQKKAGVIFEAEEVITLLTSVLKTSSASRTSLSSRHQFAPGATVLYKGDKMVLNLDRSRVPTECIEKIEAILKELEKPAP

SEQ ID NO: 52243 - protein, 139 aa, Homo sapiens
  misc_feature (1)...(139): Xaa = X or * as defined in Table 2
SLPNLDNSAICSSSSSPTRTRXSLSVSAAALRRRLPSAISMTPDTLRPNAGVCXPVSRKEGMRSSSASSVSSSWSRSLPDHTREVFSTLSPRSTSRVNFTSRPHTGKVMALPRAITPTRAINESTIETAGEDNEVSSTG

SEQ ID NO: 52244 - protein, 390 aa, Homo sapiens
  DOMAIN (156)..(185): kw REPLICATION REPB REPA INITIATION domain identified by eMATRIX, accession number DM00653A, p-value=5.043e-11, raw score of 20.40
  misc_feature (1)...(390): Xaa = X or * as defined in Table 2
SGNLKACHPSHGSVMAETAVINHKKRKNSPRIEQXKDGYQQAYSLSRDQKRMLYLFVDQIRKSDGTLQEHDGICQIHGAQYRXQISDXPFAEASKDIRQALKSFAGKEVVFYRPEEDAGDEKGYESFPWFIKRAHSPSRGLFSGHIPPYLIPFFIGVKNRLTQIRLFETKEIPHPSALRYYESLGQDRKPDGSSIGSLKIDWIIERYQLPQSYQRMPDFRRRFLQHFLAHAGCPKGTQNFTFRMKFIIFSIKKVLPPVDTILAHDPVIHTCHLRESFGSVSPSSPKSNRLPCPEVILFHYGESWNLLRADQRLIFAKSWPRASRYQQGHQDLFILRSDLPSQVFIRDKLMERRNRRTGRTEKARIWGSDGQNGQEPGYVEAGCPPLLLTV

SEQ ID NO: 52245 - protein, 89 aa, Homo sapiens
  DOMAIN (1)..(26): MALIC ENZYME SIGNATURE domain identified by eMATRIX, accession number PR00072A, p-value=6.040e-25, raw score of 12.75
  DOMAIN (1)..(36): Malic enzyme domain identified by PFam, accession name malic, E-value=8.9e-16, PFam score of 65.8
LFYRVLTSDVEKFMPIVYTPTVGLACQHYGLTFRSPGEPPWSEGSGRGCLIEGNKFFPPFMHIGTLEANSDWVSGPTKRHLISSTCSEK

SEQ ID NO: 52246 - protein, 176 aa, Homo sapiens
  DOMAIN (82)..(132): Malic enzymes proteins domain identified by eMATRIX, accession number BL00331D, p-value=9.113e-17, raw score of 22.48
  DOMAIN (94)..(129): Malic enzyme domain identified by PFam, accession name malic, E-value=2.7e-13, PFam score of 57.0
MPIRGPGSHVIDCVCVCTLGGGTHRAGLCDWCLPYRHLVTSATPLPLRSNPRSEGTPCNRAWRANWRGSKEELFSSDSSYAQRKKKYPPWERLQELLRDPLYIGLKHQRVHGKAYDDLLDEFMQAVTDKMRDRARPSIYPDSVRTMLEIALRTTLMMPVCADQTFSIASETPTHPR

SEQ ID NO: 52247 - protein, 123 aa, Homo sapiens
  DOMAIN (41)..(58): MALIC ENZYME SIGNATURE domain identified by eMATRIX, accession number PR00072F, p-value=5.935e-15, raw score of 8.87
  DOMAIN (16)..(123): Malic enzyme domain identified by PFam, accession name malic, E-value=3.5e-27, PFam score of 103.7
LLNLATWRYLGTLTRGTASVAVAGILAALRITNNKLSNHVFVFQGAGEAAMGIAHLLVMALRRKKGTERTTATRKIWMVDSKGLICQGEGSHLNHHEKEMFAQDHPEVNSLEEVVRLVKPTAM

SEQ ID NO: 52248 - protein, 625 aa, Homo sapiens
  DOMAIN (123)..(168): Malic enzymes proteins domain identified by eMATRIX, accession number BL00331B, p-value=1.000e-40, raw score of 19.65
  DOMAIN (60)..(624): Malic enzyme domain identified by PFam, accession name malic, E-value=5.8e-264, PFam score of 890.3
  misc_feature (1)...(625): Xaa = X or * as defined in Table 2
EGEDRGLPRTMGAALGTGTRLAPWPGRACGALPRWTPTAPAQGCHSKPGPARPVPLKKRGYDVTRNPHLNKGMAFTLEERLQLGIHGLIPPCFLSQDVQLLRIMRYYERQQSDLDKYIILMTLQDRNEKLFYRVLTSDVEKFMPIVYTPTVGLACQHYGLTFRRPRGLFITIHDKGHLATMLNSWPEDNIKAVVVTDGERILGLGDLGCYGMGIPVGKLALYTACGGVNPQQCLPVLLDVGTNNEELLRDPLYIGLKHQRVHGKAYDDLLDEFMQAVTDKFGINCLIQFEDFANANAFRLLNKYRNKYCMFNDDIQGTASVAVAGILAALRITNNKLSNHVFVFQGAGEAAMGIAHLLVMALEKEGVPKAEATRKIWMVDFKGLIVKGRSHLNHEKEMFAQDHPESNSLDEVVRLVKPTAIIGVAAIAEAFTEQILRNMASFRRAPIIFALSNPPRKAECTAEKCYRVTEGPRGFFASGKSFLRSVDLESMGKTFIPGGRGNNAXRVPRGWQLGVHSPGGDPGHIPDEIFLPDSRAKLPQEVSEQHLSQGRLYPPLSTIRDVSLRIAIKVLDYAYKHNLVSYYPEPKDKEAFCKIPGSYTPDYDSFYTVDSYIWAQGKAMNVQTV

SEQ ID NO: 52249 - protein, 82 aa, Homo sapiens
GEAILGYDEGILSDDHGLAAALWRTFFNRKCEDPRHLELLVEYVRKQIQYLDSMNGEDLLLTGEVSWRPLVEKNPQSILKPH

SEQ ID NO: 52250 - protein, 88 aa, Homo sapiens
  misc_feature (1)...(88): Xaa = X or * as defined in Table 2
MVSYNPTPRLDVSSPNEAGRPEWEVHVSYHSSFYVGGCSAAGRVMGVNPYILKKNMILMTNHFYAAIXGYDEGILSDDHGLAAALWXN

SEQ ID NO: 52251 - protein, 97 aa, Homo sapiens
EIRDGLAWDGLVWDLGWSEAPLMPRPLPSSPLGGWFLTLAPHLCPASVASSFPLPWLQIQYLDSMNGEDLLLTGEVSWRPLVEKNPQSILKPHSPTY

SEQ ID NO: 52252 - protein, 57 aa, Homo sapiens
GCQMPDTFNSWFLITLLHVWMCLVRMKQEGRSGKYMCRIIVHFMWEDVQQRGRVMGF

SEQ ID NO: 52253 - protein, 368 aa, Homo sapiens
  misc_feature (1)...(368): Xaa = X or * as defined in Table 2
YLCLLPKGQGDRALSRTSQWPQMSQSQACGGSEQIPGIDIQLNRKYHTTRKLSTTKRFPTACWRKKVGAFTKIIEAMGFTGPLKYSKWEDLRLRALRIVYXLCGRKLDFEGFFSKCSMPDTFNSWFLINPYFHVWMCLVRMKQEGRSGKYMCRIIVHFMWEDVQQRGRVMGVNPYILKKNMILMTNHFYAAILGYDEGILSDDHGLAAALWKNLLNRKCEDPRHLELLVEYVRKQIQYLDSMNGEDLLLTGEVSWRPLVEKNPQSILKPHSPTYNDRGTFDGLGPPHGPPAGFRGTSREEKCLVGPRTPARKWPELDLLNKHLSKYLAPICVEFPLSVPQESDLLGYRAWENPLALPGCPSSLRGSPE

SEQ ID NO: 52254 - protein, 51 aa, Homo sapiens
GGGASPAACSGSPDSSHSATAGTGCRRPARPPPAPPTPTPWRSRQQGSRAS

SEQ ID NO: 52255 - protein, 133 aa, Homo sapiens
  misc_feature (1)...(133): Xaa = X or * as defined in Table 2
IVALPFGHHHSQTSPLPNLLQTAACLLLHFLLLSGVETGRPGPWQPRIRARGPPAPPGPARPAKPRRRGCRGPAREACWYGCRRPARPPPAPPTPTHGAAGSREAERASELCXGARPLRLGSAGTIMVSACVP

SEQ ID NO: 52256 - protein, 198 aa, Homo sapiens
  misc_feature (1)...(198): Xaa = X or * as defined in Table 2
KIPIISLSLKLGQASSKIIPTPQNPHLSPGTKRDSSFQPWSLSAFIITGQCCSYIVRWGLWKPRLILVVKKYAALSAEMLLVKVEEPSPAACSGSPDSSSFCNCWXPAAAGRLASAAQRPPTPNAHKRSRQQGSRASERASCKGRGRYGLGALGGRGGRALGGSRWPPPLPGETLFSGCKHRRRRRGSDAAPGEEAGT

SEQ ID NO: 52257 - protein, 97 aa, Homo sapiens
NAAPFSRHAAFQGFSWAVCIFRLPAERALRLFPASCLVLPGGPSGVAPHGWPLPTTAPPLLQGVWRVEVGEHEMAEIFSSAKKEAAGALQRPCIPVW

SEQ ID NO: 52258 - protein, 687 aa, Homo sapiens
  DOMAIN (316)..(349): PROLINE-RICH PROTEIN 3 domain identified by eMATRIX, accession number DM00215, p-value=8.780e-09, raw score of 19.43
  misc_feature (1)...(687): Xaa = X or * as defined in Table 2
MRGNTAGGPGDEKPDSTHPPWEGTLQEAQEMKKVVRFMWTSGGPDPQHWRGSGLYGQLVAQMLHIDVAQVYMDSWWPRCSTLAWLRFIWTAGGPDAPHWLRSGLGGQLVAWMLHVGVAQVYVDSWWPSCSASMWLSFMEHKQCLTLGYEVALFLQHFLSRAFVLVWVPRKEKAQVLRQGLSLTFRENPGVCVMSSYRPWLITAAADMQPSKPGGTGSYCSYWSPTDNTPRLAAACTWNLGSSHGSAPGVRTFIEAGFSPPFLAPKALALTLSDSDSRWGPNPVYAQPQPPEPAWGPNPVXGQPQPRNRPGPEPCVCSTPTAEPPWGPNPVSTPTAEPAWGPNPVYAPTPTAEPPWGPNPVXGQPQPREPAWGPNPVYGQPQPRNRPGSPPQGNLYCSAALGATDPSQSWHQCSQNLLPADKGAKREAPWPRPPSGEVDHQVWHLHGWPLPTTAPPLLQGVWRVEQTPASHHRQPRPRQSSPSTKAPPVITVNQGPASHHRQPRPRQSSPSTKAPPVITVNQGPASHHRQPRPRQSSPSTTGPASHHRQPRPRQSSPSTKAPPVITVNQGPASHHRQPRPRQSSPSTKAPPVITVNQGPASHHRQPRPRQSSPSTKAPPVITVNQGPASHHRQPRPRQSSPSTKAPPVITVNQGPASHHRQPRPRQSSTLTKAPPVITVNQSPASHHR

SEQ ID NO: 52259 - protein, 447 aa, Homo sapiens
  DOMAIN (86)..(261): Sec7 domain identified by PFam, accession name Sec7, E-value= 0.00011, PFam score of 21.2
  misc_feature (1)...(447): Xaa = X or * as defined in Table 2
RILAGPARAEAGSASDRSTGHLFPRGVGMDLCHPQPAELSSGETDELPRIXWHRKQLLEDIQKLKDEIADVFAQIDCFESAGDSRMAHKENELCIGRKKFNMDPRQGRWLWRARATGCGGCMGAPAWFLSGEGLNKTAIGTYLGERXERVEPXRGRKXRCAGVYRCVDVQALRXVVLGQGPGPQGWHSPSGWGCRDPRYCLCNPGVFQSTGARRGVGPRAPGPLQHCQAXISQTRPPFERFVSMNRGINNGSDLPEDQLRVREAQPTQPGPGESRRDLSLDGWPFFNPDREGWLLKLGERPTDTRRRTHTHARAGTHRCMHTTVSRVLLGLPLPPPLPAQPTSQPPTSRCLRLQDPECWSHWEISXTERGESRVVEGKHESYRISATSAEERDQWIESIRXGVPRSGDGFPSPSRRPCFFWVLRDSWRWHWGLVTLRVPSPAAPGDP

SEQ ID NO: 52260 - protein, 72 aa, Homo sapiens
IWGKVEKLFVFFAVPPNGLVVYCGTIVTEEGKEKKVNIDFEPFKPINTSLYLCDNKFHTEVRSQTQNIFIAP

SEQ ID NO: 52261 - protein, 382 aa, Homo sapiens
  misc_feature (1)...(382): Xaa = X or * as defined in Table 2
APARGPAVASGPSPGPAAEPVQNTETAAMTTHVTLEDALSNVDLLEELPLPDQQPCIEPPPSSIMYQANFDTNFEDRNAFVTGIARYIEQATVHSSMNEMLEEGHEYAVMLYTWRSCSRAIPQVKCNEQPNRVEIYEKTVEVLEPEVTKLMKFMYFQRKAIERFCSEVKRLCHAERRKDFVSEAYLLTLGKFINMFAVLDELKNMKCSVKNDHSAYKRAAQFLRKMADPQSIQESQNLSMFLANHNRITQCLHQQLEVIPGYEELLADIVNICVDYYENKMYLTPSEKHMLLKVMGFGLYLMDGNVSNIYKLDAKKRINLSKIDKFFKHAAGGAPFRRHADRAGQIHXDQCSLXREQVQVDVHPEQHQPPVQYLRADGSDPG

SEQ ID NO: 52262 - protein, 509 aa, Homo sapiens
  DOMAIN (144)..(472): eRF1-like proteins domain identified by PFam, accession name RF1, E-value=9.5e-97, PFam score of 334.8
  misc_feature (1)...(509): Xaa = X or * as defined in Table 2
ALVLMYLASSICMSPKRGTTCSCLERGSRCPTSEPPPPPEPPPGRSSRCRPGLGPYGGGGEKMADDPSAADRNVEIWKIKKLIKSLEAARGNGTSMISLIIPPKDQISRVAKMLADEFGTASNIKSRVNRLSVLGAITSVQQRLKLYNKVPPNGLVVYCGTIVTEEGKEKKVNIDFEPFKPINTSLYLCDNKFHTEALTALLSDDRQVWDFIVIGGSVGALFGHTPKGNTRGGPWHKFTVGIFPKKHGXEGGQSALRFARLRMEKRHNYVRKVAETAVQLFISGDKVNVAGLVLAGSADFKTELSQSDMFDQRLQSKVLKLVDISYGGENGFNQAIELSTEVLSNVKFIQEKKLIGRYFDEISQDLTGKYCFGVEDTLKALEMGAVENLIVYENLDIMRYVLHCQGTKEEKILYLTPEQEKDKSPFHDKETGQELELIESMPLLEWFANNYKKFGATLEMFTDKSQKGSPVXXKDLGGIGGILRYQSRFPGEWNTKKETMNFLTLMTTR

SEQ ID NO: 52263 - protein, 174 aa, Homo sapiens
  misc_feature (1)...(174): Xaa = X or * as defined in Table 2
VEDERVCAGPAWERQAGQERPARKVQGKAPEAEGKHGCLLDILVCTYLAEKGLSGSCGLTEALVAFGEGSSLGRKNCRDPWGSLRQEPHWSDPWSGPPERCKGKPQRRRGSTDAFWTSWSARTXPRRGSLAAVGXQRHWWPLGRAAVXEERTAETPGAPSGRSLTGQTLGSLHV

SEQ ID NO: 52264 - protein, 102 aa, Homo sapiens
LPDADLFCPACGAAAGRARSAGMRPVFAVSVARTPSPRPPPAEPQFPRLPCGSIGSPFFRDIDTIQKFPDMLSSFFFRDIDTIQKFPDMLVFNCCCLLNQSR

SEQ ID NO: 52265 - protein, 86 aa, Homo sapiens
  misc_feature (1)...(86): Xaa = X or * as defined in Table 2
RGRSRIARSASGPRPALVRPPARPPAPXTPRSWSCWSSCXPRSASATGSPSAXATDAHADSSKAMLPEPTSSISKFSTLQTVPFRL

SEQ ID NO: 52266 - protein, 190 aa, Homo sapiens
  misc_feature (1)...(190): Xaa = X or * as defined in Table 2
PSSHSVRTATYSSLRQSAVSTRTSTTTTLAFMARAGGRAGGRARVGGRTPSGQCGCPACGAAAGRARSAGMRPVFAVSVARTPSPRPPPAEPQFPRRPQRGAPAPSGGGASLPAPRALASSIPAQLMKPGRAKGSAGNLHPGEGRPGARRSDPAGAARSLACPXIWPKQTPSPLASSSSFFLSETPECAH

SEQ ID NO: 52267 - protein, 81 aa, Homo sapiens
RTPGAATASASGAAEDGACGCLPNPGTFEECHRKCKELFPIQMEGVKLTVNKGLSNHFQVNHTVALSTIGESKYHFPISSV

SEQ ID NO: 52268 - protein, 309 aa, Homo sapiens
LPEDVGLYGSAPSTSRLCDLPAGRAHRPEPDSRTLRPPTQQAQGPQGHHRGHHRRHHCYCCGCHGILICRQQRKEQTLQGAEEDEELKFLSLILHTHRPKHTVMTGSSPPPADGIYVIISRSVFWCEMQGSELQVTMHDTRGRSPPYQLDSQGRLVLADAQVANERDYVCVQSRGTEVSPNKGTLSVMEDSAQELQVGVEFEASTRMQDTSVSFGYQLDLPKANLLFKGDRHRGGTLYTACARYKARRTRSSSILSPSMACTSPRYLTKRPLTFSIFSPSRSFYACNSLDNRARISSATEVSCSSNSDL

SEQ ID NO: 52269 - protein, 276 aa, Homo sapiens
  DOMAIN (7)..(40): PROLINE-RICH PROTEIN 3 domain identified by eMATRIX, accession number DM00215, p-value=5.729e-09, raw score of 19.43
  misc_feature (1)...(276): Xaa = X or * as defined in Table 2
VTMGKVLAVSSLPAGPPPPPVPALVGLPPPPPXHPGFRLPPLGGGLGARTSVGRGLERTPGAATASAAGGAEDGACRCLPNPCTFEECHRKCKELXMEGVKFTENKALSSKMAIQTQQSKFVKWQVDGEYRGSDFTVDVTLWNPDVLMGSGILVAHYLKSITPCLALGSELVYHRRPGEEGTVMSVAGKYTLNNWLATVDVEFEASTRMQDTNVSFGYQLDLPKANLLFKGSVDSNWIVGATLEKKLPPLPLTLALGAFLNHRKNKLRSGFGLTIS

SEQ ID NO: 52270 - protein, 389 aa, Homo sapiens
  DOMAIN (48)..(69): GLUTELIN SIGNATURE domain identified by eMATRIX, accession number PR00211B, p-value=6.798e-10, raw score of 0.86
GGGSGFGCAWRTGWERSPGREQAPPPATMGNVLAASSPPAGPPPPPAPALVGLPPPPPSPPGFTLPPLGGSLGAGTSTSRSSERTPGAATASASGAAEDGACGCLPNPGTFEECHRKCKELFPIQMEGVKLTVNKGLSNHFQVNHTVALSTIGESNYHFGVTYVGTKQLSPTEAFPVLVGDMDNSGSLNAQVIHQLGPGLRSKMAIQTQQSKFVNWQVDGEYRGSDFTAAVTLGNPDVLVGSGILVAHYLQSITPCLALGGELVYHRRPGEEGTVMSLAGKYTLNNWLATVTLGQAGMHATYYHKASDQLQVGVEFEASTRMQDTSVSFGYQLDLPKANLLFKGSVDSNWIVGATLEKKLPPLPLTLALGAFLNHRKNKFQCGFGLTIG

SEQ ID NO: 52271 - protein, 140 aa, Homo sapiens
  misc_feature (1)...(140): Xaa = X or * as defined in Table 2
CYCQGILSPPPCPPFLLGSAQTSAICSWVRGVPAESSTSSFPKAPXVALESRGEAPTLHLPVTSRFLQCVSSEQECVPWKPHSSPRPRFLDISPSPTCVRLXAPGPVPFDPHQKTWRSPLGTRAQGVGPRDRDSCRIVPG

SEQ ID NO: 52272 - protein, 290 aa, Homo sapiens
  misc_feature (1)...(290): Xaa = X or * as defined in Table 2
VYGDSRWSLALSPRLECSGAISAHXNLCLPGSSDSPASRITGISGARHHAQLILYVFLVEMRFHHVGQAGLKLLTSGNPHHLGLPKCWDYSRKPPPRPPRPIIFSFFFLRWSLALVAQAGMQWDDLSSLQPLPPGFKXFSCLSLLRSWDYGCPPPRLANFVCVCVCVLVVDGGFTMLARLGLELLTSGDLPPFGLPKCLGFTGMSHCARPIFFFFEMESCFATQAGVQWCDLSSLQPLPPRFKXFSCLSLLSSWDYRHMPPCLANFCFGIFSRDRVSSCWPGRSQTPDLK

SEQ ID NO: 52273 - protein, 73 aa, Homo sapiens
  misc_feature (1)...(73): Xaa = X or * as defined in Table 2
SHQDFMRTAANLLQTGWCTGSNTGAGARWGLCRASLSRCRCAAPSAPCSGSRCSXRSWKGTHPSLPPRCRGRS

SEQ ID NO: 52274 - protein, 34 aa, Homo sapiens
ALLEKLHLGCRRCPPVPGILGLRFELSLSLSLRL

SEQ ID NO: 52275 - protein, 61 aa, Homo sapiens
MAGEASESWREAKGTSYVAAARENEEDAKAEPPTPGIKPSDLAGVVCGFSRHTMQVGSAIL

SEQ ID NO: 52276 - protein, 68 aa, Homo sapiens
  misc_feature (1)...(68): Xaa = X or * as defined in Table 2
WKAERRTRHLLQTGWCTGSNTGAGARWGLCRASLSRCRCAAPSAPRSGSRCSXRLWKGTHPSLPPRCR

SEQ ID NO: 52277 - protein, 495 aa, Homo sapiens
MMGHSSAIPLTATPGELKGQSPTKMPDPELGCQGAKSQGCSRNARHQKARSMPLQDQHLALAILLELAVQRGTLSQMLSAILLLLQLWDSRAQETDNERSAQGTSTLLLSLLQTFQSIICSKDTPPSEGNMHLLSGPLSPSESFLRESFFTVQNCRNNEEVTLICKADLENHNKDGGFWIVIDEKVYDIKDFQTQSLTGNSILAQFAGENPVVALEAAFEFEVTRESMHAFCVGQYLEVRLYALSDAEDGRGHPLMASVIHLLWRLQTSQIHYSYNEEKDEDHCSSQWAHLPANRDCSHRWALGDHSQAFLQAIADNNIQDHNVKTHQEQGRSYKEVCTPVIERLRFLSNELRPAVGNDLSIISEFKLLSSLPRWRRIAQKIIRERRKKRIPKKPESTADEEKIGNEESDLEEACILPHSPINVDKRPIAIKSPKTITSENPLGREPGEHPASPLPPDDAQHAHPAAQRKQPRPPAQFRHAGPHSDGTAPDWPQL

SEQ ID NO: 52278 - protein, 325 aa, Homo sapiens
  DOMAIN (109)..(158): Matrix protein (MA) p15. domain identified by eMATRIX, accession number PF01140C, p-value=5.404e-10, raw score of 15.21
  misc_feature (1)...(325): Xaa = X or * as defined in Table 2
AGPRRMRRISAWAVSTPLTDSPSPGHQPAGEVAGAGSFXXHPPPPCPSRYCPQMTPPPPPPAPPPALPPPPPPAPASPPLPPAPSPPPHAPPQALPPPPALPPPPPASPPLLPPALSPPLPAPPPPSAPPASPPPAPPPPPAPPPSPPPAPPPSAPSSPAPLPPAPASPPSPAPPPPAPPPAPHPPSPPAPPCPPLPRPRGPSVPQEKVHQVXIPVPPAGEGGPAPGRIWPQGWRRAGKPPTWEEALAAFPPWTALPPASAVPAQPPRAHXVAPALXWALHRRSDSDSDSSNLSPRIPGTGGQRRQPRXDSXAPACSEVAGAGSF

SEQ ID NO: 52279 - protein, 667 aa, Homo sapiens
  DOMAIN (101)..(119): CADHERIN SIGNATURE domain identified by eMATRIX, accession number PR00205B, p-value=4.353e-11, raw score of 11.39
  DOMAIN (17)..(594): Cadherin domain identified by PFam, accession name cadherin, E-value=4.9e-51, PFam score of 183.0
MIEDINDNPPHFPQNSIVLQINELAIPGIRFGLESAIDADVGPHSLQSYQLSSNEHFSLMMDKTKGKNAPELVLEKPLGQEQQSSHLLVLEAMDMGDPVPTGTAAIQIEVTDANDNAPVFSQDVYKVSLRENVPPGTSVLKVTATDQDEGVNAEITYSFKSLRDDIGNMFVLDHQNGEIKSKDLIDFEFRSSYTMRVEAKDGGGMTSECKIIVEIQIRYRIPEEMPKGSVVGNLATDLGFSVQELPTRKLRVSSEKPYFTVSAESGELLVSSRLDREEICGKKPACALEFEAVAENPLNFYHYPPFRDEELKVKVNENAAAGTRLVLPFARDADVGVNSLRSYQLSSNLHFSLDVVSGTDGQKYPELVLEQPLDREKETVHDLLLTALDGGDPVLSGTTHIRVTVLDANDNAPLFTPSEYSASTVIHYEIPEERERGFAVGNVVANLGLDLGSLSPRRVQLVSGASRRFFEVNRETGEMFVNDRLDREELCGTLPSCTVTLELVEENPLELFSVEVSAQDADVGSNSLQTYELSRNEYFALRVQTREDSTKYAQLVLERALDREREPSLQLVLTALDGGTPALSASLPIHIKVLDANDNAPVFNQSLYRARVLEDAPSGTRVVQVLATDLDEGPNGEIIYSFGSHNRAGVRQLFALDLVTGMLTIKG

SEQ ID NO: 52280 - protein, 1958 aa, Homo sapiens
  DOMAIN (389)..(407): CADHERIN SIGNATURE domain identified by eMATRIX, accession number PR00205B, p-value=4.130e-12, raw score of 11.39
  DOMAIN (304)..(1617): Cadherin domain identified by PFam, accession name cadherin, E-value=4.5e-174, PFam score of 591.7
  misc_feature (1)...(1958): Xaa = X or * as defined in Table 2
PEPFCHRAAHWSNQYCPFQFQDTDSPRQTLTVLIKDNGEPSLSTTATLTVSVTEDSPEARAEFPSGSAPREQKKNLTFYLLLSLILASVGFVVTAFGVIIFKVYKWKQSRDLYRAPVSSLYRTPGPSLHADAVRGGLMSPHLYHQVYLTTDSRRSDPLLKKPGAASPLASRQNTLRSCDPVFYRQVLGAESAPPGQIRYPVPEESQEGTFVGNVAQDFLLDTDSLSARRLQVAGEVNQRHFRVDLDSGALLIKNPIDREALCGLSASCIVPLEFVTEGPLEMYRAEVEIVDVNDHAPRFPRQQLDLEIGEAAPPGQRFPLEKAQDADVGSNSISSYRLSSNEHFALDVKKRSDGSLVPELLLEKPLDREKQSDYRLVLTAVDGGNPPRSGTAELRVSVLDVNDNAPAFQQSSYRISVLESAPAGMVLIQLNASDPDLGPSGNVTFYFSGHTPDRVRNLFSLHPTTGKLTLLGPLDFESENYYEFDVRARDGGSPAMEQHCSLRVDLLDVNDNAPYITVTSELGTLPESAEPGTVVALISVQDPDSGSNGDVSLRIPDHLPFALKSAFRNQFSLVTAGPLDREAKSSYDIMVTASDAGNPPLSTHRTIFLNISDVNDNPPSFFQRSHEVFVPENNRPGDLLCSLAASDPDSGLNALISYSLLEPRNRDVSASSFISLNPQTGAVHATRSFDYEQTQTLQFEVQARDRGNPPLSSTVTVRLFVLDLNDNAPAVLRPRARPGSLCPQALPPSVGAGHLITKVTAVDLDSGYNAWVSYQLLEAPDPSLFAVSRYAGEVRTAVPIPADLPPQKLVIVVKDSGSPPLSTSVTLLVSLEEDTHPVVPDLRESSAPREGESRLTLYLAVSLVAICFVSFGSFVALLSKCLRGAACGVTCFPAGTCACLTRSRRREGLPPSNGILRIQLGSDDPIKFVDVGGHSHGCTPLASAPTRSDSFMMVKSPSAPMAGEPVRPSCPPSDLLYGLELRYSVVEESEPGTLVGNVAQDLGLKMTDLLSRRLQLGSEENGRYFSLSLMSGALAVNQKIDRESLCGASTSCLLPVQVVTEHPLELIRVEVEILDLNDNSPSFATPEREMRISESAASGARFPLDSAQDPDVGTNTVSFYTLSPNSHFSLNVKTLKDGKPFPELVLEQQLDREAQARHQLVLTAVDGGTPARSGTTLISVIVLDINDNAPTFQSSVLRVGIPENAPIGTLLLRLNATDPDEGTNGQLDYSFGDHTSEAVRNLFGLDPSSGAIHVLGPIDFEESRFYEIHARARDQGQPAMEGHCVIQVDVGDVNDNAPEVLLASLANPVLESTPVGTVVGLFNVRDRDSGRNGEVSLDISPDLPFQIKPSENHYSLLTSQPLDREATSHYIIELLASDAGSPSLHKHLTIRLNISDVNDNAPRFNQQLYTAYILENRPPGSLLCTVAASDPDTGDNARLTYSIVGNQVQGAPASSFVYVNPEDGRIFAQRTFDYELLQMLQIVVGVRDSGSPPLHANTSLHVFVLDENDNAPAVLHPRPDWEHSAPQRLPRSAPPGSLVTKVTAVDADAGHNAWLSYSLLPQSTAPGLFLVSTHTGEVRTARALLEDDSDTQQVVVLVRDNGDPSLSSTATVLLVLEDEDPEEMPKSSDFLIHPPERSDLTLYLIVALATVSLLSLVTFTFLSAKCLQGNADGDGGGGQCCRRQDSPSPDFYKQSSPNLQVSSDGTLKYMEVTLRPTDSQSHCYRTCFSPASDGSDFTFLRPLSVQQPTALALEPDAIRSRSNTLRERSQQAPPNTDWRFSQAQRPGTSGPYTGFEAEFTIEPGSPTNCLSCVLWGEHLTPASTPIPSNERLSGLEYMWELLEIWRRSSQNGDDTGTWPNNQFDTEMLQAMILASASEAADGSSTLGGGAGTMGLSARYGPXFTLQHVLQGELGSDYRQNVYIPGSNATLTNAAGKRDGKAPAGGNGNKKKSGKKEKK

SEQ ID NO: 52281 - protein, 77 aa, Homo sapiens
  misc_feature (1)...(77): Xaa = X or * as defined in Table 2
PQPSQVMSFHGDSGSCRRWATAGTXATSPPCSSSIFLRRMHSGHWCSCWPVRGTPCRDFTAQMAGPSRGSKTNRSMW

SEQ ID NO: 52282 - protein, 159 aa, Homo sapiens
  DOMAIN (68)..(117): kw TRANSCRIPTASE REVERSE II ORF2 domain identified by eMATRIX, accession number DM01354Z, p-value=1.173e-40, raw score of 9.06
  misc_feature (1)...(159): Xaa = X or * as defined in Table 2
EKTHKTCRCGRGCGKRGTLXHCWWECNLLQPLWKMVWKWLKELKVELLCDLAVPLLGINPEEKKSLYEKDTCTRLFMAAQLAIAKKWNQPKCPSINKWLQKLWYIYMMEYYSAIKRNLTAFAATWMRLETIILSQGDPLESTCSRSQANRQEITSVPKA

SEQ ID NO: 52283 - protein, 59 aa, Homo sapiens
  misc_feature (1)...(59): Xaa = X or * as defined in Table 2
DAEAWAMELADVGAXASSQGAPQPEEPAASLGVNEKGGAGGRSGRRPLGRDRPRPTRLL

SEQ ID NO: 52284 - protein, 760 aa, Homo sapiens
  DOMAIN (74)..(449): impB/mucB/samB family domain identified by PFam, accession name IMS, E-value=2.2e-57, PFam score of 204.1
  misc_feature (1)...(760): Xaa = X or * as defined in Table 2
MEKLGVEPEEEGGGDDEEDAEAWAMELADVGAAASSQGAPQPEEPAASLGVNEKGVHDQVLPTPNASSRVIVHVDLDCFYAQVEMISNPELKDKPLGVQQKYLVVTCNYEARKLGVKKLMNVRDAKEKCPQLVLVNGEDLTRYREMSYKVTELLEEFSPVVERLGFDENFVDLTEMVEKRLQQLQSDELSAVTVSGHVYNNQSINLLDVLHIRLLVGSQIAAEMREAMYNQLGLTGCAGVASNKLLAKLVSGVFKPNQQTVLLPESCQHLIHSLNHIKEIPGIGYKTAKCLEALGINSVRDLQTFSPKILEKELGISVAQRIQKLSFGEDNSPVILSGPPQSFSEEDSFKKCSSEVEAKNKIEELLASLLNRVCQDGRKPHTVRLIIRRYSSEKHYGRESRQCHIPSHVIQKLGTGNYDVMPPMVDILMKLFRNMVNVKMPFRLTLLSMCFCSLKAVNTATTRLIDYYLMPTISITSRSGKHSFKMKDTHMEDFPKDKETNRDFLPSGRIESTRTRESPLDTTNFSKEKDINEFPLCSLPEGVDQEVFKQLPVDIQEEILSGKSREKFQGKGSVSCPLHASRGVLSFFSKKQMQDIPINPRDHLSSSKQVSSVSPCEPGTSGFNSSSSSYMSSQKDYSYYLDNRLKDERISQGPKEPQGFHFTNSNPAVSAFHSFPNLQSEQLFSRNHTTDSHKQTVATDSHEGLTGKXEEPDSVDEKITFPPPDIGPLKFSYELPEAVQRGTCLAEWKRAGSDFHIGHK

SEQ ID NO: 52285 - protein, 46 aa, Homo sapiens
EQFLRRQIASEKEEIERLKAEIAEIQSRQQHGRSETEEYSSLLLQF

SEQ ID NO: 52286 - protein, 70 aa, Homo sapiens
  misc_feature (1)...(70): Xaa = X or * as defined in Table 2
MHQAKVTTFDQPSEKAFAGPRSEEWQERAASSPLDSRRPRRLLRWTSPSYPCWAMLCRLLAXLWLLFSCF

SEQ ID NO: 52287 - protein, 99 aa, Homo sapiens
LVRAAPGGCSLAHSPLSFCSSKPQSISPSHQDGLSGHRQGLPVEPAHRPPAVQSSGEEAARSCQFLTAGTSKGLLTGLVKGSHLGLVHPQRMLFKPEIF

SEQ ID NO: 52288 - protein, 407 aa, Homo sapiens
  DOMAIN (140)..(181): PROTEIN GTPASE DOMAIN ACTIVATION domain identified by eMATRIX, accession number PD00930B, p-value=4.549e-10, raw score of 33.72
  misc_feature (1)...(407): Xaa = X or * as defined in Table 2
QRRPRPFPSQGISMTECFLPPTSSPSEHRRVEHGSGLTRTPSSEEISPTKFPGLYRTGEPSPPHDILHEPSXSNGLMDEKDHGKKKGNFKKKEKRTEGYAAFQEDSSGDEAEKLMPRFEEAYGRTTETEKVQEFQRLLKELPEGNYLLISLFVVHMDHVITKELEAKMNIQNIYIVVSPTVQISNLVLYVFFTHVQELFGNVVLKQVTKTRRWSNVATMPTLPETQAGFKEEIRIQELLLNCLHQDLQGGIKDLSEEERLWEEKEILTKQEELLGMEQFLRRQIASEKEEIECLRAETAEIQSHQQQGLSETEEYSSESESEDEEELQIILEDLQRQNEELEIKNNHLNQAIHEESEAVIEPRMQPWLLQLQPDRAKQQAQEDEEPEWRGGAMQTPKNGILEPVAAK

SEQ ID NO: 52289 - protein, 675 aa, Homo sapiens
  DOMAIN (228)..(254): PROTEIN GTPASE DOMAIN ACTIVATION domain identified by eMATRIX, accession number PD00930A, p-value=2.029e-16, raw score of 25.62
  DOMAIN (235)..(381): RhoGAP domain identified by PFam, accession name RhoGAP, E- value=2.5e-39, PFam score of 144.1
  misc_feature (1)...(675): Xaa = X or * as defined in Table 2
VTEKTSSLPSQGISMTECFLPPTSSPSEHRRVEHGSAGLTPGPPASEEIQPLPKFPGLYRTGEPPHPPPXHPSHEPSLMXCPDDEKDHGKKKGKFKKKEKRTEGYAAFQEDSSGDEAESPSKMKRSKGIHVFKKPSFSKKREKDFKIKEKPKEEKHKEEKHKEEKHKEKKSKDLTAADVVKQWKEKKKKKKPIQEPEVPQIDVPNLKPIFGIPLADAVERTMMYDGIRLPAVFRECIDYVEKYGMKCEGIYRVSGIKSKVDELKAAYDREESTNLEDYEPNTVASLLKQYLRDLPENLLTKELMPRFEEACGRTTETEKVQEFQRLLKELPECNYLLISWLIVHMDHVIAKELETKMNIQNISIVLSPTVQISNRVLYVFFTHVQELFGNVVLKQVMKPLRWSNMATMPTLPETQAGIKEEIRRQEFLLNCLHRDLQGGIKDLSKEERLWEVQRILTALKRKLREAKRQECETKIAQEIASLSKEDVSKEEMNENEEVINILLAQENEILTEQEELLAMEQFLRRQIASEKEEIERLRAEIAEIQSRQQHGRSETEEYSSESESESEDEEELQIILEDLQRQNEELEIKNNHLNQAIHEEREAIIELRVQLRLLQMQRAKAEQQAQEDEEPEWRGGAVQPPRDGVLEPKAAKEQPKAGKEPAKPSPSRDRKETSI

SEQ ID NO: 52290 - protein, 97 aa, Homo sapiens
  misc_feature (1)...(97): Xaa = X or * as defined in Table 2
MENKAKGTGVQLLTPDSWNIPLTDARRKAPSPVATAGQSQGPGPSASTTVSPSDTANCSVTKIPTPVPKSIPISETPNIPPVSDPARAVPRDRAPTX

SEQ ID NO: 52291 - protein, 470 aa, Homo sapiens
  DOMAIN (333)..(355): PROSTANOID EP1 RECEPTOR SIGNATURE domain identified by eMATRIX, accession number PR00580E, p-value=5.800e-09, raw score of 7.15
  misc_feature (1)...(470): Xaa = X or * as defined in Table 2
QMLGGRPPPRWLQLAKARALARRRPPPSLHLTLPTALSLKSRTPVPKSIPISETPNIPPVSVQPPASIGPPLGVPPPEPSHGDDQPRPGPLPIFMEQQIMQQIRPPFIRGPPPMPPTPTAPCPTPCFPASGPRPVAPETWAPLPAPCTGPCYPPHPPPEPPPPSPGNPPGLLPPPPPGAPLPSLPFPPVSMMPNGPMPVPQMMNFGLPSLAPLVPPPTLLVPYPVIVPLPVPIPIPIPIPPSATPSPPTGSPATGRTSFRTPLATPRRRAASQADTPCPPGTPSRARPSPRTRPPAARARPXAWRPRPPSMAGARWWTXRGAPAPPGPPGRGRPARLPRRAAGPAGRRHRPDRGPPSPAAQRDPPRAAPRTSRRSASRAPRSAGPAAAAGTATAARPPPATQARAPRRAPRRPRPATSSXTARAAPPPSGAKSAEPPPEQPPPPPPPAPPKKLLSPEEPAVMRARVGQGE

SEQ ID NO: 52292 - protein, 427 aa, Homo sapiens
  DOMAIN (88)..(143): Domain present in ZO-1 and Unc5-like netrin receptors domain identified by eMATRIX, accession number PF00791B, p-value=2.943e- 14, raw score of 28.49
  DOMAIN (87)..(153): Ank repeat domain identified by PFam, accession name ank, E- value=1.6e-10, PFam score of 48.4
  misc_feature (1)...(427): Xaa = X or * as defined in Table 2
RSSFSMGADLLACSTSGLGNMPYDLLRGMEPTLGCSFEDLALAXPGGITQEKINEMRVAPEQQMIADIHFMIAAGQDLDWIDAQGATLLHIAGANGYLRAAELLLDHGVRVDVKDWDGWEPLHAAAFWGQMQMAELLVSHGANLNARTSMDEMPIDLCEEEEFKVLLLELKHKHDVIMKSQLRHKSSLSRRTSHRQASSVGKVVRRTQPVGTGPNLYRKEYEGEEAILWQRSAAEDQRTSTYNGDIRETRTDQENKDPNPRLEKPVLLSEFPTKIPRGELDMPVENGLRAPVSAYQYALANGDVWKVHEVPDYSMAYGNPGVADATPPWSSYKEQSPQTLLELKRQRAAAKLLSHPFLSTHLGSSMARTGESSSEGKAPLIGGRTSPYSSNGTSVYYTVTSGDPPLLKFKAPIEEMEEKVHGCCRIS

SEQ ID NO: 52293 - protein, 102 aa, Homo sapiens
  DOMAIN (8)..(25): Adenylate kinase proteins domain identified by eMATRIX, accession number BL00113A, p-value=4.600e-09, raw score of 12.74
  DOMAIN (6)..(100): Phosphoribulokinase domain identified by PFam, accession name PRK, E-value=1.9e-21, PFam score of 78.7
SKEAFAIGLGGGSASGKTTVARMIIEALDVPWVVLLSMDSFYKNAFDFDLIISTLKKLKQGKSVKAPIYDFTTLSRKMDWKTLYGANVIIFEGIMAFADKTL

SEQ ID NO: 52294 - protein, 125 aa, Homo sapiens
  DOMAIN (71)..(89): URIDINE KINASE SIGNATURE domain identified by eMATRIX, accession number PR00988A, p-value=2.095e-09, raw score of 6.39
  DOMAIN (78)..(111): Phosphoribulokinase domain identified by PFam, accession name PRK, E-value=3.2e-05, PFam score of 21.7
EHGTQSKEAFAIGESSGGVGPAAGRLPPAPLQCLWSRRRKPGNRRQRQRDGHLWDLSVPAACLFLTEGLHSRRQAWEGGSASGKTTVARMIIEALDVPWVVLLSMDSFYKVGPRPAPPRTPLSSP

SEQ ID NO: 52295 - protein, 291 aa, Homo sapiens
  misc_feature (1)...(291): Xaa = X or * as defined in Table 2
GDVSPQLSPRQKSGPLCTSCCAWPVCSPHSDAQPSCGEGGLWEKTPFLSVPHRFVPRAALASAHQCHPLPRTLSVLKSTPQVRGMHTIIRDKETSRDEFIFYSKRLMRLLIEHALSFLPFQDCVVQTPQGQDXRITGVSILRAGETMEPALRAVCKDVRIGTILIQTNQLTGEPELHYLRLPKDISDDHVILMDCTVSTGAAAMMAVRVLLDHDVPEDKIFLLSLLMAEMGVHSVAYAFPRVKKSSPRRWDKAGQLTFFRIIPGIGNFGDRYFGTDAVPDGSDEEEVAYTG

SEQ ID NO: 52296 - protein, 890 aa, Homo sapiens
  DOMAIN (273)..(289): URIDINE KINASE SIGNATURE domain identified by eMATRIX, accession number PR00988C, p-value=5.605e-13, raw score of 13.64
  DOMAIN (199)..(511): Phosphoribulokinase domain identified by PFam, accession name PRK, E-value=2e-61, PFam score of 217.5
  misc_feature (1)...(890): Xaa = X or * as defined in Table 2
FLVETGLHHVGQAGLKLLTSNDPPASASQSTGITGMSHHAQPRQSSYVPPMSLPASAMPVEGVGGDALWAGHASGYLGGGQLWATSEYIPLCSSNAESLDRLLPPVGTGRSPRKRTTRQCKSEPPLLRTSKRTIYTAGRPPWYNEHGTQSKEAFAIVPVEQEKEAGQPQAAAAGWAPLGPICAGSLPVPHRGSPLPPAGLGGGSASGKTTVARMIIEALDVPWGGSSLSMDSFYKVLTEQQQEQAAHNNCNFDHPDAFDFDLIISTLKKLKHGKSVKVPIYDFTTHSRKKDWKTLYGANVIIFEGIMAFADKTLLEGPGPAPCTGPEDSIIRHIAAPSLHKASSRANYCVLSMGTDPKLATSPIPQCVGASYPKQRCPGEVALARPTDQAASVQGLVPVSPCPLLASGHSLARCLHQLLDMKIFVDTDSDIRLVRRLRRDISERGRDIEGVIKQYNKFVKPSFDQYIQPTMRLADIVVPRGSGNTVGHRPXLLQHVHSQLEEVSGVPRPHGLAPSPSTHFSAATTPSWPVHLIPLRSLSPASSSSQPAQLCQQELGNCSKKLGLGRGRIPLSLPKGRHAGGAALASAHQCHPLPRTLSVLKSTPQVRGMHTIIRDKETSRDEFIFYSKRLMRLLIEHALSFLPFQDCVVQTPQGQDYAGKCYAGKQITGVSILRAGETMEPALRAVCKDVRIGTILIQTNQLTGEPELHYLRLPKDIQRYHVILMDLHRVTTGAAAMMAVRVLLDHDVPEDKIFLLSLLMAKMGVHSVAXAFPRVRIITTAVDKRVNDLFRIIPGIGNFGDRYFGTDAVPDGSDEEEVAYTGPAHPAFRAGPPRAPREESPPWFTEEEEAPVSFCVEVHGQKRGVLGAWHLDYAGSRILDRGLLTKGGTA

SEQ ID NO: 52297 - protein, 93 aa, Homo sapiens
DDSSSEEERRVTTRVIRRRLIIKGEEAKNIPGESVTEEQFTDEEGNLITRKITRKVLRRIVIPQERKRDDVQGEGFKVKTKKEIRHVEKKSHS

SEQ ID NO: 52298 - protein, 362 aa, Homo sapiens
MNDLCQAYAPPAGDTFSQSSDPYPRERKTFWKKGGYTKWREEVWGLGKALGQVMVILHTEYKVILNVNTEVYRVITAMNRRSPNAITLARSCHTITREVVFFVRTRQHSLFIEDAAAALLMEMWKAQGLLESKGTTRGCRVECHIVSGQSVIRMSTIARGHRKDGHFSSMTVCSLLMRYWNIHTPITKDSLAKKEVVQLEWTSGADTFKREAFDVGLLSTSAGEDAMTGDTDKYLGPQDLKELGDDSLPAEGYMGFSLGARSASSDRSYTLNRSSYARDSMMIEELLVPSKEQAAAAIDNDSSDGCGQSKLNAFWKGFTILDAIKNIHDSWEVKIAALTEVWKKVTPVLMDDYEDSRLQWRK

SEQ ID NO: 52299 - protein, 166 aa, Homo sapiens
  DOMAIN (25)..(41): Ank repeat proteins domain identified by eMATRIX, accession number PF00023A, p-value=7.000e-11, raw score of 16.03
  DOMAIN (20)..(52): Ank repeat domain identified by PFam, accession name ank, E- value=1e-06, PFam score of 35.8
MDIATTLLEYGADANAVTRQGIASVHLAAQEGHVDMVSLLLGRNANVNLSNKIGEVVGNFEGTCEDCSLNSSNTHAVIFDMLIIHEEKTRVLSSKVKVQPTINQKLVNEVTASPSDALTSVLTKINRIDIVTLLEGPIFDYGNISGTRSFADENNVFHDPVDGNRI

SEQ ID NO: 52300 - protein, 1097 aa, Homo sapiens
  DOMAIN (324)..(337): REPEAT PROTEIN ANK NUCLEAR ANKYR domain identified by eMATRIX, accession number PD00078B, p-value=6.478e-09, raw score of 13.14
  DOMAIN (29)..(424): Ank repeat domain identified by PFam, accession name ank, E- value=7.2e-155, PFam score of 527.9
LHLQVLSLEMNLRCDLLDKKANPNAKALNGFTPLHIACKKNRIKVMELLLKHGASIQAVTESGLTPIHVAAFMGHVNIVSQLMHHGASPNTTNVRGETALHMAARSGQAEVVRYLVQDGAQVEAKAKDDQTPLHISARLGKADIVQQLLQQGASPNAATTSGYTPLHLSAREGHEDVAAFLLDHGASLSITTKKGFTPLHVAAKYGKLEVANLLLQKSASPDAAGKSGLTPLHVAAHYDNQKVALLLLDQGASPHAAAKNGYTPLHIAAKKNQMDIATTLLEYGADANAVTRQGIASVHLAAQEGHVDMVSLLLGRNANVNLSNKSGLTPLHLAAQEDRVNVAEVLVNQGAHVDAQTKMGYTPLHVGCHYGNIKIVNFLLQHSAKVNAKTKNGYTPLHQAAQQGHTHIINVLLQNNASPNELTVNGNTALGIARRLGYISVVDTLKIVTEETMTTTTVTEKHKMNVPETMNEVLDMSDDEGEDAMTGDTDKYLGPQDLKELGDDSLPAEGYMGFSLGARSASDRSYTLNRSSYARDSMMIEELLVPSKEQHLTFTREFDSDSLRHYSWAADTLDNVNLVSSPIHSGFLVSFMVDARGGSMRGSRHHGMRIIIPPRKCTAPTRITCRLVKRHKLANPPPHGERRGISSRLVEMGPAGAQFLGPVIVEIPHFGSMRGKERELIVLRSENGETWKEHQFDSKNEDLTELLNGMDEELDSPEELGKKRICRIITKDFPQYFAVVSRIKQESNQIGPEGGILSSTTVPLVQASFPEGALTKRIRVGLQAQPVPDEIVKKILGNKATFSPIVTVEPRRRKFHKPITMTIPVPPPSGEGVSNGYKGDTTPNLRLLCSITGGTSPAQWEDITGTTPLTFIKDCVSFTTNVSARFWLADCHQVLETVGLATQLYRELICVPYMAKFVVFAKMNDPVESSLRCFCMTDDKVDKTLEQQENFEEVARSKDIEVLEGKPIYVDCYGNLAPLTKGGQQLVFNFYSFKENRLPFSIKIRDTSQEPCGRLSFLKEPKTTKGLPQTAVCNLNITLPAHKKIEKTDRRQSFASLALRKRYSYLTEPGMSEFPDTSTNPGQCFRRRDIFSMRSKL

SEQ ID NO: 52301 - protein, 551 aa, Homo sapiens
  DOMAIN (450)..(541): ZU5 domain identified by PFam, accession name ZU5, E-value= 1.8e-35, PFam score of 131.3
MKEDLMRMTAILQTDVPEEKPFQPELPKEGRIDDEEPFKIVEKVKEDLVKVSEILKKDVCVDNKGSPKSPKSDKGHSPEDDWIEFSSEEIREARQQAAASQSPSLPERVQVKAKAASEKDYNLTKVIDYLTNDIGSSSLTNLKYKFEDAKKDGEERQKRVLKPAIALQEHKLKMPPASMRTSTSEKELCKMADSFFGTDTILESPDDFSQHDQDKSPLSDSGFETRSEKTPSAPQSAESTGPKPLFHEVPIPPVITETRTEVVHVIRSYDPSAGDVPQTQPEEPVSPKPSPTFMELEPKPTTSSIKEKVKAFQMKASSEEDDHNRVLSKGMRVKEETHITTTTRMVYHSPPGGEGASERIEETMSVHDIMKAFQSGRDPSKELAGLFEHKSAVSPDVHKSAAETSAQHAEKDNQMKPKLERIIEVHIEKGNQAEPTEVIIRETKKHPEKEMFLVSFMVDARGGSMRGSRHHGMRIIIPPRKCTAPTRITCRLVKRHKLANPPPMVEGEGLASRLVEMGPAGAQFLGIFVNQIVDLITFVFKTFSGFSVQTG

SEQ ID NO: 52302 - protein, 572 aa, Homo sapiens
  DOMAIN (337)..(390): Domain present in ZO-1 and Unc5-like netrin receptors domain identified by eMATRIX, accession number PF00791E, p-value=1.000e- 40, raw score of 25.76
MDSNTRENKGNFHGYDEGRPKSTSVCSGPTRNMTSYPSLQVELETPTGLHYTPPTPFQQDDYFSDISSIESPLRTPSRLSDGLVPSQGNIEHSADGPPVVTAEDASLEDSKLEDSVPLTEMPEARDVDESQLENVCLKPRKLGVSSEQQEKGKSGPDEEMMEEKLKSLFEDIQLEEGVESEEMTEEKVQAILKRVQQAELEMSSITGWQNETSSGNLESCAQARRVTGGLLDRLDDSHFSTRECPKPRNAATLTDSLIHSFGRFWENKGEFPGLPELDSPEELGKKRICRIITKDFPQYFAVVSRIKQESNQIGPEGGILSSTTVPLVQASFPEGALTKRIRVGLQAQPVPDEIVKKILGNKATFSPIVTVEPRRRKFHKPITMTIPVPPPSGEDCHQVLETVGLATQLYRELICVPYMAKFVVFAKMNDPVESSLRCFCMTDDKVDKTLEQQENFEEVARSKDIEVLEGKPIYVDCYGNLAPLTKGGQQLVFNFYSFKENRLPFSIKIRDTSQEPCGRLSFLKEPKTTKGLPQTAVCNLNITLPAHKKSPNGHILFRVAREGRIPLSGAST

SEQ ID NO: 52303 - protein, 4397 aa, Homo sapiens
  DOMAIN (4113)..(4129): Death domain proteins profile domain identified by eMATRIX, accession number BL50017B, p-value=5.263e-11, raw score of 17.60
  DOMAIN (80)..(806): Ank repeat domain identified by PFam, accession name ank, E- value=7.4e-245, PFam score of 826.8
  misc_feature (1)...(4397): Xaa = X or * as defined in Table 2
EDLFKCIMAHAASQLKKNRDLEINAEEEPEKKRKHRKRSRDRKKKSDANASYLRAARAGHLEKALDYIKNGVDINICNQNGLNALHLASKEGHVEVVSELLQREANVDAATKKGNTALHIASLAGQAEVVKVLVTNGANVNAQSQNGFTPLYMAAQENHLEVVKFLLDNGASQSLATEDGFTPLAVALQQGHDQVVSLLLENDTKGKVRLPALHIAARKDDTKAAALLLQNDNNADVESKSGFTPLHIAAHYGNINVATLLLNRAAAVDFTARNDITPLHVASKRGNANMVKLLLDRGAKIDAKTRDGLTPLHCGARSGHEQVVEMLLDRAAPILSKTKNGLSPLHMATQGDHLNCVQLLLQHNVPVDDVTNDYLTALHVAAHCGHYKVAKVLLDKKANPNAKALNGFTPLHIACKKNRIKVMELLLKHGASIQAVNRGRGPLPPIHVAAFMGYVNIVSQLMHHGASPNTTNVRGETALHMAARSGQAEVVRYLVQDGAQVEAKAKDDQTPLHISARLGKADIVQQLLQQGASPNAATTSGYTPLHLSAREGHEDVAAFLLDHGASLSITTKKGFTPLHVAAKYGKLEVANLLLQKSASPDAAGKSGLTPLHVAAHYDNQKVALLLLDQGASPHAAAKNGYTPLHIAAKKNQMDIATTLLEYGADANAVTRQGIASVHLAAQEGHVDMVSLLLGRNANVNLSNKSGLTPLHLAAQEDRVNVAEVLVNQGAHVDAQTKMGYTPLHVGCHYGNIKIVNFLLQHSAKVNAKTKNGYTPLHQAAQQGHTHIINVLLQNNASPNELTVNGNTALGIARRLGYISVVDTLKIVTEETMTTTTVTEKHKMNVPETMNEVLDMSDDEVRKANAPEMLSDGEYISDVEEGEDAMTGDTDKYLGPQDLKELGDDSLPAEGYMGFSLGARSASLRSFSSDRSYTLNRSSYARDSMMIEELLVPSKEQHLTFTREFDSDSLRHYSWAADTLDNVNLVSSPIHSGFLVSFMVDARGGSMRGSRHHGMRIIIPPRKCTAPTRITCRLVKRHKLANPPPHGERRGISSRLVEMGPAGAQFLGPVIVEIPHFGSMRGKERELIVLRSENGETWKEHQFDSKNEDLTELLNGMDEELDSPEELGKKRICRIITKDFPQYFAVVSRIKQESNQIGPEGGILSSTTVPLVQASFPEGALTKRIRVGLQAQPVPDEIVKKILGNKATFSPIVTVEPRRRKFHKPITMTIPVPPPSGEGVSNGYKGDTTPNLRLLCSITGGTSPAQWEDITGTTPLTFIKDCVSFTTNVSARFWLADCHQVLETVGLATQLYRELICVPYMAKFVVFAKMNDPVESSLRCFCMTDDKVDKTLEQQENFEEVARSKDIEVLEGKPIYVDCYGNLAPLTKGGQQLVFNFYSFKENRLPFSIKIRDTSQEPCGRLSFLKERKTTKGLPQTAVCNLNITLPAHKKETESDQDDEIEKTDRRQSFASLALRKRYSYLTEPGMIERSTGATRSLPTTYSYKPFFSTRPYQSWTTAPITVPGPAKSGFTSLSSSSSNTPSASPLKSIWSVSTPSPIKSTLGASTTSSVKSISDVASPIRSLRTMSSPIKTVVSQSPYNIQVSSGTLARAPAVTEATPLKGLASNSTFSSRTSPVTTAGSLLERSSITMTPPASPKSNINMYSSSLPFKSIITSAAPLISSPLKSVVSPVKSRVDVISSAKITMASSLSSPVKQMPGHAEVALVNGSISPLKYASSSTLINGCKATATLQEKISSATNSVSSVVSAATDTVEKVFSTTTAMPFSPLRSYVSAAPSAFQSLRTPSASALYTSLGSSISATTSSVTSSIITVPVYSVVNVLPEPALKKLPDSNSFTKSAAALLSPIKTLTTETHPQPHFSRTSSPVKSSLFLAPSALKLSTPSSLSSSQEILKDVAEMKEDLMRMTAILQTDVPEEKPFQPELPKEGRIDDEEPFKIVEKVKEDLVKVSEILKKDVCVDNKGSPKSPKSDKGHSPEDDWIEFSSEEIREARQQAAASQSPSLPERVQVKAKAASEKDYNLTKVIDYLTNDIGSSSLTNLKYKFEDAKKDGEGGQKRVLKPAIALQEHKLKMPPASMRTSTSEKELCKMADSFFGTDTILESPDDFSQHDQDKSPLSDSGFETRSEKTPSAPQSAETTGPKPLFHEVPIPPVITETRTEVVHVIRSYDPSAGDVPQTQPEEPVSPKPSPTFMELEPKPTTSSIKEKVKAFQMKASSEEDDHNRVLSKGMRVKEETHITTTTRMVYHSPPGGEGASERIEETMSVHDIMKAFQSGRDPSKELAGLFEHKSAVSPDVHKSAAETSAQHAEKDNQMKPKLERIIEVHIEKGNQAEPTEVIIRETKKHPEKEMYVYQKDLSRGDINLKDFLPEKHDAFPCSEEQGQQEEEELTAEESLPSYLESSRVNTPVSQEEDSRPSSAQLISDDSYKTLKLLSQHSIEYHDDELSELRGESYRFAEKMLLSEKLDVSHSDTEESVTDHAGPPSSELQGSDKRSREKIATAPKKEILSKIYKDVSENGVGKVSKDEHFDKVTVLHYSGNVSSPKHAMWMRFTEDRLDRGREKLIYEDRVDRTVKEAEEKLTEVSQFFRDKTEKLNDELQSPEKKARPKNGKEYSSQSPTSSSPEKVLLTELLASNDEWVKARQHGPDGQGFPKAEEKAPSLPSSPEKMVLSQQTEDSKSTVEAKGSISQSKAPDGPQSGFQLKQSKLSSIRLKFEQGTHAKSKDMSQEDRKSDGQSRIPVKKIQESKLPVYQVFAREKQQKAIDLPDESVSVQKDFMVLKTKDEHAQSNEIVVNDSGSDNVKKQRTEMSSKAMPDSFSEQQAKDLACHITSDLATRGPWDKKVFRTWESSGATNNKSQKEKLSHVLVHDVRENHIGHPESKSVDQKNEFMSVTERERKLLTNGSLSEIKEMTVKSPSKKVLYREYVVKEGDHPGGLLDQPSRRSESSAVSHIPVRVADERRMLSSNIPDGFCEQSAFPKHELSQKLSQSSMSKETVETQHFNSIEDEKVTYSEISKGSKHQSYVGLCPPLEETETSPTKSPDSLEFIPGKESPSSDVFDHSPIDGLEKLAPLAQTEGGKEIKTLPVYVSFVQVGKQYEKEIQQGGVKKIISQECKTVQETRGTFYTTRQQKQPPSPQGSPEDDTLEQVSFLDSSGKSPLTPETPSSEEVSYEFTSKTPDSLIAYIPGKPSPIPEVSEESEEEEQAKSTSLKQTTVEETAVEREMPNDVSKDSNQRPKNNRVAYIEFPPPPPLDADQIESDKKHHYLPEKEVDMIEVNLQDEHDKYQLAEPVIRVQPPSPVPPGADVSDSSDDESIYQPVPVKKYTFKLKEVDDEQKEKPKASAEKASNQKELESNGSGXDNEFGLGLDSPQNEIAQNGNNDQSITECSIATTAEFSHDTDATEIDSLDGYDLQDEDDGLTESDSKLPIQAMEIKKDIWNTEGILKPADRSFSQSKLEVIEEEGKVGPDEDKPPSKSSSSEKTPDKTDQKSGAQFFTLEGRHPDRSVFPDTYFSYKVDEEFATPFKTVATKGLDFDPWSNNRGDDEVFDSKSREDETKPFGLAVEDRSPATTPDTTPARTPTDESTPTSEPNPFPFHEGKMFEMTRSGAIDMSKRDFVEERLQFFQIGEHTSEGKSGDQGEGDKSMVTATPQPQSGDTTVETNLERNVETPTVEPNPSIPTSGECQEGTSSSGSLEKSAAATNTSKVDPKLRTPIKMGISASTMTMKKEGPGEITDKIEAVMTSCQGLENETITMISNTANSQMGVRPHEKHDFQKDNFNNNNNLDSSTIQTDNIMSNIVLTEHSAPTCTTEKDNPVKVSSGKKTGVLQGHCVRDKQKVLGEQQKTKELIGIRQKSKLPIKATSPKDTFPPNHMSNTKASKMKQVSQSEKTKALTTSSCVDVKSRIPVKNTHRDNIIAVRKACATQKQGQPEKGKAKQLPSKLPVKVRSTCVTTTTTTATTTTTTTTTTTTSCTVKVRKSQLKEVCKHSIEYFKGISGETLKLVDRLSEEEKKMQSELSDEEESTSRNTSLSETSRGGQPSVTTKSARDKKTEAAPLKSKSEKAGSEKRSSRRTGPQSPCERTDIRMAIVADHLGLSWTELARELNFSVDEINQIRVENPNSLISQSFMLLKKWVTRDGKNATTDALTSVLTKINRIDIVTLLEGPIFDYGNISGTRSFADENNVFHDPVDGWQNETSSGNLESCAQARRVTGGLLDRLDDSPDQCRDSITSYLKGEAGKFEANGSHTEITPEASTKSTFPESQSDVGKQSTQGKLLKPKIHGSGHVEEPASPLAAYPEILLEENPASLIIEETKPLCAPVKYEKRXSRTSPPSQNGKPRLRLPWKEGGVPVGFEAKGRGGRFLRVKTKKEIRHVEKKSHS

SEQ ID NO: 52304 - protein, 120 aa, Homo sapiens
  DOMAIN (26)..(44): Cadherins extracellular repeat proteins domain proteins domain identified by eMATRIX, accession number BL00232C, p-value= 1.360e-15, raw score of 10.65
MVLKVQQYTVIVQATDMEGNLNYGLSNTATAIITVTDVNDNPPEFTASTSLFALFRPVSNGQEKLRARLPGSLDIGEAAANPRALKNNNVQAQERSRAAPTQLAGQPQLSFLPDSEKEKE

SEQ ID NO: 52305 - protein, 859 aa, Homo sapiens
  DOMAIN (255)..(273): Cadherins extracellular repeat proteins domain proteins domain identified by eMATRIX, accession number BL00232C, p-value= 4.706e-17, raw score of 10.65
  DOMAIN (108)..(370): Cadherin domain identified by PFam, accession name cadherin, E-value=3.6e-25, PFam score of 97.1
MPLGFQRLVPSQEFHRQRPDVQGLWQSLAHRQPSRESAWVTATALGSKPRGTGQAVDYELNRAFMLTVMVSNQAPLASGIQMSFQSTAGVTISIMDINEAPYFPSNHKLIRLEEGVPPGTVLTTFSAVDPDRFMQQAVRYSKLSDPASWLHINATNGQITTAAVLDRESLYTKNNVYEATFLAADNGVGVAVCSAVSVEVPCAVAVCVCAAAGVGVAVCFAVSVEVPYAVVWLPMACGRVSVRSHGWTVGIPPASGTGTLQIYLIDINDNAPELLPKEAQICEKPNLNAINITAADADVDPNIGPYVFELPFVPAAVRKNWTITRLNGDYAQLSLRILYLEAGMYDVPIIVTDSGNPPLSNTSIIKVKVCPCDDNGDCTTIGAVAAAGLGTGAIVAILICILILLRPVTPVGSSQVDLAEGRRPGPLSRAAAVEGIRSGAGATVNSRSACCPASAQSWAPQPWQGDAANTHRAPPKPPLRFGILLTTSGSHSQLIGLAKNSPPDWGIHVCMLTQTHEAPTSTTPADTRMHAYTDMHEAPTSTNAHARGPHMCTDVSLHIQACMCRDMRVCSTAMVLLFVMWMKRREKERHTKQLLIDPEDDVRDNILKYDEEGGGEEDQDYDLSQLQQPEAMGHVPSKAPGVRRVDERPVGAEPQYPIRPMVPHPGDIGDFINEALFCAIAPAHAAVPLEWPSRLHGPQSLWSGHGACTGRSPSGVATAPAHAAVPLEWPRRLHMPQYLWSGHRACTGHSPSGVAIAPARAAVPLEWPWRLHGPQSLWSGHGACTCHSPSRGRRACMGRSPSGVAMAPARAAVPLEWPWRLHGPQSLWSGHGACTGRSPSGVAIAPARAAVPLEWPWVP

SEQ ID NO: 52306 - protein, 759 aa, Homo sapiens
  DOMAIN (186)..(234): Cadherins extracellular repeat proteins domain proteins domain identified by eMATRIX, accession number BL00232B, p-value= 3.625e-40, raw score of 32.79
  DOMAIN (100)..(621): Cadherin domain identified by PFam, accession name cadherin, E-value=7.3e-75, PFam score of 262.1
MDFKVGADGTVFATRELQVPSEQVAFTVTAWDSQTAEKWDAVVRLLVAQTSSPHSGHKPQKGKKVVALDPSPPPKDTLLPWPQHQNANGLRRRKRDWVIPPINVPENSRGPFPQQLVRIRSDKDNDIPIRYSITGVGADQPPMEVFSINSMSGRMYVTRPMDREEHASYHLRAHAVDMNGNKVENPIDLYIYVIDMNDNHPEFINQVYNCSVDEGSKPGTYVMTITANDADDSTTANGMVRYRIVTQTPQSPSQNMFTINSETGDIVTVAAGWDREKVQQYTVIVQATDMEGNLNYGLSNTSHSHHHGDKIVNGQPRQEFTASTFAGEIKPHSPNWNAVYRIISGDPSGHFSVRTDPVTNEGMVTVVKAVDYELNRAFMLTVMVSNQAPLASGIQMSFQSTAGVTISIMDINEAPYFPSNHKLIRLEEGVPPGTVLTTFSAVDPDRFMQQAVRYSKLSDPASWLHINATNGQITTAAVLDRESLYTKNNVYEATFLAADNGIPPASGTGTLQIYLIDINDNAPELLPKEAQICEKPNLNAIYITAADADVDRNIGPYVFELPFVPAAVRKNWTITRLNGDYAQLSLRILYLEAGMYDVPIIVTDSGNPPLSNTSIIKVKWQRLVWAPSAIVAILICILILLTMVLLFVMWMKRREKERHTKQLLIDPEDDVRDNILKYDEEGGGEEDQDYDLSQLQQPEAMGHVPSKAPGVRRVDERPGSVSSLNSSSSGDQDYDYLNVLGAQIQEAGGTCMEVVKRID

SEQ ID NO: 52307 - protein, 232 aa, Homo sapiens
  misc_feature (1)...(232): Xaa = X or * as defined in Table 2
IRMSYAEKPDEITKDEWMEKLNNLHVQRADMNRLIMNYLVTEGFKEAAEKFRMESGIEPSVDLETLDERIKIREIDTXKGQIQEAIRLXFNSLHPELLWDTNRYLYFHFASNSILIPSXFRQGKTRGRRWGVAQTQLADRGEESRECLTEMERTLALLAFDSPEESPFGDLLHTMQRQKVWSEVNQAVLDYENRESTPKLAKLLKLLLWAQNELDQKKVKYPKMTDLSKGGD

SEQ ID NO: 52308 - protein, 84 aa, Homo sapiens
AGQIITEPLALGYHCHCDAESGVSSEDEGGKPPRKLEVDTSGSKGTSLPRKNLQKSSAKDGLFPPFLFLFLPSATFFFFLSTKE

SEQ ID NO: 52309 - protein, 216 aa, Homo sapiens
  misc_feature (1)...(216): Xaa = X or * as defined in Table 2
LLQPSVQLPNGTANTSLSFAAVSAVSPPPCRTSTATTLPPPMPSFFCVFPSPSMSPSPSEFLSCIASVSRVHSLSSSSSGSSSTASSLNFSAIMGSSSATASWVLSTTSTPPCPSALPSSPAQESXSLAASSSAWLSEHPSFSSFTLSWASGAFCDEVSLSFSGSKLSFLSSKGDCGIPFIXTSACPSSLDFSPCFSSSTSKSSSYSEIGKSPQPI

SEQ ID NO: 52310 - protein, 364 aa, Homo sapiens
  misc_feature (1)...(364): Xaa = X or * as defined in Table 2
NQASLEVLPSPVDSPDSIPSLPPSDNPNRNFSAAPVSCLPSPLPVAASWPSDPSSCSCPSPEVFRSRAPGVPTPASVVYVTVISSAAGTSSPLRANSSTTTFPAAAVFPTNSSCWCQVSSSATSEKEEALFAIVFSSAVSEPANTSLSSAAVSAVSPPPCRTSTATTLPPPMPSFFCVFPSPSMSPSPSEFLSCIASVSRVHSLSSSSSGSSSTASSLNFSAIMGSSSATASWVLSTTSTPPCPSALPSSPAQESXSLAASSSAWPVAGISPSGACTFPAGSASGAAKAPSPSWRCPSFRALFSLLDSSSLSLCSVSLASLSLSPPPSFLRAVMFPATFKSRRCFKYGNHCLFSDLLWLEVCAL

SEQ ID NO: 52311 - protein, 70 aa, Homo sapiens
  misc_feature (1)...(70): Xaa = X or * as defined in Table 2
IGEVLLDNVLKSVFXLGSVLPITSLKLLPSGSKRDPAKMSHSHPAGXVTTGAFPRCGRWRLQPAAPPPPS

SEQ ID NO: 52312 - protein, 156 aa, Homo sapiens
  misc_feature (1)...(156): Xaa = X or * as defined in Table 2
HANPVSPPTSWPKEXSWPXCSGXXRTFQSVSFAGGRRRGSWLKPPPATAWKSSSCHLPSGVRMAHFCRIPFGPRGRDFADFGTTIKQDFRLLGQTSVDRLLQLSQGQAVKGNQLLPVSLVKRKTTLAPNTQTASPRALADSLMQLARQVSRLESGQ

SEQ ID NO: 52313 - protein, 1078 aa, Homo sapiens
  misc_feature (1)...(1078): Xaa = X or * as defined in Table 2
TTFPAAAVFPTNSSCWCQVSSSATSEKEEALFAIVFSSAVSEPANTSLSSAAVSAVSPPPCRTSTATTLPPPMPSFFCVFPSPSMSPSPSEFLSCIASVSRVHSLSSSSSGSSSTASSLNFSAIMGSSSATASWVLSTTSTPPCPSALPSSPAQESXSLAASSSAWPVAGISPSGACTFPAGSASGAAKAPSPSWRCPSFRALFSLLDSSSLSLCSVSLASLSLSPPPSFLRAVMFSSDFSNPGVASNMGTTVSFSESSPRSPGLSDNSEASTGASFSASDPISFGGAFVSSSALTSVSVSPSSALSFCSSLKASSSLSAFALVTSSLSESVFLRDVFGLSAFLRSLAKSNSLGKISFLSSSLLASASVTISSPSTSSLQRKASFARLPSSGLPSETCIRLASASPVKGLKRVSVLITSFLSLAGSSPPRIASSEPSSLFDAVSSMGPVSSRSMDASSSLSPTSLTATPPSASPSSDVAASLRAATSXRCSKFRAAASFASTAFSKPCSPSEAALSVSSTVSIKACFSGASSLLRPTASFAAACPMGSDPPSPSLLTPSASAAPSAPLSMPGGISLFSVNSSANSGCSAVGFHALKGASXTAPASPHSAASPFPCTMSASLCWGASSSSIASFFSSVYVFCTNCWDSLFELIAAVSSTMKFIVGAPRARTXANGNESFLPLVSTSSFLGGFPPSSSLLTPDSASQWQWXPNAKGSVIICPAPSSNPGRPAFLSFTXAVLSSQSLLLSFSFSSAETCFPDFSDKPSAISWVPFSVPSLRTFSKLSSIGIGLVSTSAFVISWSSISISKDSSIGRXDFLGLSFSLSSXEDDLLALSSVLLSVWASLSPTADSSSLSLEXGXLLDEVDEAVFIFSKQPMLHDKLNNSPCLSSSSSLSEHPSFSSFTLSWASGAFCDEVSLSFSGSKLSFLSSKGDCGIPFIXTSACPSSLDFSPCFSSSTSKSSSYSYFKVFSWSSSKTSCPGFPLLVISSTAVTTSLSPVFISXAENLAETEVLFSLISFLFGITYSLSFLTFPSAFFSSSPFSVLFSFLDFGKDGFLSRPIAIMHLTLYHLNQSDSTFT

SEQ ID NO: 52314 - protein, 1428 aa, Homo sapiens
  DOMAIN (1152)..(1186): Neuromodulin (GAP-43) proteins domain identified by eMATRIX, accession number BL00412C, p-value=1.409e-09, raw score of 10.28
MSHSHPAGLLAAYNSLMDKHLAGYFNNTRIRRHLLRSGLITRSGRILSEKEYKLNMMKRDHQKYIRECLAQAIFHKVLDMERYHQLEIKKKLETLARKERIQRFKGEHTRRSVENNMPILSPHPPVGPKSNRGHSVLVDEGHSSPLALTAPRPYTAPGNMQPPIRLQPLPSNPAVETVPKDSRRIHKTSLHSNAAITMIYLGKNVHLSSDNPDFRDEIKVYQQHCGGENLCVYKGKLLEKEYEEDFEVDEEKQGEKSNEEGQADVQMNGIPQSPLDDKKDNLDPEKESETSSQKAPDAHDNVKDENDGCSESELEEDKQGELFSLSCNIGCLLNMKTASSTSSRSHPYSSDSEDESAVGDREAHTDSSTDESARRSSSQELSENDKPRKSHLPIEESLEIEIEDQEITKADVETKPMPIDESFENVLKEGTEKGTQEIAEGLSEKSGKHVSAEEKEKDKSKLWEESTAQVKDKKAGLPGLEEGAGQIITEPLALGYHCHCDAESGVSSEDEGGKPPRKLEVDTSGRKDSLPLAYVLALGAPTMNFMVDETAAINSNKESQQLVQKTYTLEKKEAMEEDEAPQHRDADIVQGKGEAALWGEAGAVHEAPLRAWKPTAEQPELAEEFTEKREIPPGIERGAEGAAEAEGVRRLGEGGSDPIGQAAAKDAVGLSKDEAPEKQALMLTVLETDKAASEGEQGLEKAVLANEAAALNLEHLHEVAALREAATSEEGEAEGGVAVSDVGESEEEASIDLEDTGPMEDTASKREDGSEEAILGGEEPAKERKEVMRTETRLSPFTGEAEASRMQVSEGSPEEGSLAKEAFLCKEDVEGEEMVTEAEANREDDRKEILPKELDLARERRKAERPKTSLRKTDSEREEVTRANALKDEDAFKEEQKLKAEEGETETEVRAEEETKAPPNEMGSDAENEAPVEASELSDNPGLLGEDSLKETVVPIFEATPGFEKSLENITALRKEGGGERLSEARDTEHKDREELSSRENRALKEGHRQDGEGALAAPEAEPAGKVQAPEGLIPATGQAEELAAKDHDSCAGLEGRAEGQGGVDVVLRTQEAVAEEDPIMAEKFREEAVDEDPEEEEDKECTLETEAMQDRNSEGDGDMEGEGNTQKNEGMGGGRVVAVEVLHGGGETAETAAEEREVLAGSETAEEKTIANKASSFSDVAEEETWHQQDELVGKTAAAGKVVVEELARSGEEVPAAEEMTVTYTTEAGVGTPGALERKTSGLGQEQEEGSEGQEAATGSGDGRQETGAAEKFRLGLSREGERELSPESLQAMATLPVKPDFTETREKQQHMVQGESETADVSPNNVQKNINPKRQALSRREEEGQLAEAATCHSVEKLQLSLTQRGENGSFLQDPFWTPRQVRRVASLLLREERGKRPGSGEAEALLEPSLRKLEVKPASTPFSGP

SEQ ID NO: 52315 - protein, 181 aa, Homo sapiens
  DOMAIN (85)..(118): PROLINE-RICH PROTEIN 3 domain identified by eMATRIX, accession number DM00215, p-value=7.429e-10, raw score of 19.43
  misc_feature (1)...(181): Xaa = X or * as defined in Table 2
VKESLTQKSKRFQNKLINRRGWERPRSGASWTQRRALGGRGCVDRWLGIIWPHRIPGARLRGFPALNPTPQTAPSPSPDPRPRPPCPSDPGPRTEAQCSLPPPPPSPRHLDPGPEPPTPLTQQGQKGTRAPRPRCPRSQKXATSGPAVRRREARGSASLRTRAPSRDSTHAGIQGNVALQP

SEQ ID NO: 52316 - protein, 140 aa, Homo sapiens
  misc_feature (1)...(140): Xaa = X or * as defined in Table 2
GTVVMGLPKYFISLSTKFPLSFSLSADELHIASLFLWPRSKPFGVIQRSCASQLNALPEVLKNPGDPDKMLRFAESPRNLPAGVLGDIWTDGKGSVSLQEQVYHFPLIRPTPGSXARASFLSCGXEEFRRHGLTFSSTRE

SEQ ID NO: 52317 - protein, 473 aa, Homo sapiens
  DOMAIN (369)..(390): M-PHASE INDUCER PHOSPHATASE SIGNATURE domain identified by eMATRIX, accession number PR00716D, p-value=6.625e-28, raw score of 9.50
  DOMAIN (314)..(422): Rhodanese-like domain identified by PFam, accession name Rhodanese, E-value=1e-34, PFam score of 128.8
MSTELFSSTREEGSSGSGPSFRSNQRKMLNLLLERDTSFTVCPDVPRTPVGKFLGDSANLSILSGGTPKCCLDLSNLSSGEITATQLTTSADLDETGHLDSSGLQEVHLAGMNHDQHLMKCSPAQLLCSTPNGLDRGHRKRDAMCSSSANKENDNGNLVDSEMKYLGSPITTVPKLDKNPNLGEDQAEEISDELMEFSLKDQEAKVSRSGLYRSPSMPENLNRPRLKQVEKFKDNTIPDKVKKKYFSGQGKLRKGLCLKKTVSLCDITITQMLEEDSNQGHLIGDFSKVCALPTVSGKHQDLKYVNPETVAALLSGKFQGLIEKFYVIDCRYPYEYLGGHIQGALNLYSQEELFNFFLKKPIVPLDTQKRIIIVFHCEFSSERGPRMCRCLREEDRSLNQYPALYYPELYILKGGYRDFFPEYMELCEPQSYCPMHHQDHKTELLRCRSQSKVQEGERQLREQIALLVKDMSP

SEQ ID NO: 52318 - protein, 441 aa, Homo sapiens
  DOMAIN (345)..(385): Cyclophilin-type peptidyl-prolyl cis-trans isomerase signatur domain identified by eMATRIX, accession number BL00170B, p-value= 8.071e-09, raw score of 20.97
  misc_feature (1)...(441): Xaa = X or * as defined in Table 2
IMASAHLATSAFCTRSSSSGRSGSCKRGSWDSEQALIRAWTTLPSSLHAADGSFAGGRGIPSKRWSWRAGQQSSLCLIMQTSSNCGNSFQLVSEGASWRGLPHCSCAELQDSLNFSYHPSGLSLSVRPSSPGNSPKEQPFSQVLRPEPPDPEKLPVPPAPPSKRHCRSLSVPVDLSRWQPVWRPAPSKLWTPIKHRGSGGGGGPQVPHQSPPKRVSSLRFLTSSQCLFSMCPSSQTLQPSFLQPGPGPSSSRPCAASPQSGSWESDAESLSPCPPQRRFSLSPSLGPQASRFLPSARSSPASSPELPLATXGLSATFPESRSQPCDLDARKTGVKRRHEEDPRRLRPSLDFDKMNQKPYSGGLCLQETAREGSSISPPWFMACSPPPLSASCSPTGGSSQVLSESEKEEEGAVRWGRQALSKRTLCQRDFGDLDLNLIEEN

SEQ ID NO: 52319 - protein, 39 aa, Homo sapiens
VIITGPPEAQFKAQEILTQVKQHQQQKALQSGPPQSRRK

SEQ ID NO: 52320 - protein, 209 aa, Homo sapiens
DAKIPVSGPFLVKIGYAFVDCPDEIWALKAIEALSGKIELHGKPIEVEHSVPKRQRIRENAGAAEKSITILSTPEGTSAACKSILEIMRKETQDVKFTEEIPLFIPALSVRALISKQGQHIKQLSRFAGASSKIAPVEAPDAKVRMVMIAGSPDCDQTPDENDQVVVKITGHFYACQVAQRKIQEILTQVKQQQQQKALQSGPPQSRRK

SEQ ID NO: 52321 - protein, 148 aa, Homo sapiens
  DOMAIN (9)..(58): KH domain identified by PFam, accession name KH-domain, E- value=6.7e-08, PFam score of 39.7
  misc_feature (1)...(148): Xaa = X or * as defined in Table 2
MQSETETVHLFIPALSVGAIIGKQGQHIKQLSRFAGASIKIAPAEAPDAKVRMVIITGPPEAQFKAQGRIYGKIKEENFVSPKEEVKLEAHIRVPSFAAGRVIGKGGKTASTXQNLCSGMKGKALKAKPSTYNCVGCGWSPRPRCSLN

SEQ ID NO: 52322 - protein, 619 aa, Homo sapiens
  DOMAIN (542)..(554): KH domain proteins family of RNA binding proteins domain identified by eMATRIX, accession number PF00013, p-value=1.000e-10, raw score of 5.78
  DOMAIN (244)..(587): KH domain identified by PFam, accession name KH-domain, E- value=1.5e-41, PFam score of 151.5
  misc_feature (1)...(619): Xaa = X or * as defined in Table 2
RREDEGNKTSWIHPSPWVVLIFRFFSLFFFKQPLFTMNKLYIGNLSENAAPSDLKSIFKDAKIPVSGPFLVKTGYAFVDCPDESWALRAIKAFSGKIELHGKPIEVEHSVPKRQRIRKLQIRNIPPHLQWEVLDSLLVQYGVVESCEQVNTDSETAVVNVTYSSKDQARQALDKLLDKLNGFQLENFTLKVAYIPDEMATQQNPFLQPRGRRGLGQRGSSRQGSPGSVSKQKPCDSPLRLLVPTQFVGAIIGKEGATIRNITKQTQSKIDVHRKENAGAAEKSITIPSTPEGTSAACKSILEIMHKEAQDIKFTEEIPLKILAHNNFVGRLIGKEGRNLKKIEQDTDTKITISPLQELTLYNPERTITVKGNVETCAKAEEEIMKKIRESYENDIASMNLQAHLIPGLNLNALGLFPPTSGMPPPTSGPPSAMTPPSPQSEQSESETVHLFIPALSVRALISKQGQHIKQLSRFAGASSKIAPVEAPDAKVRMVMIAGSPEARFKAQGRIYGKIKEENFVSPKEEVKLEAHIRVPSFAAGRVIGKGGKTVNELQNLSSAEVVVPRDQTPDENDQVVVKITGHFYACQVAQRKIXEFLTQVRQHQQQKALQSGPPQSRRK

SEQ ID NO: 52323 - protein, 555 aa, Homo sapiens
  DOMAIN (70)..(89): TAILLESS COMPLEX POLYPEPTIDE 1 (CHAPERONE) SIGNATURE domain identified by eMATRIX, accession number PR00304B, p-value=9.700e- 18, raw score of 11.60
  DOMAIN (46)..(537): TCP-1/cpn60 chaperonin family domain identified by PFam, accession name cpn60_TCP1, E-value=9.9e-206, PFam score of 696.9
  misc_feature (1)...(555): Xaa = X or * as defined in Table 2
TASCRLAMALHVPKAPGFAQMLKEGAKHFSGLEEAVYRNIQACKELAQTTRTAYGPKGMNKMVINHLEKLFVTNDAATILRELEVQHPAAKMIVMASHMQEQEVGDGTNFVLVFAGALLELAEELLRIGLSVSEVIEGYEIACRKAHEILPNLVCCSAKNLRDIDEVSSLLRTSIMSKQYGNEVFLAKLIAQACYLFFLIPAISMLITSEFVKFLGSGISSSSVLHGMVFKKETEGDVTSVKDAKIAVYSCPFDGMITETKGTVLIKTAEELMNFSKGEENLMDAQVKAIADTGANVVVTGGKVADMALHYANKYNIMLVRLNSKWDLRRLCKTVGATALPRLTPPVLEEMGHCDSVYLSEVGDTQVVVFKHEKEDGAISTIVLRGSTDNLMDDIERAVDDGVNTFKVLTRDKRLVPGGGATEIELAKQITSYGETCPGLEQYAIKKFAEAFEAIPRALAENSGVKANEVISKLYAVHQEGNKNVGLDIEAEVPAVKDMLEAGILDTYLGKYWAIKLATNAAVTVLRVDQIIMAKPAGGPKPPSGKXNWLNFYCR

SEQ ID NO: 52324 - protein, 34 aa, Homo sapiens
TASCRLAMALHVPKAPGFAQMLKEGAKVRAEGKE

SEQ ID NO: 52325 - protein, 584 aa, Homo sapiens
  DOMAIN (371)..(394): TAILLESS COMPLEX POLYPEPTIDE 1 (CHAPERONE) SIGNATURE domain identified by eMATRIX, accession number PR00304D, p-value=4.892e- 17, raw score of 11.04
  DOMAIN (27)..(560): TCP-1/cpn60 chaperonin family domain identified by PFam, accession name cpn60_TCP1, E-value=1.3e-62, PFam score of 221.5
  misc_feature (1)...(584): Xaa = X or * as defined in Table 2
GPSPLKEHFSGLEETAYMNILTCMELAQTTRTAYGPNGMNKMVINHLEKLLVTNDAATILRELEVQHPAAKMIVMASHMQEQEVGDGTNFVLVFAGSFPVNYLKNLWRIGLSVSEVIEGYEIACRKAHEILPNLVCCSAKNLRDIDEVSSLLRTSIMSKQYGLMKVFLAKPYLLQACRIYFSWIPAISMLITSEFVKFLGSGIRSSXVLAGMVFKKETEGDVTSVKDAKIAVYSCPFDGHGXQETXGEQCLDKRTALKDLDGIFRXGEQENLHGAATSPKAIADTGANVVVTGGKVADMALHYANKYNIMLVRLNSKMWDLRRLCKTVGATALPRLTPSLSLKEMGHCDSVYLSEVGDTQVVVFKHEKEDGAISTIVLRGSTDNLXLDDIERAVDDGVNTFQGSLQRDKRLVPGGGSNRNLNXPKQITSYGETCPGLEQYAILKKFAXGHLKAIPPAHWQKYSGENSGVKAQWKXSPKLYAVHQEGNKNVGLDIEAEVPSLVKDMLEAGIPRYLTLGKYWAIPLATNAAVTVLRVDQHTLVXFFFMQIIMAKPAGGGPKPPKWGRKTWGDDQNGLKIGFNFYCR

SEQ ID NO: 52326 - protein, 115 aa, Homo sapiens
  misc_feature (1)...(115): Xaa = X or * as defined in Table 2
PFXCTPSCLWAFXTARSAQTWSAPSTRSWCSEWPKSLPSPTWLRXFRKVSSYSWSQSWSSPTASTDSSRPPHSLGASCHPGHQRSLMPPSRXRATSTAYASLSSSHRPNTQPSPS

SEQ ID NO: 52327 - protein, 162 aa, Homo sapiens
  misc_feature (1)...(162): Xaa = X or * as defined in Table 2
RSSQPRVGLCGKSLQPSSEGSCHLQGWCSFPRSVSSIMAEAXRTXPRVSSSMHGRGPTQNREATKKASSSETSVQVTAQEAQAEPGAAGVAGSPASAPQDSAGACWPAQVLXGGSDRSCRGSHPGNTEPPSVLRTGTAPGAXGSSPFSPTTQSGSCCFPFSS

SEQ ID NO: 52328 - protein, 60 aa, Homo sapiens
  misc_feature (1)...(60): Xaa = X or * as defined in Table 2
XEQLFLEPELVIPHRQHRLFTAPTFTGSFLSPWPPAVTDASFKVKSHVYSLEEKESKYTP

SEQ ID NO: 52329 - protein, 575 aa, Homo sapiens
  DOMAIN (7)..(25): PROTEIN NUCLEAR BROMODOMAIN TRANS domain identified by eMATRIX, accession number PD01234B, p-value=8.714e-09, raw score of 15.53
  misc_feature (1)...(575): Xaa = X or * as defined in Table 2
STCTPLPTASSQSRPHPPPTPTPPAPWRSSNGQVPTLTXPGSTLPPGSGKSPPVASGGPARAKPHRAVHVSPAPSGGSPGDVAELPAAVAVRAXQAGSGQRLPAPVCVGEMGTLCPGEPADVHQVVCGLSEPRAPHRPGQPQARAHGVPSGQSLCPAQPGXDDSAKVSSYSWSQSWSSPTASTDSSRPPHSLGASCHPGHQRSLMPPSRXRATSTAWRARTASTPRCLGPRPAPWSCASLSSSHRPNTQPSPSPTSVRRARLATPSSHGWALAPWTPMAPTQPTTWTRWGKTVSGRQMNTWRRPWSTCARYSGSAKRSSGSSHSPWAPPRMRMEKSNSPTASWVRTDSSLRPWGGTRSSMGCEGLKLSTRGTRSCSPSGAMRSPAWSAHSLGCRLPSTTDLQDRWRLCVPGMTSSAASVATTSQNLGWPAGTCXALWGGGRWPATPAAQAQPALPGQLPTRWSRCCWPSSWPLCSASGPSHARCCSPWAMSSTPLPXHCXPSGGSCTSPEGVSCLQSRLEGFATQPHPWAERTWEAPPGGNTVILGLLERGSCSRRGIWRKRNQERKAGRAPAKE

SEQ ID NO: 52330 - protein, 41 aa, Homo sapiens
GRFLSLSHFCPPAPTSQVRPWALELRDSPHPSPTPAPSLML

SEQ ID NO: 52331 - protein, 15 aa, Homo sapiens
GRFLSLSHFCPPAKL

SEQ ID NO: 52332 - protein, 83 aa, Homo sapiens
  DOMAIN (41)..(79): NSF attachment protein domain identified by PFam, accession name NSF, E-value=4.3e-19, PFam score of 71.4
GTPRGDMRGRLYCSLPGQCLCGFIKCGAPLRPGLPFSSVPAAGNAFCQAAQLHLQLQSKHDAATCFVDAGNAFKKADPQGEGL

SEQ ID NO: 52333 - protein, 66 aa, Homo sapiens
  DOMAIN (3)..(24): NSF ATTACHMENT PROTEIN SIGNATURE domain identified by eMATRIX, accession number PR00448F, p-value=1.474e-24, raw score of 12.39
  DOMAIN (1)..(66): NSF attachment protein domain identified by PFam, accession name NSF, E-value=9e-23, PFam score of 84.5
LFPAFSDSRECKLMKKLLEAHEEQNVDSYTEAVKEYDSIFPGWTQWLTTLLLRIKKTIQGDEKDLR

SEQ ID NO: 52334 - protein, 303 aa, Homo sapiens
  DOMAIN (170)..(194): NSF ATTACHMENT PROTEIN SIGNATURE domain identified by eMATRIX, accession number PR00448D, p-value=7.900e-28, raw score of 12.42
  DOMAIN (19)..(303): NSF attachment protein domain identified by PFam, accession name NSF, E-value=3.7e-115, PFam score of 396.0
  misc_feature (1)...(303): Xaa = X or * as defined in Table 2
KPFEAAMYNSGKEAEAMALLAEAERKVKNSQSFFSGLFGGSSKIEEACEIYARAANMFKMAKNWSAAGNAFCQAAQLHLQLQSKHDAATCFVDAGNAFKKADPQGGPFNCFDCVAFEIYTDMGRFTIAAKHHISICXDLLRQKLVDIEKAIAHYRALADYYQGEESNSSANKCLLKVAGYAALLEQYQKAIDIYEQGWGPNAHWTSPPPSKYSAKDYFFKAALCHFCMDMLQAKLAFQKYEELFPVFSDSRECKLMKKLLKAHGEQNVDSYTESVKGITDSISRLDQWLTTHCLRIKKTIRGD

SEQ ID NO: 52335 - protein, 346 aa, Homo sapiens
  DOMAIN (103)..(131): Dehydrins proteins domain identified by eMATRIX, accession number BL00315A, p-value=1.672e-09, raw score of 9.35
MQVGKPLLPTSLSVEDAAILLQQVMRAFSKQASTVVFSDTVVVSEKFINDCTELFRELMHQKAEKEMKNNPVHLITEEDLKQISTLESVSTSKKDKKDERRRKATEGSGSMRGGGGGNAREYKIKKVKKKGRKDDDSDDESQSSHTGRPLNKTYLEVVRSVFMSSTTSASGTGRKRTIKDLQEEVSNLYNNIRLFEKGMKFFADDTQAALTKHLLKSVCTDITNLIFNFLASDLMMAVDDPAAITSEIRKKILSKLSEETKVALTKLHNSLNEKDQHALLVKYQGLVVKQLVSQSKKTGQGDYPLNNELDKEQEDVASTTRKELQELSSSIKDLVLKSRKSSVTEE

SEQ ID NO: 52336 - protein, 814 aa, Homo sapiens
  DOMAIN (438)..(466): Dehydrins proteins domain identified by eMATRIX, accession number BL00315A, p-value=1.672e-09, raw score of 9.35
  misc_feature (1)...(814): Xaa = X or * as defined in Table 2
RVCSSSASTASQAVMADAWEEIRRLAADFQRAQFAEATQRLSERNCIEIVNRLIAQKQLEVVHTLDGKEYITPAQISKEMRDELHVRGGRVNIVDLQQVINVDLIHIENRIGDIIKSEKHVQLVLGQLIDENYLDRVGQEVNDKLQESGQVTISELCKTYDLPGNFLTQALTQRLAIIIIGHIDLDNRGVIFTEAFVARHRARIRGLFSAITRPTAVNSLISKYGFQEQLLYSVLDELVNSGRLRGTVVGGRQDKAVFVPDIYSRTQSTWVDSFFRQNGYLEFDALSRLGIPDAVSYIKKRYKTTQLLFLKAACVGQGLVDQVEASVEEAISSGTWVDIAPLLPTSLSVEDAAILLQQVMRAFSKQASTVVFSDTVVVSEKFINDCTELFRELMHQKAEKEMKNNPVHLITEEDLKQISTLESVSTSKKDKKDERRRKATEGSGSMRGGGGGNAREYKIKKVKKKGRKDDDSDDESQSSHTGKKKPEISFMFQDEIEDFLRKHIQDAPEEFISELAEYLIKPLNKTYLEVVRSVFMSSTTSASGTGRKRTIKDLQEEVSNLYNNIRLFGKRGWKFFADDTQGWLLPKHLLEVQCVLISLNLIFNFLGFGILMDGQXDDPGRPFTSELRKEILSKLSEETKVALTKLHNSLNEKSIEDFIFCLDSAAEACDIMVKRGDKKRERQILFQHRQALAEQLKVTEDPALILHLTSVLLFQFSTHSMLHAPGRCVPQIIAFLNSKIPEDQHALLVKYQGLVVKQLVSPSKKTGQGDYPLNNELDKEQEDVASTTRKELQELSSSIKDLVLKSRKSSVTEE

SEQ ID NO: 52337 - protein, 236 aa, Homo sapiens
  DOMAIN (67)..(83): C-5 cytosine-specific DNA methylases proteins domain identified by eMATRIX, accession number BL00094B, p-value=7.000e- 11, raw score of 16.39
  DOMAIN (50)..(109): C-5 cytosine-specific DNA methylase domain identified by PFam, accession name DNA_methylase, E-value=0.0058, PFam score of 13.9
VLSLFDGIATGYLVLKELGIKVGKYVASEVCEESIAVGTVKHEGNIKYVNDVRNITKKNIEEWGPFDLVIGGSPCNDLSNVNPARKGLYEGTGRLFFEFYHLLNYSRPKEGDDRPFFWMFENVVAMKVGDKRDISRFLECNPVMIDAIKVSAAHRARYFWGNLPGMNRPVIASKNDKLELQDCLEYNRIARIFGFPVHYTDVSNMGRGARQKLLGRSWSVPVIRHLFAPLKDYFAC

SEQ ID NO: 52338 - protein, 826 aa, Homo sapiens
  misc_feature (1)...(826): Xaa = X or * as defined in Table 2
GRGILVNGACSDQSSDSPPILEAIRTPEIRGGWAVGTGVVSGADIVSGHCRQWSLLSLFQGSGTLSLAFITWAFRETRTRSESPAVSSHTSSQSTCGQHSTXHTXHARGRQGRNHVDESPVEFPATRVGSPDAQTPARSLXLGDMPHSLTIDLTDDTEDTHGTPQSSSTPYARLAQDSQQGGMESPQVEADSGDGDSSEYQDGREGLLPRVIXGPXTRGKTSYAMVVSWKATSKRQAMSGMRWVQWFGDGKFSEVSPGKGKGFCRPEAVPACLPLNKLVSYRKAMYHALEVTWDEGMRAKPXEQGXSKRPTELEDQLKPMLEWAHGGFKPTGIEGLKPNNTQPGGNESPWQHPLPLLVGPLLGRVRLKTNCYNNGKDRGDEDQSRGDCWVPGIMGQMGGGRCRSGIDVIPLTPWLGLXACLVCQTCRVSPPTTALDLPPLASSNSPLLPCEGRELLLCSNTSCCRXALGPVGWMWVGPQGSYVPAVXEPWSCYMCLPQRCHGVLRRRKDWNVRLQAFFTSDTGLEYVSHRLPPLPPQIPGAQGVGKLWFDGIATGEFGEHLETLLSCHNRVARESEESIAVGTVKHEGNIKYVNDVRNITKKNVRAVCTLRASSLPVFFPSPPHPNPARKGLYGEHPSLWQSLESLCHLTTGPGAGNKRGLGWRFQMNPALSSFLSTGVQRDISRFLEVRESGDLIVTDSQGRESAAGSDNLPGMNRXQRALSGSGNSQVKYVITSSDTKVRRAVALWKNALGDLQVGTWEIPVVMNGKEDVLWCTELERXARLHLERETVXIKTQMGRHGLLGRSWSVPVIRHLFAPLKDYFACE

SEQ ID NO: 52339 - protein, 55 aa, Homo sapiens
RFLLVHGILLMLTFYFQLHWSCFSTVSAHWLQEGPDPWQEVSALLTFSVVYLFPL

SEQ ID NO: 52340 - protein, 703 aa, Homo sapiens
  DOMAIN (57)..(96): PROTEIN ZINC FINGER ZINC-FINGER METAL-BINDING NU domain identified by eMATRIX, accession number PD01066, p-value=9.786e-32, raw score of 19.43
  DOMAIN (436)..(629): Zinc finger, C2H2 type domain identified by PFam, accession name zf-C2H2, E-value=1.7e-46, PFam score of 167.9
  misc_feature (1)...(703): Xaa = X or * as defined in Table 2
MAYKQGFLKVMVHFRKAEVTGKNHTSVHEGYTLISPAAQVLTISCKKSILLQEQVSFKDVCVDFTQEEWYLLDPAQKILYRDVILENYSNLVSVGYCITKPEVIFKIESKGEEPWVLEKGIPQAQCPPQKRKWKVEMNVVREQPRKMKMTIFGEPPIPTTNKTVSVENGDRGSKTFNLGTDPVSLIKLSLXNMXLSEMNLKNISGLIITKKNCSRKKPDEFNVCEKLLLDIRHEKIPIGEKSYKYDQKRNAINYHQDLSQPSFGQSFEYSKNGQGFHDEAAFFTNKRSQIGETVCKYNECGRTFIESLKLNISQRPHLEMEPYGCSICGKSFCMNLRFGHQRALTKDNPYEYNEYGEIFCDNSAFIIHQGAYTRKILREYKVSDKTWEKSALLKHQIVHMGGKSYDYNENGSNFSKKSHLTQLRRAHTGEKTFECGECGKTFWEKSNLTQHQRTHTGEKPLXCTECGKAFCQKPHLTNHQRTHTGEKPYECKQCGKTFCVKSNLTEHQRTHTGEKPYECNACGKSFCHRSALTVHQRTHTGEKPFICNECGKSFCVKSNLIVHQRTHTGEKPYKCNECGKTFCEKSALTKHQRTHTGEKPYECNACGKTFSQRSVLTKYQFIHTRVKALXTSXMLEAFIHLSKLVIQFQKRRSEKAKECQKFVEKTSCLNMXKLSRKIKTFHXKICKLTVKNKGNKYSALITS

SEQ ID NO: 52341 - protein, 939 aa, Homo sapiens
  DOMAIN (576)..(587): SH2 DOMAIN SIGNATURE domain identified by eMATRIX, accession number PR00401B, p-value=5.200e-11, raw score of 12.94
  DOMAIN (557)..(598): Src homology domain 2 domain identified by PFam, accession name SH2, E-value=1.1e-18, PFam score of 57.5
MPSKTVVPFSFALCMDFQPNVTIQTRSDYSSSAAACFRQTLEDPANPRLFEPLAPQQSGWGGEDSDSRARKAEKALQFLVSPALHFRVGGKPAAPAWRSGGEGGVKGNVSPNFPIFLEKLKIQIFMDYFPLLNAGNEFNLFVDKYYGLRPTTSLLTSASDNCCGLMALARFDVAVGRLVPCPPKWQLIDKEIGGILAHPRDLWNFKFEGEDLGYLAEEMFKQQTIQEVTWVLLKAFSFKRETHHKSSEILQPDVIERKNPFSEETFKLAAEICISNKALNVNHQDNGENVSRACQRPFPQLLQPWLNGAKVQLGLWLQRVQALSHGNFHMVGPVGAEKSRIEVWKPLPGFQRMYGKAWMSRQKFAAGAVQKGNVGLESSHRVPTGAPPSGAVRRGPLSSRPQNGRSTDSLHRAPGKATDTECQPMKSAESETVPCKATRVELPKTMGAHLLYRHDLIMHNYDKLKSRISEIIDSRRRLEEDLKKQAAEYREIDKRMNSIKPDLIQLRKTRDQYLMWLTQKGVRQKKLNEWLGNENTEDQYSLVEDDEDLPHHDEKTWNVGSSNRNKAENLLRGKRDGTFLVRESSKQGCYACSVVEGGITISAKTIQTILRPKFDENGIPTTHEETKKQEQKKKLSETASTDRARPAGRSRAGGRSEPSGQEATAAARAPQRKEAGGRGRAPPGGSGLATGPPRLRHLLAAGQHYPRARPASCEIPAILTPVSPVLLRAGPARRRSHLPPELPTSSGFLPPSVTAHFRGSPLSPCCSFPGPLTGGERPGRCLRVAGRSAPFPRGPPAAARVAARALPGAGEAAVVPGARPLTPAFRSLPPSSSGVGEVRLGAVGRWGPNSAFIASQAWAGPLHCDDAENRNAEDKGPLSKGLRGEVTGHTAVHLSSINGVTEDRAPLPLRATVLSLASFSATCQHFESRLTLTARPNPF

SEQ ID NO: 52342 - protein, 759 aa, Homo sapiens
  DOMAIN (251)..(292): PROTEIN GTPASE DOMAIN ACTIVATION domain identified by eMATRIX, accession number PD00930B, p-value=9.206e-24, raw score of 33.72
  DOMAIN (148)..(301): RhoGAP domain identified by PFam, accession name RhoGAP, E- value=8.3e-54, PFam score of 192.2
  misc_feature (1)...(759): Xaa = X or * as defined in Table 2
NQTALYNQAQLLHGSRFANMSAEGYQYRALYDYKKEREEDIDLHLGDILTVNKGSLVALGFSDGQEARPEEIGWLNGYNETTGERGDFPGTYVEYIGRKKISPPTPKPRPPRPLPVAPGSSKTEADVEQQALTLPDLAEQFAPPDIAPPLLIKLVEAIEKKGLECSTLYRTQSSSNLAELRQLLDCDTPSVDLEMIDVHVLADAFKRYLLDLPNPVIPAAVYSEMISLAPEVQSSEEYIQLLKKLIRSPSIPHQYWLTLQYLLKHFFKLSQTSSKNLLNARVLSEIFSPMLFRFSAASSDNTENLIKVIEILISTEWNERQPAPALPPKPPKPTTVANNGMNNNMSLQNAEWYWGDISREEVNEKLRDSADGTFLVRDASTKMHGDYTLTLRKGGNNKLIKIFHRDGKYGFSDPLTFSSVVELINHYRNESLAQYNPKLDVKLLYPVSKYQQDQVVKEDNIEAVGKKLHEYNTQFQEKSREYDRLYEEYTRTSQEIQMKRPAIEAFNETIKIFEEQCQTQERYSKGNYHLEKFKPXRAMEKEIQRIMHNYDKLKSRISEIIDSRRRLEEDLKKQAAEYREIDKRMNSIKPDLIQLRKTRDQYLMWLTQKGVRQKKLNEWLGNENTEDHYSLVEDDEDLPHHDEKTWECLGSSRTRNQSLKNLFARGSRDGTFLVRESSKQGCYACSVVVDGEVKHCVINKTATGYGFAEPYNFVTALWKELVLHYLHTSLVQHNDSLNVHTXAYPVYGTAGGRWKRFTL

SEQ ID NO: 52343 - protein, 129 aa, Homo sapiens
  DOMAIN (1)..(128): Flavin-binding monooxygenase-like domain identified by PFam, accession name FMO-like, E-value=0.00021, PFam score of -337.5
VSNSCKEMSCYSDFPFPEDYPNYVPNSQFLEYLKMYANHFDLLKHIQFKTKVCSVTKCSDSAVSGQWEVVTMHEEKAVLDSTLSHHTSFPYKLFSQISTKTPYFTNDCVVLKWCSYSTGLLKVKNKPKN

SEQ ID NO: 52344 - protein, 79 aa, Homo sapiens
CYSDFPFPEDYPNYVPNSQFLEYLKMYANHFDLLKHIQFKVRHKTSVSSQKVFPTYFLLSLQPLENRKIFEYCYSTMPP

SEQ ID NO: 52345 - protein, 568 aa, Homo sapiens
  DOMAIN (24)..(37): D-amino acid oxidases proteins domain identified by eMATRIX, accession number BL00677A, p-value=3.803e-10, raw score of 6.96
  DOMAIN (22)..(568): Flavin-binding monooxygenase-like domain identified by PFam, accession name FMO-like, E-value=0, PFam score of 1133.9
  misc_feature (1)...(568): Xaa = X or * as defined in Table 2
YQSPAWQSHWHQKLQVRKENMAKRVAIVGAGVSGLASIKCCLEEGLEPTCFERSDDLGGLWRFTEHVEEGRASLYKSVVSNSCKEMSCYSDFPFPEDYPNYVPNSQFLEYLKMYANHFDLLKHIQFKTKVCSVTKCSDSAVSGQWEVVTMHEEKQESAIFDAVMVCTGFLTNPYLPLDSFPGINAFKGQYFHSRQYKHPDIFKDKRVLVIGMGNSGTDIAVEASHLAEKVFLSTTGGGWVISRIFDSGYPWDMVFMTRFQNMLRNSLPTPIVTWLMERKINNWLNHANYGLIPEDRTQLKEFVLNDELPGRIITGKVFIRPSIKEVKENSVIFNNTSKEEPIDIIVFATGYTFAFPFLDESVVKVEDGQASLYKYIFPAHLQKPTLAIIGLHIKPLGLPXLPTGETQVRWAVSGSXKVLTRLPPPSVMIEEINARKENKPSWFGLCYCKALQSDYITYIDELLTYINTKPNLFSLWLLTDPTSGLWTVFFGPCSPYQFRLTGPGKMGKGAQEIALHGPQWDPNISRVHSKVRSCYKEFSIFPFGKFFLKVFSFPGFGLWLFFLIFPYK

SEQ ID NO: 52346 - protein, 233 aa, Homo sapiens
  misc_feature (1)...(233): Xaa = X or * as defined in Table 2
EWSSVRRSLVEKRALRRPHPQCLCFRMKTILSNQTVDIPENVDITLKGRTGIREGPPEGTLRRDFNHINVELSLLWKEKKRGSRVDKWWGNQKRNWPTRSDXFVSHVQNMIKGWLHWGFRLQGXGPVYAHFPHQPLLSRKNGVSWLKIRKFLWGEKYIRRVSGXRPGCLLVSVSQGPRKDEINPLKGNDIELVSKSSAGFXFQQATTSXKTRNIRKFLDGIFCLLEKGLFRQA

SEQ ID NO: 52347 - protein, 82 aa, Homo sapiens
  misc_feature (1)...(82): Xaa = X or * as defined in Table 2
XVTSIYWRSESQGTNQLVMGIQKQIDNMKGKLQETQDRAKRQEDLIMKVENLALKNRFQAVLDELKQKEDREKEHSALCKRS

SEQ ID NO: 52348 - protein, 100 aa, Homo sapiens
  misc_feature (1)...(100): Xaa = X or * as defined in Table 2
KEAENQCLDISSPGMSGHRQGHDSLEHDELREIFNDLSSSSEDEDETQHQDEKXLDISSPGMSGHRQGHDSLEHDELREIFNDLSSSSEDEDETQHQDEK

SEQ ID NO: 52349 - protein, 66 aa, Homo sapiens
MNQMNSTRENEGTNQLVMGIQKQIDNMKGKLQETQGQGKTTRGSSSWKVGKSWALQGTDFPGCYLD

SEQ ID NO: 52350 - protein, 393 aa, Homo sapiens
  misc_feature (1)...(393): Xaa = X or * as defined in Table 2
VKGKDDAPHELGESQFILRLPPEYASTVRRAVQSGHVNLKDRLTIELHPDGRHGIVRVDRVPLASKLVDLPCVMEEPENPLLKKPFSKTAIIGQMLVSTVDGDLFPPVEEPSCLALDPKASKKKDKDKEKKFIWNHGITLPLKNVRKRRFRKTAKKEIYLNLPDVXKKELKRLLEVPDAEAVSTRWGIICPKVETKGAENQGLDISSPGMSGHRQGHDSLEHDELREIFNDLSSSSEDEDETQHQDEEDINIIDTEEDLERQLQDKLNESDEQHQENEGTNQLVMGIQKQIDNMKGKLQETQDRAKRQEDLIMKVGNLGSPRTDFQAVLGMSFNQREDREKEQLSSLQEELESLLREVKKNLMFNFQSFRLVQHLGKFFGLLLLLGYLRPCSS

SEQ ID NO: 52351 - protein, 43 aa, Homo sapiens
MRIQYAKTDSDIIAKMKGTFVERDRKREKRKPKSQETPATKKA

SEQ ID NO: 52352 - protein, 122 aa, Homo sapiens
  DOMAIN (12)..(58): PROTEIN NUCLEAR RIBONUCLEOPROTEIN domain identified by eMATRIX, accession number PD02784C, p-value=7.850e-09, raw score of 20.76
  misc_feature (1)...(122): Xaa = X or * as defined in Table 2
WGPALCIGGYLASFLASVHLMPLRXGEMLSPXGLSFSFRFPGFKEVRLVPGRHDIAFVEFDNEVQAGAARDALQGFKITLSPLKVSPPLGAFLEPCVSEWSPHSIVPRVCPQTLHLALLGRN

SEQ ID NO: 52353 - protein, 72 aa, Homo sapiens
EVSSATNALRSMQGFPLYDKPMRIQYAKTDSDIIAKMKGTFVERDRKREKRKPKSQETPATKKAVQGGGATP

SEQ ID NO: 52354 - protein, 72 aa, Homo sapiens
  DOMAIN (23)..(66): PROTEIN NUCLEAR RIBONUCLEOPROTEIN domain identified by eMATRIX, accession number PD02784B, p-value=5.667e-29, raw score of 26.46
  DOMAIN (1)..(59): RNA recognition motif. domain identified by PFam, accession name rrm, E-value=3.4e-07, PFam score of 37.3
LKKSLYAIFSQFGQILDILVSRSLKMRGQAFVIFKEVSSATNALRSMQGFPFYDKPMVSIAGTEAVWVCKML

SEQ ID NO: 52355 - protein, 277 aa, Homo sapiens
  DOMAIN (57)..(100): PROTEIN NUCLEAR RIBONUCLEOPROTEIN domain identified by eMATRIX, accession number PD02784B, p-value=2.870e-17, raw score of 26.46
  misc_feature (1)...(277): Xaa = X or * as defined in Table 2
TLHSMAVPETRPNHTIYINNLNEKIKKDELKKSLLRPSFFSSLGQILGYSWGIHGRPXRMEGARPFSIFKEVSSGTNALRSMQGFPFYDKPMRIPVLPRTRLQDIHLPRIERAPFIGSRDPKAGERGRPKSQGDPGPPKEGLCKGGGSHPRGGGLSRGPGPGHCPPMTKAPRIMHHMPGQPPLTAAPLDMIPPPGLAPGQIPPGAMPPQQLMPGQMPPAQPLWRNPPNHILFLTNLPEETNELMLSHAFSNQVPPGFKEGPVWVPRAGNEHRPSVEV

SEQ ID NO: 52356 - protein, 387 aa, Homo sapiens
  DOMAIN (158)..(172): Thyroglobulin type-1 repeat proteins proteins domain identified by eMATRIX, accession number BL00484B, p-value=6.684e- 13, raw score of 9.04
  DOMAIN (129)..(205): Thyroglobulin type-1 repeat domain identified by PFam, accession name thyroglobulin_1, E-value=1.4e-17, PFam score of 71.9
  misc_feature (1)...(387): Xaa = X or * as defined in Table 2
FGELSTFDAVRGPPRRCPPDADPRAPGLALPGRLLVSNSRRTHSRESRAPPAPHLLGARAGMAPPQVLAFGLLLAAATATFAAAQEECVCENYKLAVNCFCEXINRQCQCTSVGAQNTVICSKLGCQMFWXMKAEMNGSKLGRRAKPEGGLQNNDGLYDPDCDESGLFKAKQCNGTSTCWCVNTAGVRRTHKDTEVTCSERVRTYWIIIELKHKAREKPYDSKSLRTXLQKEITTRYTLGSKFLSRVFWYENNVITIDLFQNFFSKKLRNDVDIADVAYYFEKDVKGESLFHSKKMDLTVNGEQLDLDLLIPGQTLIYNVDEKAPXDFSMQGLKAGVIAVIVVVVITSCCWKLLVLVISQKGREWQKYEKAEIKGDGCRCHRELQNA

SEQ ID NO: 52357 - protein, 84 aa, Homo sapiens
  misc_feature (1)...(84): Xaa = X or * as defined in Table 2
AKALQWPLGRGGGGTPRGSRPPGPHXSERGAVQPRSLPRQAAXRVPSGPADGQXDGHGAADPGSRQRCKPWSEAADLHSECYSS

SEQ ID NO: 52358 - protein, 93 aa, Homo sapiens
  misc_feature (1)...(93): Xaa = X or * as defined in Table 2
SEYNCCEIGCPQPSWGPWGRGTDVRQGQVGEEEVHGECGGGSQGXRPGXXAGSPAPXPGTWTGTAQQGPAAVLDPLRVXGGGIERHPLHSVGL

SEQ ID NO: 52359 - protein, 486 aa, Homo sapiens; identical to SEQ ID NO: 36846
  DOMAIN (5)..(191): Gag P30 core shell protein domain identified by PFam, accession name Gag_p30, E-value=2.6e-38, PFam score of 137.8

SEQ ID NO: 52360 - protein, 129 aa, Homo sapiens
QLSQWAAHSRCSGNTGGRALGSAQHLPLSSSSPLSRNNFLCRRHLSGCRSPPCPAAARPPRPRRPGAVRFPPPATAAASSPREGRRPPPSWAGHPCLGACQWLRSCRKGWPWLRGFCLHCLGPHCLYEL

SEQ ID NO: 52361 - protein, 590 aa, Homo sapiens
  misc_feature (1)...(590): Xaa = X or * as defined in Table 2
TATCKPWSMRTTISSSQPQKLTNSVKLPPSAKCISVSRIGGFLVSLTSRMKLRTLLICSKLLPSGGVRGLAGSGVKLQTFTVSVTALKAACLELFTSPGGFMVLLASEVKLQTFSAGDSDCLGQGRRAQRRPGPGVSAVGASGQQRAPESNERPAEEPTPAPMPSSAPRGPTEPALRRPSSADRPLAPGAGRAPGAMASPSGSSKATGKPRGRDGRPRREEDDVTPEEKRLRLLLEEGSAQPDDGEDAPRPGRKETGTQTGGDGRGAARAALLAVGGIRAPLPSLGVAPGCPMSKPPRRHPGATPRPGQGGSDAAHGEEGCPCCSSAVATCLGAGLLPPGRGASSPSSGCALPSSSNSRSLFSSGVTSSSSLLGRPSLPRGLPVALELPEGLAMAPGALPAPGASGLSAELGRLSAGSVGPRGAGXASGRAWAPPRAARCSLAPSAGPRAHRGHAGPWPALSSPGPGPSSRCPLPRRSAASLLKPARAINPPGEVNNSRHAALRAVTLTVKVCSFTPEPARPRTPPEGRSFEHIRRVRSFILEVSETKNPPILDTLIHLALGGSFTLFVNFCGWDELIVVLIDQGLHVAV

SEQ ID NO: 52362 - protein, 345 aa, Homo sapiens
  DOMAIN (134)..(171): Eukaryotic-type carbonic anhydrases proteins domain identified by eMATRIX, accession number BL00162C, p-value=1.000e- 19, raw score of 17.78
  DOMAIN (72)..(322): Eukaryotic-type carbonic anhydrase domain identified by PFam, accession name carb_anhydrase, E-value=6.6e-32, PFam score of 117.9
  misc_feature (1)...(345): Xaa = X or * as defined in Table 2
CTWNENQRMEIVWEVLFLLQANFIVCISAQQNSPKIHEGWWAYKEVVQGNFVPVPSFWGLVNSAWNLCSVGKRQSPVNIETSHMIFDPFLTPLRINTGGRKVSGTMYNTGRHVSLRLDKEHLVNISGGPMTYSHRLEEIRLHFGSEDSQGSEHLLNGQAFSGEVQLIHYNHELYTNVTEAAKSPNGLVVVSIFIKVSDSSNPFLNRMLNRDTFTRNXHFKNDGIFYYRGLXYRGELLFQGTSSFITYDGVDGLFPTPGYSRTASWIIMNKPVXYNPGCKMHSLRLLSQEPAISRSFLSMSDNFRPVQPLNNRCIRTNINFSLQGKDCPNNRAQKLQYRVNEWLLK

SEQ ID NO: 52363 - protein, 133 aa, Homo sapiens
RGENPIQGGLERHAGSSLSALSSPGTAYPPGRTTPDHTGAGKKYKRNPAGRGGALWEAESCTDVKTQMRCRAPAWLRRLCGQLLSERLMRPNGVQAVVRGILEGAGAGAAGGSDAEVTAADWKKCDLIAKILA

SEQ ID NO: 52364 - protein, 128 aa, Homo sapiens
  misc_feature (1)...(128): Xaa = X or * as defined in Table 2
CHPALLGPTGHGAWPRHRAPDTLRASAGGRDPXGRRSAPAXERQPXPPVYCAGISQYDXTALSSCLRRSVRTSTDFRSLLDKSNYSVFLCFLQLAGRRYFAMWTRPEFFLARDPRSLSWGLEWRPLSL

SEQ ID NO: 52365 - protein, 376 aa, Homo sapiens
  DOMAIN (257)..(294): Ribosomal protein S5 proteins domain identified by eMATRIX, accession number BL00585B, p-value=2.957e-19, raw score of 18.78
  DOMAIN (178)..(307): Ribosomal protein S5 domain identified by PFam, accession name Ribosomal_S5, E-value=1.9e-47, PFam score of 171.0
MVTACLIAVAKTDGEVQVRRAAIHVVVLLLRGLSQKATEKALLWIGERISKSYEGGTQGVALLSDVYPEKILPDLLAQYDSSKDKHTPETRMKVGEVLMRIVRALGVHVRSVVDYDSVHVPIDDSNTTLQKQAFVMMDTHIAIPFGCYGRLDQCSGIGKDVLEEEILGTESREQVEIKQTHTGHRTRFKAFVTVRDYDGHISLSVKCSKEVTTAIQGTITLAKLSIVPMRRGYWGNKIGKSYTTPCMVTGCCSSGLVHLIPAPRNNGIISTPVPKMLLLMAGIDNCYTSARGCTATLDNFTKATFNAISRTYSCLTPSLWKETIHQASLWNALTITSRPTPEPPCRGPRLQLWLQHKLSYKNNSELHLLKIISRRK

SEQ ID NO: 52366 - protein, 63 aa, Homo sapiens
FHGALCLMGKACTGSLQCCCYKVHHLSDVCEYLLRHSLAQNSHQLQDKQLPLLAFHKKSLMLL

SEQ ID NO: 52367 - protein, 91 aa, Homo sapiens
  misc_feature (1)...(91): Xaa = X or * as defined in Table 2
TRGVLEHMALGKGTLKDPSGPAPXNHPEVSHAASTQEAAGPPAGRPGHGSGCLALPASSTSLEPGLRQDHDLLLQLLWREQEVFHDVIQLL

SEQ ID NO: 52368 - protein, 92 aa, Homo sapiens
  DOMAIN (24)..(92): HesB-like domain identified by PFam, accession name HesB- like, E-value=0.00013, PFam score of -1.2
MSAALVRANVWAVSKRKLQPTWAALTLTPSAVNKIKQLLKDKPEHVGVKVEYTKTKGDSGEVIQDGVRVFIEKKAKLTLLGTEMDYVEEKLS

SEQ ID NO: 52369 - protein, 311 aa, Homo sapiens
  DOMAIN (265)..(291): Hypothetical hesB/yadR/yfhF family proteins domain identified by eMATRIX, accession number BL01152B, p-value=6.121e-11, raw score of 20.12
  DOMAIN (241)..(311): HesB-like domain identified by PFam, accession name HesB- like, E-value=1.5e-05, PFam score of 10.0
MQVWTTAALLVGGHTGTATLENNWRINVDQSHTLRPSSTTPRYISERNSGTCVPACVDNNVHGSIHRTKLWRHPRYHTEENAAHSQGGIPHFSQHNCTKGTDDVIRSPAARSPGLETPTCLLFVIAAIAAVFVDSAIPRLTQHRPQDGSFPYTILDPPLYLPGQCAPPQPLLGVKIPSSPVSRCLHSPYLQCARRVHGERLRRPTSGPRHRGIGTAKMSASLVRATVQAVSKRKLQPTRAALTLTPSAVNKIKQLLKDKPEHVGVKVGVRTRGCNGLSYTLEYTKTKGDSEEEVIQDGVRVLIEKKAQLTL

SEQ ID NO: 52370 - protein, 173 aa, Homo sapiens
  DOMAIN (124)..(171): Hypothetical hesB/yadR/yfhF family proteins domain identified by eMATRIX, accession number BL01152C, p-value=3.875e-14, raw score of 25.93
  DOMAIN (68)..(173): HesB-like domain identified by PFam, accession name HesB- like, E-value=8.7e-24, PFam score of 92.5
  misc_feature (1)...(173): Xaa = X or * as defined in Table 2
PSPVPARPVCPSSAPISMRPPCPWREAEAADLRPEAPGHRDGEDVGFLSSGQLSGLCSKRKLQPTRAALTLTPSAVNKIKHFLKNNPEHVGVKVGVRTRGCNGLSYTLEYTKTKGDSDEEVIQDGVRVFIEKKAQLTLLXTEMDYVEDKLSKGVGVITPNIKGTCGCGESFNI

SEQ ID NO: 52371 - protein, 135 aa, Homo sapiens
QIQHRPWPSRSYTNVLGRKVVYLPSFFTYAKYIVQVDGKIGLFRGLSPLMMSNALYTATRCFMKKDLPPDEIEQVSNKDDMTTSLNKVANDTSYEMMMHCVSRMLPHPLHVISMRCMDQIVGREAKYSGVLSSIG

SEQ ID NO: 52372 - protein, 145 aa, Homo sapiens
  misc_feature (1)...(145): Xaa = X or * as defined in Table 2
RSYTKFVMGIAVSMLTYPFLLVGDLMAVNNCGLQAGLPPYSPVFKSWIHCWKYLSVQGASTGRRRPFLFFATSFSXNGFVDASLHAKGQLFRGSSCFSAGCHQDHALPWSNLNHLKNTVSTWPPWVRPDHLGTPARRLQPNNNQM

SEQ ID NO: 52373 - protein, 407 aa, Homo sapiens
  DOMAIN (198)..(246): Mitochondrial carrier proteins domain identified by PFam, accession name mito_carr, E-value=2.3e-05, PFam score of 21.3
  misc_feature (1)...(407): Xaa = X or * as defined in Table 2
MAGAGAGAGARGGAAAGVEARARDPPPAHRAHPRHPRPAAQPSARRMDGGSGGLGSGDNAPTTEALFVALGAGVTALSHPLLYVKLLIQVGHEPMPPTLGTNVLGRKVLYLPSFFTYAKYIGQRDGREGLVPRLSPRLMSNALSTVTRGSMKKVFPPDEIEQVSNKDDYEDFPXRKLLKETSYEMMMQCVSRMLAHPLHVISMRCMVQFVGREAKYSGVLSSIGKIFKEEGLLGFFVGLIPHLLGDVVFLWGCNLLAHFINAYLVDDSVSDTPGGIGKRPESRFPFSQALALRSYTKFVMGIAVSMLTYPFLLVGDLMAVNNCGLQAGVPPYSPVFKSWIHCWKYLSVQGQLFRGSSCFSAGCHQDHALPWSNLNHLKNTVSTWPPWVRPDHLGTTARRFQPNNNQM

SEQ ID NO: 52374 - protein, 379 aa, Homo sapiens
  DOMAIN (81)..(207): Mitochondrial carrier proteins domain identified by PFam, accession name mito_carr, E-value=0.0025, PFam score of 14.3
  misc_feature (1)...(379): Xaa = X or * as defined in Table 2
PRHPRPAAQPSARRMDGGSGGLGSGDNAPTTEALFVALGAGVTALSHPLLYVKLLIQVGHEPMPPTLGTNVLGRKVLYLPSFFTYAKYIVQVDGKIGLFRGLSPRLMSNALSTVTRGSMKKVFPPDEIEQVSNKDDMKTSLKKVVKETSYEMMMQCVSRMLAHPLHVISMRCMVQFVGREAKYSGVLSSIGKIFKEEGLLGFFVGLIPHLLGDVVFLWGCNLLAHFINAYLVDDSFSQALAIRSYTKFVMGIAVSMLTYPFLLVGDLMAVNNCGAASWGSPPYSPVFKSWIHCWKYLSVQGQLFRGSSCFSAGCHQDHGFALGVNXNHLKNTVSTWPPWVRPDHLGTPARRLQPNNNQMCSSPAGFQFHICHVSVQMWG

SEQ ID NO: 52375 - protein, 141 aa, Homo sapiens
  DOMAIN (35)..(73): Phosphatidylinositol 3- and 4-kinases proteins domain identified by eMATRIX, accession number BL00915B, p-value=1.900e- 27, raw score of 22.78
  DOMAIN (32)..(141): Phosphatidylinositol 3- and 4-kinases domain identified by PFam, accession name PI3_PI4_kinase, E-value=7.2e-29, PFam score of 107.8
GVSELEKEGLRCRSDSEDECSTQEADGQKISWQAAIFKLGDDCRQDMLALQIIDLFKNIFQLVGLDLFVFPYRVVATAPGCGVIECIPDCTFRDQLGRQTDFGMYDYFTRQYGDESTLAFQQNKDRHIGNIMLDKKGHIIH

SEQ ID NO: 52376 - protein, 143 aa, Homo sapiens
PEFPDRRFRIQKDKSGMMQCVIAVADKVFDAFLNMMADKAKTKENEEELERHAQFLLVNFNHIHKRIRRVADNQDTRSNLDITVGSRQQATQGWINTYPLSSGMSTISKKSGMSKKTNRGSQLHKYYMKRRTLLLSLLATEIE

SEQ ID NO: 52377 - protein, 135 aa, Homo sapiens
SASHRGVFPLTATEGYQGYREESPTQCLSGHQFMREMAGAWHMTVEQKFGLFSAEIKEADPLAASEASQPKPCPPEVTPHYIWIDVRACSPTKAVGCSTWGARTVPGVGVAEPKAFGKLGQSAQNPSSAVSAGPR

SEQ ID NO: 52378 - protein, 99 aa, Homo sapiens
ILEVLLQVLHVLLGMCQALEIQDKGISRAFGRYSNMEESLLSKLFPKIPPHSLRVLEELEGVRRRSFNDFRSILPSNLLTVCQEGTLKRKTSSVSSISQ

SEQ ID NO: 52379 - protein, 37 aa, Homo sapiens
  DOMAIN (1)..(37): Phosphatidylinositol 3- and 4-kinases domain identified by PFam, accession name PI3_PI4_kinase, E-value=1.6e-06, PFam score of 27.4
PDIKLTDEMVMIMGGKMEATPFKWFMEMCVRGYLAVR

SEQ ID NO: 52380 - protein, 132 aa, Homo sapiens
MGYVREYILWAASKSQLLAHQFIWNMKTNIYLDEEGHQKDPHRGAGPLLHDTFANLLSDATLHSQVRVRPFCSSGCFCRVSMVNTTVTASDIGDLLDQLVEEITGSLSGPAKDFYQREFDFFNKITNVSAII

SEQ ID NO: 52381 - protein, 136 aa, Homo sapiens
LQRSMSLNIGRAKGSMNRHVAAIGFRFFLLTLGLSLLHADVVPNATIRNVLREKIYSTAFDYFSCPPKFPTQGEKRLREDISIMIKFWTAMFSDKKYLTASQLVPPADIGDLREQLVEENTGSLSGPAKDFLPAGV

SEQ ID NO: 52382 - protein, 245 aa, Homo sapiens
  DOMAIN (157)..(193): Phosphatidylinositol 3- and 4-kinases proteins domain identified by eMATRIX, accession number BL00915D, p-value=5.219e- 22, raw score of 27.02
  DOMAIN (119)..(195): Phosphatidylinositol 3- and 4-kinases domain identified by PFam, accession name PI3_PI4_kinase, E-value=4.8e-20, PFam score of 76.1
  misc_feature (1)...(245): Xaa = X or * as defined in Table 2
GPNCRPPSCSAVEGAWPRPQGAGARAAIALSQKLELGGVGLVQVQCPSLAPSSTSSILFLCLLPHPPPHRCLQENTTCLLGVEGVLLLQSPFPLLKTDHSSLPALAPTQSQAALWGFADFGFMFESSPGGNLGWEPDIKLTDEMVMIMGGKMEATPFKWFMEMCVRGYLAVRPYMDVVVSLVTIMLDTGLPCFRGQIKFLKHRFSPNMTEREAXNFIMKVIQSCFLSNRSRTYNMIQYYQNDIPY

SEQ ID NO: 52383 - protein, 2117 aa, Homo sapiens
  DOMAIN (1900)..(1939): Phosphatidylinositol 3- and 4-kinases proteins domain identified by eMATRIX, accession number BL00915C, p-value=7.469e- 33, raw score of 22.43
  DOMAIN (1507)..(1700): Phosphoinositide 3-kinase family, acce domain identified by PFam, accession name PI3Ka, E-value=3e-61, PFam score of 216.9
  misc_feature (1)...(2117): Xaa = X or * as defined in Table 2
SAGPAGPLQVQKLLCMCPVDFHGIFQLDERRRDAVIALGIFLIESDLQHKDCVGPYLLRLLKGLPKVYWVEESTARKGRGALPVAESFSFCLVTLLSDVAYRDPSLRDEILEVLLQVLHVLLGMCQALEIQDKEYLCKYAIPCLIGISRAFGRYSNMEESLLSKLFPKIPPHSLRVLEELEGVRRRSFNDFRSILPSNLLTVCQEGTLKRKTSSVSSISQVSPERGMPPPSSPGGSAFHYFEASCLPDGTALEPEYYFSTISSSFSVSPLFNGVTYKEFNIPLEMLRELLNLVKKIVEEAVLKSLDAIVASVMEANPSADLYYTSFSDPLYLTMFKMLRDTLYYMKDLPTSFVKEIHDFVLEQFNTSQGELQKILHDADRIHNELSPLKLRCQASAACVDLMVWAVKDEQGAENLCIKLSEKLQSKTSSKVIIAHLPLLICCLQGLGRLCERFPVVVHSVTPSLRDFLVIPSPVLVKLYKYHSQYHTVAGNDIKISVTNEHSESTLNVMSGKKSQPSMYEQLRDIAIDNICRCLKAGLTVDPVIVEAFLASLSNRLYISQESDKDAHLIPDHTIRALGHIAVALRDTPKVMEPILQILQQKFCQPPSPLDVLIIDQLGCLVITGNQYIYQEVWNLFQQISVKASSVVYSATKDYKDHGYRHCSLAVINALANIAANIQDEHLVDELLMNLLELFVQLGLEGKRASERASEKGPALKASSSAGNLGVLIPVIAVLTRRLPPIKEAKPRLQKLFRDFWLYSVLMGFAVEGSGLWPEEWYEGVCEIATKSPLLTFPSKEPLRSVLQYNSAMKNVTVTPAELSELRSTIINLLDPPPEVSALINKLDFAMSTYLLSVYRLEYMRVLRSTDPDRFQVMFCYFEDKAIQKDKSGMMQCVIAVADKVFDAFLNMMADKAKTKENEEELERHAQFLLVNFNHIHKRIRRGANKYLSGLGEXVPHLLWSGTVLKTMLDILQTLSLSLSADIHKDQPYYDIPDAPYRITGPDTYEARESIVKDFAARCGMILQEAMKWAPTVTKSHLQEYLNKHQNWVSGLSQHTGLAMATESILHFAGYNKQNTTLGATQLSERPACVKKDYSNFMASLNLRNRYAGEVYGMIRFSGTTGQMSDLNKMMVQDLHSALDRSHPQHYTQAMFKLTAMLISSKDCDPQLLHHLCWGPLRMFNEHGMETALACWEWLLAGKDGVEVPFMREMAGAWHMTVEQKFGLFSAEIKEADPLAASEASQPKPCPPEVTPHYIWIDFLVQRFEIAKYCSSDQVEIFSSLLQRSMSLNIGGAKGSMNRHVAAFGPRFKLLTLGLSLLHADVAPNATIRNVLREKIYSTAFDYFSCPPKFPTQGEKRLREDISIMIKFWTAMFSDKKYLTASQLVPPDNQDTRSNLDITVGSRQQATQGWINTYPLSSGMSTISKKSGMSKKTNRGSQLHKYYMKRRTLLLSLLATEIERLITWYNPLSAPELELDQAGENSVANWRFKYISLSEKQWKDNVEPSPGSISPYLAVQLPARFKNTEAIGNEVTRLVRLDPGAVSDVPEAIKFLVTWHTIDADAPELSHVLCWAPTDPPTGLSYFSSMYPPHPLTAQYGVKVLRSFPPDAILFYIPQIVQALRYDKMGYVREYILWAASKSQLLAHQFIWNMKTNIYLDEEGHQKDPDIGDLLDQLVEEITGSLSGPAKDFYQREFDFFNKITNVSAIIKPYPKGDERKKACLSALSEVKVQPGCNLPSNPEAIVLDIDYKSGTPMQSAAKAPISGPSFKVKRCGVSELEKEGLRCRSDSEDECSTQEADGQKISWQAAIFKVGDDCRQDMLGLQIIDLFKNIFQLVGLDLFVFPYRVVATAPGCVGVIECIPDCTSRDQLGSQTDFGMYDYFHTASNGDEFHSGPFQQARYNFIRSMAAYSLLLFLLQIKDRHNGNIMLDKKGHIIHIDFGFMFESSPGGNLGWEPDIKLTDEMVMIMGGKMEATPFKWWFMEMCVRGYLAVRPYMDAVVSLVTLMVGPRAWPCFRVQTIKVLRHRFTPNSTEPEPSNFIMKGQSRSCFLSNRSRTLRTMIKYYQNDIPLLEGRGTFRRASCPQCALQKLFPTIQWSPATSRALPPHAVEERPVAQRTW

SEQ ID NO: 52384 - protein, 132 aa, Homo sapiens
  misc_feature (1)...(132): Xaa = X or * as defined in Table 2
IHKAASGVPQQPDAGCPGTGEQQGGQRCGQXAGPAQAPCXSRAGTRPTCFFVLTSLRSWYRVDSPNKLMNPLVAGFFGCHCGSGQCLRKCSSARDRAPDARPGLDLAQGRCCHCNKACLHASETGVGTTSVL

SEQ ID NO: 52385 - protein, 51 aa, Homo sapiens
REDSLAGRLISPCNSDTVSPGLVGFMTCAQSLISRRPGKDQEALIGALAEL

SEQ ID NO: 52386 - protein, 110 aa, Homo sapiens
  misc_feature (1)...(110): Xaa = X or * as defined in Table 2
FLADQEDPLDPRAGCRXETTAPRIPSKGPSSTEPLHASTAVPPCQGELGCSRASPASEKIDLAGRLISPCNSDTVSPGLGGFMTCAQSLISRRPGGPIGPPGWLQGPHLG

SEQ ID NO: 52387 - protein, 683 aa, Homo sapiens
  DOMAIN (324)..(330): Probable rabGAP domain proteins domain identified by eMATRIX, accession number PF00566B, p-value=6.100e-09, raw score of 11.92
  DOMAIN (236)..(437): TBC domain identified by PFam, accession name TBC, E-value= 3.6e-10, PFam score of 39.3
  misc_feature (1)...(683): Xaa = X or * as defined in Table 2
LSGSGAPPPGVGAQAAAAAEEEEREVVRVRVKVRLAVSRPSRRGKFRSFAVDPQITSLDVLQHILIRAFDLSGXVGRCWGLLGRDRLGQEVYLSLLSDWDLSTAFATASKPYLQLRVDIRPSEDSEYSVPPGAISPKDVIGSDVLLAEKRSSLTTAALPFTQSILTQVFSGTLGTQQVLSWSYGEDVKPFKPPLSDAEFHTYLNHEGQLSRPEELRLRIYHGGVEPSLRKVSILSHLLVYPDGLTGRERMDYMKRKSREYEQLKSEWAQRANPEDLEFIRSTVLKDVLRTDRAHPYYAGPEDGPHLRALHDLLTTYAVTHPQVSYCQGMSDLASPILAVMDHEGHAFVCFCGIMKRLAANFHPDGRAMATKFAHLKLLLRHADPDFYQYLQEAGADDLFFCYRWLLLELKREFAFDDALRMLEVTWSSLPPDPPEHEVELVGPPSQVADTGFGDHRGWPVRQRHMLRPAGGGGSTFEDAVDHLATASQGPGGGGRLLRQASLDGLQQLRDNMGSRRDPLVQLPHPAALISSKGLSEPLLNYPDPLLSSFSHPDSPSSSSPPSTQEASPTGDMAVGSPLMQEVGSPKDPGKSLPPVPPMGLPPPQEFGRGNPFMLFLCLAILLEHRDHIMRNGLDYNELAMHFDRLVRKHHLGRVLRRARALFADYLQSEVWDSEEGAEATAAS

SEQ ID NO: 52388 - protein, 86 aa, Homo sapiens
DMSDTSESGAGLTRFQAEASEKDSSSMMQTLLTVTQNVEVPETPKASKALEVSEDVKASSTTQLTDTQVLAAENKSLAADTKKQNA

SEQ ID NO: 52389 - protein, 93 aa, Homo sapiens
ANDLVKYLLAKDQTKIPIKRSVLASLLISTEPGYATLGVVGKESIAWASGPPGISSVRCSQHSPLADMLKDIIKEYTDVYPEIIERAGYSLEK

SEQ ID NO: 52390 - protein, 132 aa, Homo sapiens
DMSDTSESGAGLTRFQAEASEKDSSSMMQTLLTVTPEAREAPATQASSTTQLTDTQVLAAENKSLAADTKKQNADPQAVTMPATETKKVSHVADTKVNTKAQETEAAPSQAPADEPEPESAAAQSQENQDTR

SEQ ID NO: 52391 - protein, 233 aa, Homo sapiens
  misc_feature (1)...(233): Xaa = X or * as defined in Table 2
TSLSCYFSRTKDSPKLGLLMVLLSIIFMNGNRSSEAVIWEVLRKLGLRPGYDWALSALAVRVVLWQERTVLGLHQSGGLVERVGCWTGXRAQGSDLGGXWVNGPELSAPSLSVSWASMELPSCAGNLFSILEMPLPTSGKCHSLEXIYLFIYFSFSSLRIHHSLFGDVKKLITDEFVKQKYLDYARVPNSNPPEYEFFWGLRSYYETSKMKVLKFGCKVQKKDPKEWAAQYRE

SEQ ID NO: 52392 - protein, 106 aa, Homo sapiens
FGSASISVDKHRTGVMPPLVWVGKESIAWASGPPGISSVRCSQHSPLADMLKDIIKEYTDVYPEIIERAGYSLEKVFGIQLKEIDKNDHLYILLSTLEPTDAGILG

SEQ ID NO: 52393 - protein, 637 aa, Homo sapiens
  DOMAIN (277)..(330): ANTIGEN MELANOMA-ASSOCIATED MULTIGENE FAMILY TUM domain identified by eMATRIX, accession number PD01876C, p-value=9.109e- 12, raw score of 21.73
  DOMAIN (52)..(430): MAGE family domain identified by PFam, accession name MAGE, E -value=5e-11, PFam score of 38.3
  misc_feature (1)...(637): Xaa = X or * as defined in Table 2
NMSDTSESGAGLTRFQAEASEKDSSSMMQTLLTVTQNVEVPETPKASKALEVSEDVKVSKASGVSKATEVSKTPEAREAPATQASSYLLSLTDTQVLAAENKSLAAXHQGNRMVDPQACXQLPATETKKVSHVADYGRFNYKGFRRLRLAPSQAPADEPEPESAAAQFSGRFRVFGPKVKAKKARKVKHLDGEKDGSSDQSQASGTTGGRRVSKALMASMARRASRGPIAFWARRASRTRLAAWARRAFALPLEITLKPRRAKGLRRRVAKFQSSQEPEAPPPRGLALLQGRANDLVKYLLAKDQTKIPIKRSDMLKDIIKEYTDVYPEIIERAGYSLEKVFGIQLKEIDKNDHLYILLSTLEPTDAGILGTTKDSPKLGLLMVLLSIIFMNGNRSSEAVIWEVLRKLGLRPGIHHSLLGDVKKLITDEFVKQKYLGLCQKVPNSNPPEYEFLLGACALYXXEPAKMKSPQSFACKVYQKEGSPRNWGSSVPPREGKGRMEADFEGCKLRLTLEAKAKGPRLEAPNGPLGLGSGEMLAGPCNWDEADIGNPWAKARIPRREQKLKAKAPKRSGSASTGASTSTNNSASASASTSGGFSAAASLTATLHIWGSSAGLWLELGCQHQSARSGACGVSYK

SEQ ID NO: 52394 - protein, 162 aa, Homo sapiens
  DOMAIN (44)..(125): PCI domain identified by PFam, accession name PCI, E-value= 1.4e-31, PFam score of 118.4
EFRQPSFRRSIWPYFLLTQAVRTGNPAKFNQVLDQFGEKFQADGTYTLIIRLRHNVIKTGVRMISLSYSRISLADIAQKLQLDSPEDAEFIVAKAIRDGVIEASINHEKGYVQSKEMIDIYSTREPQLAFHQEGKDSSVYSFREWGTRTGMSWLVCFLKLRL

SEQ ID NO: 52395 - protein, 142 aa, Homo sapiens
  DOMAIN (44)..(126): PCI domain identified by PFam, accession name PCI, E-value= 3.1e-28, PFam score of 107.2
QFRQPSLKRSLMPYFLLTQAVRTGNLAKFNQVLDQFGEKFQADGTYTLIIRLRHNVIKTGVRMISLSYSRISLADIAQKLQLDSPEDAEFIVAKAIRDGVIEASINHEKGYVQSKDSSVYSFREWGTRTGMSWLVCFLKLRL

SEQ ID NO: 52396 - protein, 109 aa, Homo sapiens
GTRFQADGTYTLIIRLRHNVIKTGVRSGSEGLLEEQKPGQGKPSGYPWASEGSVSTLPTPSLLPLPGVRMISLSYSRISLADIAQKLQLDSPEDADFIVAKVGLVQEPQ

SEQ ID NO: 52397 - protein, 681 aa, Homo sapiens
  DOMAIN (13)..(33): ALPHA-2A ADRENERGIC RECEPTOR SIGNATURE domain identified by eMATRIX, accession number PR00558C, p-value=7.330e-09, raw score of 6.54
  DOMAIN (421)..(509): PCI domain identified by PFam, accession name PCI, E-value= 2.1e-13, PFam score of 58.0
  misc_feature (1)...(681): Xaa = X or * as defined in Table 2
AVTPGAMKQEGSARRRGADKAKPPPGGGEQEPPPAPAPQDVEMKEEAATGGGSTGEADGKTAAAAAXSNFPAKSWDYSHLWKDIKEHRETSXRKAVSGKEPRFVLRALRMLPSTSRRLNHYVLYKAVQGAFFTSNNATRDFLLPFLERAHGTQEADLLFRPRTGKAAGTPLLPEVEAYLQLLVVIFMMNSKRYKEAQKISDDLMQKISTQNRRALDLVAAKCYYYHARVYEFLDKLDVVRISLHGRLRTATLRHDADGQATLLNLLLRNYLHYKLVPTSLRSLVSKSVFPEEQAQQPNEWGQVTSYLHQGRIKAIQLEYSEARRTMTNALRKAPQHTAVGFKQTVHKLLIVVELLLGEIPDRLQFRQPSLKRSLMPYFLLTQAVRTGNLPRFTQVLDQFGEKFQADGTYTLIIRLRHNVIKTGVRMISLSYSRISLADIAQKLQLDSPEDAEFIVAKAIRDGVIEASINHEKAYVQSKEMIDIYSTRDPQLALHQRISFCLDIHNMVWSRPMRVPSPKSYKQGSWSLQRNGRERRNKQDLEFPKEMAEDDDDSFPLKLGGWGGVRGKWGTRQLCPPWGYPLPQGTCPPFSPHTAHMLAFRGRGWGCWEPATPDLPPGLLPSRVTLLVQPGRRVGRQPPRGRVLASSVADRRGRISLCTPFREWGTRTWDVYGLLCFLKLRL

SEQ ID NO: 52398 - protein, 87 aa, Homo sapiens
IDYLLRKRTSKIVAKCVYANRWCRDRGADLVGSWRTIPAHGPRTDGSTSVFSAKRTQVSGSMWLPQALDPGRQDTLDHGGPWGGKAQ

SEQ ID NO: 52399 - protein, 117 aa, Homo sapiens
LPLSMDVRAPPAVMAAVDQALKEFGRIDILINCSSSSCGLPFCRAAGNFLCPAGALSFNAFKTVMDIDTSGTFNVSRVLYEKFFRDHGGVIINITATLGNRGQALQVHAGSAKAAVD

SEQ ID NO: 52400 - protein, 83 aa, Homo sapiens
  misc_feature (1)...(83): Xaa = X or * as defined in Table 2
GPWSCHAGAXGPGATQVSEDQGLREPHGSRDLCSLGXKHXGAPICAWPMSWDGPPAAHKVRPSVSAPPVCINTLCYNLASAFS

SEQ ID NO: 52401 - protein, 119 aa, Homo sapiens
  DOMAIN (14)..(35): GLUCOSE/RIBITOL DEHYDROGENASE FAMILY SIGNATURE domain identified by eMATRIX, accession number PR00081F, p-value=5.891e- 10, raw score of 15.71
  DOMAIN (16)..(46): Short chain dehydrogenase/reductase C-te domain identified by PFam, accession name adh_short_C2, E-value=1.5e-10, PFam score of 43.1
GPQASLSTKVTASPLQRLGNKTEIAHSVLYLASPLASYVTGAVLVADGGAWLTFPNGIFRPLLPAASLSQVESTNLNQQCLQPSPSSEHSAITALSLPTAPTPGQEQLDSGPGPWSCHA

SEQ ID NO: 52402 - protein, 371 aa, Homo sapiens
  DOMAIN (313)..(334): GLUCOSE/RIBITOL DEHYDROGENASE FAMILY SIGNATURE domain identified by eMATRIX, accession number PR00081F, p-value=5.891e- 10, raw score of 15.71
  DOMAIN (50)..(266): short chain dehydrogenase domain identified by PFam, accession name adh_short, E-value=1.2e-10, PFam score of 48.9
  misc_feature (1)...(371): Xaa = X or * as defined in Table 2
AGNPSGIPGTRVHRGQRGGFASTWSGRGAGSTPLQNSPPRQPHREKEFLRQVLEGGSHTGVFRPSAARLVPNPHSLVSPDLLXLVSRATPHIFLAARKLAGATGRRCLPLSMDVRAPPAVMAAVDQALKEFGRIDILINCESVLSEVGGFSQAPAAPAVSHSAGAAGNFLCPAGALSFNAFKTVMDIDTSGTFNVSRVLYEKFFRDHGGVIVNITATLGNRGQALQVHAGSAKAAVDAMTRHLAVEWGPQNIRVNSLAPGPISGTEGLRRLDASQGMSWGRGEGAGSWGSRGLSLLLPSGGPQASLSTKVTASPLQRLGNKTEIAHSVLYLASPLASYVTGAVLVADGGAWLTFPNGVKGLPDFASFSAKL

SEQ ID NO: 52403 - protein, 477 aa, Homo sapiens
  DOMAIN (415)..(448): CTF/NF-I proteins domain identified by eMATRIX, accession number BL00349G, p-value=5.781e-30, raw score of 19.72
  DOMAIN (365)..(446): CTF/NF-I family domain identified by PFam, accession name CTF_NFI, E-value=1.2e-08, PFam score of 31.5
MKVQDQTDSLSLLRLSRELLDEKEPEVLQDSLDRCYSTPSGYLELPDLGQPYSSAVYSLEEQYLGLALDVDIPSWWYGEDQDSPVLRLQTSTSQWPVRNRTAQQEGSGGTNSCRNWPKFFSLRFGKFFILQHESRSNEEVFTQHILYEEVNTGDSLSVMPTADITAQCQLFSHRAPKALNIQFTGVALKAILNSWQFSEHITLHSQCGFFLIGSSLLGVMFEISDNLCDMSIPIRTDTALLAGLSLARSWNAPDLQDINPLDFGLWRQELEPAAYSSKETGTGCGSSSNLIDNKNQTQTLGTTQTQDFVLHPVTHQTEQKFKRSPRTTLSCPIASSLGFLSTRGAVSKRKVVAIAFKHAPICYFSSTKRLKSVEDEMDSPGEEPFYTGQGRSPGSGSQSSGWHEVEPGMPSPTTLKKSEKSGFSSPSPSQTSSLGTAFTQHHRPVITGPRESKFHKARDSLLNPSTKKSAWHTADAQ

SEQ ID NO: 52404 - protein, 535 aa, Homo sapiens
  DOMAIN (33)..(79): CTF/NF-I proteins domain identified by eMATRIX, accession number BL00349A, p-value=1.000e-40, raw score of 10.07
  DOMAIN (34)..(517): CTF/NF-I family domain identified by PFam, accession name CTF_NFI, E-value=3.4e-211, PFam score of 715.0
  misc_feature (1)...(535): Xaa = X or * as defined in Table 2
LSHPHSRTPPNRTPRRTRIPQRPAVMYSPLCLTQDEFHPFIEALLPHVRAFAYTWFNLRARKRKYFKKHEKRMSKEEERAVKDELLSEKPEVKQKWASRLLAKLRKDIRPEYREDFVLTVTGKKPPCCVLSNPDQKGKMRRIDCLRQADKVWRLDLVMVILFKGIPLESTDGERLVKSPQCSNPGLCVQPHHIGVSVKELDLYLAYFVHAGRISSQSESPSQPSDADIKDQPENGTFGASRDSFVTSGVFSVTXAXLRVSQTPIAAGTGPNFSLSDLESSSYYSMSPGAMRRSLPSTSSTSSTKRLKSVEDEMDSPGEEPFYTGQARSPGKWTVSPSGLSVSWSQGMPSPTTLKKSEKSGFQQPLPFHRPPSLGNGFHTAFTDLFIYQGPQSKFHIATPSILHFPRHSPFFQQPGPYFSHPAIRYHPQETLKEFVQLVCPDAGQQAGQPNGSSQGKVHNPFLPTPMLPPPPPPPMARPVPLPVPDTKPPTTSTEGGAASPTSPTTRSPGRTRPQQPFLSYGPPXPHFLRAGIHHL

SEQ ID NO: 52405 - protein, 62 aa, Homo sapiens
VKLGRPQGSWRSNPDPAPCSCPGLGSVTYQRPQGDPYTLMTSPRYNTETQTTAESPCDPCRY

SEQ ID NO: 52406 - protein, 273 aa, Homo sapiens
  misc_feature (1)...(273): Xaa = X or * as defined in Table 2
SRLGHPRKDMDDDTKATLISYMSLSFRHGYCFSEDPCVHTELGIQSGRGGRGDPDPPGNALEXLAHLGPSSHLGPXAQDGLVDAAGRASPLAGTEGAGRFSHLQPIGPRGPPEXGAAGERFPSGVAGGPRGAHGLPCPEQLQLQPPPPSXMPKTGSTFVAHFPSPLAQGHSPPGGGAGWCSGCSPDRPPLLGVGSHGELLNPNSPAYEVGAGRPATGSSGTRAGPPSPSHSAPGRTPSVSLCDRHQCLRASPTGSIGSLPAHWREGLAGPLMD

SEQ ID NO: 52407 - protein, 518 aa, Homo sapiens
  DOMAIN (289)..(304): WILM'S TUMOUR PROTEIN SIGNATURE domain identified by eMATRIX, accession number PR00049D, p-value=5.576e-09, raw score of 0.00
  DOMAIN (191)..(354): Collagen triple helix repeat (20 copies) domain identified by PFam, accession name Collagen, E-value=5.3e-14, PFam score of 59.9
  misc_feature (1)...(518): Xaa = X or * as defined in Table 2
TAKNSYLESCPLHMENSIHQWPRQPFPPVRRQGADAACGAGSQALVPSHSDTDGVLPGAEWLGDGGPARVPGAAGGRGPAPTSXAGPXLSLXAPLCFSGLSGNGKQLLGAAGRSSSHAQMHELHPAQXHEXATDHTGGQGPPGXKQQNGPPGPDNDLPAPESTPPTWNEDFLPDAIPLAHPVPRQRRPTGPAGPPGQTGPPGPAGPPGSKGDRGQTGEKGPAGPPGLLGPPGPRGLPGEMGRPGPPGPPGPAGNPGPSPNSPQGALYSLQPPTDKDNGTQGWPLPSWTQCWSGVPGPRGPPGPPGPPGPRGPPGPPGTPGSQGLAGERGTVGPSGAGGAAAERGPEDPGRASPHPGAHDWDPRSPGLPRGRFWPGCCPESQPQDEEGWHPTRWGPCCPAWARPWTEERGSRPAAGSRGVSDISETPGRPIYPDDKSQSAVSVLCARSRLRAQLRPGAEQMNDCKGITGTRQDIHAVSFASEHNIQNWVSKHLQLSPPVTPATQAPLKVRVPQASTLVL

SEQ ID NO: 52408 - protein, 55 aa, Homo sapiens
  misc_feature (1)...(55): Xaa = X or * as defined in Table 2
PSCTNPYGGGRRCDSVVPNQCFTKHMQSRLLGXGEKALEGGGGRGVKSLVTKRDF

SEQ ID NO: 52409 - protein, 190 aa, Homo sapiens
  DOMAIN (34)..(71): Ribosomal protein L16 proteins domain identified by eMATRIX, accession number BL00586B, p-value=2.680e-12, raw score of 17.00
  misc_feature (1)...(190): Xaa = X or * as defined in Table 2
KGTTLCQKHWGGGYLHWGHFEMMRLTINRSMDPKNMFAIWRVPSPFQPITRKSVGHRMGGGKGAIXHYLTPVKAGRLVVEMGGRCEFARSAKVSLTQVALRSCPFASKRLXACGTPREGCEQDQEERERQQPRTPWTIXAEXPTAQHGWAYGKVPEPHMTLTPQGEILGARFYMPKTCVVSVGDILYIGY

SEQ ID NO: 52410 - protein, 89 aa, Homo sapiens
  misc_feature (1)...(89): Xaa = X or * as defined in Table 2
NQRSGKKSQPWXSTITPPSLIWLSNSSTTLSSSKMGQSYSSSXPSYNCSVSRMFGSNMVPAATASGASLTCPLLWLSMTHFRRKVGGWA

SEQ ID NO: 52411 - protein, 140 aa, Homo sapiens
  misc_feature (1)...(140): Xaa = X or * as defined in Table 2
STAQSISRSDLHYFLALLVYYWAADARFLPGRIPWLIHKELEKSHTEYCLVGSSQYTPLVQVFRSNTLVSVLSTKTIXNQRSGKKSQPWXSTITPPSLIWLSNSSTTLSSSKMGQSYSSSXPSYNCSSRAKSPTLTVFQS

SEQ ID NO: 52412 - protein, 291 aa, Homo sapiens
  DOMAIN (245)..(289): Osteopontin proteins domain identified by eMATRIX, accession number BL00884B, p-value=9.735e-10, raw score of 12.47
  DOMAIN (11)..(159): Transcription initiation factor IID, 31kD su domain identified by PFam, accession name TFIID-31, E-value=3.1e-24, PFam score of 94.0
  misc_feature (1)...(291): Xaa = X or * as defined in Table 2
LEKSDHRISWSPGKTASPKSMPERWHRXWAQILKDMGITEYEPRVINQMLEFAFRYVTTILDDAKIYSSHAKKATVDADDVPIGQSRCRAGSSLFTSPPPKRFLLLRYLARQKKSNPFCPLIKPYSGPRLPPDRYCLTAPNYRLKSFTEKGHSTSAGKELTVPRLSVGFRLLSRTKVLPTLGAHPTPQTMSVFNLKXGTPHVPSPGQRFTSTRCPTSQSPAVKSFQFPGNLSQFQNVLINPIHXIGSQKHSYYPLNMMSSQNTANESSNALKRKREDDDDGDDDDDDYDNL

SEQ ID NO: 52413 - protein, 43 aa, Homo sapiens
FSPFPPIPILFSFSEAVDETKPKESARQDEGKEEEPEADQEHA

SEQ ID NO: 52414 - protein, 340 aa, Homo sapiens
  DOMAIN (61)..(98): Neuromodulin (GAP-43) proteins domain identified by eMATRIX, accession number BL00412B, p-value=1.000e-40, raw score of 10.60
  DOMAIN (64)..(84): IQ calmodulin-binding motif domain identified by PFam, accession name IQ, E-value=4.5e-05, PFam score of 30.3
  misc_feature (1)...(340): Xaa = X or * as defined in Table 2
ACEQKRGGEGGNKNRERRKGEKAGRRQGTRQPCSRCMRRTKQVEKNDDDQKIEQDGIKPEDKAHKAATKIQASFRGHITRKKLKGEKKDDVQAAEAEANKKDEAPVFADGVEKKGEGTTTARSSPQPLAPKPDEPGKAGETSSEEKMGEGXLLATEQGSPPRLLASSEEKAGSAETESATKASTDNSPSSKAEDAPAKEEPKQADVPAAFGVFPNPLGALLLAATTPAAEDAAAKATAQPPTETGESSQAEENIEAVDETKPKESARQDEGKEEEPEADQEHAWNSGEMGFPHPHPPGCLACLSLPSSQLHSEVPSCPAHVCESVLSHPLALFLSVWANI

SEQ ID NO: 52415 - protein, 519 aa, Homo sapiens
  DOMAIN (191)..(413): Fumarylacetoacetate (FAA) hydrolase fam domain identified by PFam, accession name FAA_hydrolase, E-value=2.4e-48, PFam score of 174.0
  misc_feature (1)...(519): Xaa = X or * as defined in Table 2
HGFRLPHPQPALRRLLDQRRPKTEDRCGHWDQILDLSIIKHLFSMSFIPVAEDSDFPIHNLPYGVFSTRGDPRPRIGVAIGDQILDLSIIKHLFTGPVLSKHQDVFNQPTLNSFMSLGHAAWKEARVFLQNLLSLXSQARLRDDTELRKCAFISQASATMHLPATIGDYTDFYSSRQHATNVGIMFRDKENALMPNWLHLPVGYHGRASSVVVSGTPIRRPMGQMKPDDSKPPVYGACKLLDMELEMAFFVGPGNRLGEPIPISKAHEHIFGMVLMNDWSARDIQKWEYVPLGPFLGEEFWGPLSLPWGGCPWDALMPFAVPNPKAVPQAPCRYLCHDEPYTFDINLSVNLKGEGMSQAATICKVQILKYMYWTMLQQAHSPTLSNGCNLRPGGPPGLSGTHQAGPEPEKNFGSMVELSWKGTKPIDLGNGQTRKFLLDGDEVIITAMATRDFKWYCQGDGYRIGFGQCAGKVLPALLPIMRFSLLFWKQRAQSTPFQPCDWGSSPRAVGLVPPFQLTN

SEQ ID NO: 52416 - protein, 206 aa, Homo sapiens
  DOMAIN (57)..(96): Bacterial surface antigen domain identified by eMATRIX, accession number PF01103J, p-value=3.066e-10, raw score of 9.61
DSRNSSILPRRGALLKVNQELAGYTGGDVSFIKEDFELQLNKQLIFDSVFSASFWGGMLVPIGDKPSSIADRFYLGGPTSIRGFSMHSIGPQSEGDYLGGEAYWAGGLHLYTPLPFRPGQGGFGELFRTHFFLNAGNLCNLNYGEGPKAHYIVKLAECIRWSYGAGIVLRLGNIARLELNYCVPMGVQTGDRICDGVQFGAGIRFL

SEQ ID NO: 52417 - protein, 682 aa, Homo sapiens
  misc_feature (1)...(682): Xaa = X or * as defined in Table 2
GPMSEGIASQGARRRRGIMGLRGLWASRADGRRGETEPEAKQEILENKDVSFLLKVLIELLVETFTSIHHXGDDVFKAKNLIEVGVVSTWCAFPVSSEELVNVPMXNIDTCQGTYCGVVSLXFPFCPSEKSCFYGQNNTMVGNNEGSMVCYRLFTFLYWNLELGTFTLXLHSKETSYGLSFFKPRPGNFERKXEAQQIIEYTGLIEKLKXVAYLXKSAEYSVSAFQSFPLGLGENRVAFSLIPKGSYLIQXVSNGCWHLHCQPLLWGSYHRILAELRVLIESTWPFEGXLCNGTSQAFSCGPCTPSRSSARHGHSVCGQLLVADVPGVKGMLGENNHLFLKYXSMNGXFALYFPLDLFSCFLXESFPLTAPSLEGSRLTLETMYLLCQGGFGELFRTHFFLNAGNLCNLNYGKTCAIQETIVVQLFSCLKAQYTKIRLGNIARLELNYCVPMGVQTGDRYVLGIIFHNHIPLSSNFILFWTWFASGDTAGAARLLRLPTDDRAFRDGGGCSHNRQLPFPSTPLLFSTQSPSWKGCSHAGCMHVCLGAQLPGLGAQLGHGSESQVERLLACGGRWGARRQGCCWHDLPKAPHAGCFLAGEKKVGDDQEPCTKTAAVREGESVGCTAEGGCLGLSGGCQGWLAPGLVELRSAAARQEGSRRRRKRRRHLLRVHPQKVVSGQTRA

SEQ ID NO: 52418 - protein, 339 aa, Homo sapiens
MESCEVPKPREDLSGLPLEVHGRGDTEWSPRALRRSTVPRALRRSTVVCILECTFPKVHSQLQGQVHTADTCETCGCRGGTKGEREQWALALGVSKHLLLLLLAATGGASAVVDARPAFLLLWVRLCCPFTFFPFAFPLGRLQSEHPPNAEGPVRSWDLSNIFMLRQHLHKRHNLKSCLVRFVAKSSFSLRSTSGCWLPLTPTDQPQLGGENAVLVASRSKFDRLAMNSHSMKTSEPGTECLGKSLVKMRPRGLRDQTWEGGPIETIAGTQPGRAENRDQLLLAGTVITTITRDGSLHATVSIINIYKEGNLAIQQAGKNMSARLTVVCKQCPLLRRGQ

SEQ ID NO: 52419 - protein, 145 aa, Homo sapiens
  DOMAIN (37)..(135): NTR/C345C module domain identified by PFam, accession name NTR, E-value=0.074, PFam score of 0.2
MLLEQLDIDMPESEFRHRAYTLHENKLKMGHRPKCKTQSFETPGIKLLAGTVITTITRDGSLHATVSIINIYKEGNLAIQQAGKNMSARLTVVCKQCPLLRRGLNYIIMGQVGEDGRGKIMPNSFIMMFKTKNQKLLDALKNKQC

SEQ ID NO: 52420 - protein, 451 aa, Homo sapiens
  DOMAIN (161)..(434): Transient receptor domain identified by PFam, accession name Trans_recep, E-value=1e-103, PFam score of 345.1
MSGEELVFRIYKELIQLNDKKVKIPKYDRKLGRAVKVTLKGLGPQRGSKEQSPSKDSQCSTGVESPIGEYKHCWRVQASADQRKDFFSEWGLFTGGFLKEYLLCGVDSLTIFYNCLGDSRLKCWDYRREPQHWATNSLFLTKALWMYKCGIAHGCMESGVLAHVAIFVTRFSYGEELQSFVGAVIVGTYNVVVVIVLTKLLVAMLHKSFQLIANHEDKEWKFARAKLWLSYFDDKCTLPPPFNIIPSPKTICYMISSLSKWICSHTSKGKVKRQNSLKIICVLFLLHFPVWVDLVITVVCESLRVWADCSMPRLRCKDLAAAFIGGAGKEVPRPVFTCGGILTGESGFIGSEGFPGVYPPNSKCTWKITYHIVVLKEWRNLKQKRDENYQKVMCCLVHRYLTSMRQKMQSTDQATVENLNELRQDLSKFRNEIRDLLGFRTSKYAMFYPRN

SEQ ID NO: 52421 - protein, 278 aa, Homo sapiens
  DOMAIN (131)..(227): CUB domain identified by PFam, accession name CUB, E-value= 1.2e-10, PFam score of 48.8
IHVPILPFICSVLELILSSLALWLFVRFCQGDKSRKIGLEQKAAEGRPIVSERNELLIQFLSDLSLTADGFIGHYIFRPKKLPTTTEQPVTTTFPVTTGAPPLLCGTSICPPPATLSGHASGQGFSDQYQCSPSEVMAPWPLVQSLPTCEVPEGKVVVLNFRFIDLESDNLCRYDFVDVYNGHANGQRIGRFCGTFRPGALVSSGNKMMVQMISDANTAGNGFMAMFSAAEPNEREKSVIYYCTKPYPDAAAKHEKYFLELSAVRDRIRDTFIAFAQI

SEQ ID NO: 52422 - protein, 891 aa, Homo sapiens
  DOMAIN (687)..(719): BCCT family of transporters proteins domain identified by eMATRIX, accession number BL01303E, p-value=1.000e-09, raw score of 10.12
  DOMAIN (351)..(874): Transient receptor domain identified by PFam, accession name Trans_recep, E-value=0, PFam score of 1173.0
NSDLSSSSWARPPQARPLRLLARPRARLPPWRAPHCRPRTGADRLGRGAGGWGGVAGPGAAHAPPPTWGCQWRASAGSQGRRRLRANGPRAEAAVGTTHPFSSPGAWLGSGSGSGPVGAPPPSPGLPPSWAAMMAALYPSTDLSGASSSSLPSSPSSSSPNEVMALKDVREVKEENTLNEKLFLLACDKGDYYMVKKILEENSSGDLNINCVDVLGRNAVTITIENENLDILQLLLDYGCQKLMERIQNPEYSTTMDVAPVILAAHRNNYEILTMLLKQDVSLPKPHAVGCECTLCSAKNKKDSLRHSRFRLDIYRCLASPALIMLTEEDPILRAFELSADLKELSLVEVEFRNDYEELARQCKMFAKDLLAQARNSRELEVILNHTSSDEPLDKRGLLEERMNLSRLKLAIKYNQKEFVSQSNCQQFLNTVWFGQMSGYRRKPTCKKIMTVLTVGIFWPVLSLCYLIAPKSQFGRIIHTPFMKFIIHGASYFTFLLLLNLYSLVYNEDKKNTMGPALERIDYLLILWIIGMIWSDIKRLWYEGLEDFLEESRNQLSFVMNSLYLATFALKVVAHNKFHDFADRKDWDAFHPTLVAEGLFAFANVLSYLRLFFMYTTSSILGPLQISMGQMLQDFGKFLGMFLLVLFSFTIGLTQLYDKGYTSKEQKDCVGIFCEQQSNDTFHSFIGTCFALFWYIFSLAHVAIFVTRFSYGEELQSFVGAVIVGTYNVVVVIVLTKLLVAMLHKSFQLIANHEDKEWKFARAKLWLSYFDDKCTLPPPFNIIPSPKTICYMISSLSKWICSHTSKGKVKRQNSLKEWRNLKQKRDENYQKVMCCLVHRYLTSMRQKMQSTDQATVENLNELRQDLSKFRNEIRDLLGFRTSKYAMFYPRN

SEQ ID NO: 52423 - protein, 419 aa, Homo sapiens
  DOMAIN (34)..(269): CUB domain identified by PFam, accession name CUB, E-value= 4.6e-71, PFam score of 249.5
  misc_feature (1)...(419): Xaa = X or * as defined in Table 2
AMRGANAWAPLCLLLAAATQLSRQQSPERPVFTCGGILTGESGFIGSEGFPGVWPPESKCTWKITVPEGKVVVLNFRFIDLESDNLCRYDFVDVYNGHANGQRIGRFCGTFRPGALVSSGNKMMVQMISDANTAGNGFMAMFSAAEPNERGDQYCGGLLDRPSGSFKTPNWPDRDYPAGVTCVWHIVAPKNQLIELKFEKFDVERDNYCRYDYVAVFNGGEVNDARRIGKYCGDSPPAPIVSERNELLIQFLSDLSLTADGFIGHYIFRPKKLPTTTEQPVTTTFPVTTGLKPTVALCQQKCRRTGTLEGNYCSSDFVLAGTVITTITRDGSLHATVSIINIYKEGNLAIQQAGKNMSARLTVVCKQCPLLRRGLNYIIMGPSRVKDGARQNSWPNSFIMMFQTRNQKLLGCPXKISQC

SEQ ID NO: 52424 - protein, 40 aa, Homo sapiens
  misc_feature (1)...(40): Xaa = X or * as defined in Table 2
HTVGDGRLLRRPXREFGASFLXCFLEARFGLKNWGHCWRH

SEQ ID NO: 52425 - protein, 19 aa, Homo sapiens
  misc_feature (1)...(19): Xaa = X or * as defined in Table 2
MAPPTGVLSSLLLLVTIAX

SEQ ID NO: 52426 - protein, 263 aa, Homo sapiens
ARGVCSYLALYSPDVIFLQEVIPPYYSYLKKRSSNYEIITGHEEGYFTAIMLKKSRVKLTSQEIIPFPSTKMMRNLLCVHVNVSGNELCLMTSHLESTKGHAAERMNQLKMGLKKMQEAPESATVIFAGDTNLRDREVTRCGGLPNNIVDVWEFLGKPKHCQYTWDTQMNSNLGITAACKLRFDRIFFRAAAEEGHIIPRSLDLLGLEKLDCGRFPSDHWGLLCNLDIIFVKCFSSVGFCPDCCKYNFHLLGKVGLLWREIMY

SEQ ID NO: 52427 - protein, 311 aa, Homo sapiens
  misc_feature (1)...(311): Xaa = X or * as defined in Table 2
TGACAEPRVGLLFRLKGRCRGGRNMELGSCLYGFREAAEEEGEPEVKKRRLLCVEFASVASCDAAVAQCFLAENDWEMERALNSYFEPPAEESALERRPETISEPKTYVDLTNEETTDSTTSKISPSEDTQQENGSMFSLITWEYLMGLDLKQSVQRRARGVCSYLALXVLSLLFNSNVSYVYTERMNQLKMVLKKMQEAPESATVIFAGDTNLRDREVSDKVSLMFEDRLLLWRLIXVPFCQYTWDTQMNSNLGITAACKLRFDRIFFRAAAEEGHIIPRSLDLLGLEKLDCGRFPSDHWGLLCNLDIIL

SEQ ID NO: 52428 - protein, 86 aa, Homo sapiens
CYTGGTQSLWPGSSCASSVARPSSLFRSAWSCEWSVRCARACTMSVPAFIDISEEDQVCFGQLAGRRSQRGARRFTASSLVGVGTH

SEQ ID NO: 52429 - protein, 416 aa, Homo sapiens
  misc_feature (1)...(416): Xaa = X or * as defined in Table 2
VGVVLRVECPLCPGPAPMSVPAFIDISEEDQAAELRAYLKSKGAEISEENSEGGLHVDLAQIIEACDVCLKEDDKDVESVMNSVGIPYSWILEPDKQEAFDLKALCEKAGSKFPRRXTAPSLETCSFLSNLFHGMGXGILPVKIHSVICSLIKVAASCGAIQYHPQLEPGIKFRKWDFLNWNLTTGKKSTPLLKTTFMKALVECKKSDAASKGMVELLGSYPEGNASQARVDAHRCIVRALKDPNAFLFDHLLTLKPVKFFGKASLFHCSFLTKFVSAXMGHHMSRFYPDXLRTFHXIPLGPVTMDPGIWPKMRLLFTFMGNGQXKNKEISFXPQCQQEPSRLGADDVESHLVIDAVRNXKWVYCQNWSRPRRKVVVSHSTHRTFGKQQWQTTVLTHLNAWKQNLNKVKNSLLSLF

SEQ ID NO: 52430 - protein, 73 aa, Homo sapiens
LGPWSCLWASMQRLSGRNIKPLKVPSWLQPSSSSSWASTCSWSPSLVSWRPSVTTCTFSKHSCTSLGSASSWS

SEQ ID NO: 52431 - protein, 52 aa, Homo sapiens
  misc_feature (1)...(52): Xaa = X or * as defined in Table 2
EVKFQWVLSLGXSFSLPKSSFQRCGAGGAVHWSTALFLLGAASASSYHQRPG

SEQ ID NO: 52432 - protein, 68 aa, Homo sapiens
  DOMAIN (37)..(51): Exonuclease domain identified by eMATRIX, accession number PF00929D, p-value=7.146e-09, raw score of 16.17
RRQGEEEYREYTGKERTVSFLFMLLSSLLAQVGKSGHSSVEDAQATMELYKLVEVEWEEHLARNPPTD

SEQ ID NO: 52433 - protein, 136 aa, Homo sapiens
  misc_feature (1)...(136): Xaa = X or * as defined in Table 2
MGXXXRRHIHNHSKLAEEKHNRFLARWGEIRQCAWGNQRGDVSPSAPPTRVSPLARARWAHACNPSTLGGGGGWITLRSGVRDQPGPTWVKSRFYLKIQKFSLGXVXFLLFPSYFWEAXGRKIILNPREXEVXRYF

SEQ ID NO: 52434 - protein, 132 aa, Homo sapiens
  misc_feature (1)...(132): Xaa = X or * as defined in Table 2
FFLRRSLALSPRPDCGLQWRNLGSLQAPLPGFTPFSCLSLPSSWDYRRPPPRPANFLYFXXRRGFTLLARMVSISXPHDPPASASQSAGITGVSHRARPETYNFCSFIIISSLPVEPEARKMTKNSDIGEIW

SEQ ID NO: 52435 - protein, 45 aa, Homo sapiens
  misc_feature (1)...(45): Xaa = X or * as defined in Table 2
PRHCCASASSAPAPSRPASSSSPPAACPWXGSLLGPAATPATWRR

SEQ ID NO: 52436 - protein, 268 aa, Homo sapiens
  DOMAIN (233)..(249): PUROTHIONIN SIGNATURE domain identified by eMATRIX, accession number PR00288A, p-value=9.614e-09, raw score of 14.92
RDPSTPTVVRSLGVPLLSRRRFKMAPSVAATKLAERNETMVQTCWTETQSSSDGSTPRRVRISLALWRPSLFFSMADTSLVLNFPRVSSSGVIRPSNKRPSLAILTRISRTSSPKYMPLTIFSNSCFPGLRDPRSISLSNSVRMSSNDPSSPKAPHSGIDTHPPLVSFHQINVPQFLHVASIGASADDQADFTVLVVIATGHHGAHCVIHHSYDVGIIVPSLFDGFVKQFDHICSFHSARFKSLCPGDQDGLIYFGLLARKRKRESHR

SEQ ID NO: 52437 - protein, 264 aa, Homo sapiens
  misc_feature (1)...(264): Xaa = X or * as defined in Table 2
FAFSPKXHSCLRCPCIXFSSGLLHEVLXLLPLCWPXTHGWDPGSREANKSPKLHAIRCVWVLEEENLWLSSNSQSLQTVKNXESHINXSCRSNLIHHXFWNQVKXKXLLNISGNCFFFLRWSLDSVAQAGVYWRDLGSLQPPPPGFKRFSCLSLPSSWDYWHLPPCLAKFCIFSRDGGFTIWARLVLNSXSCDLPASGSQSAGITGVSHHTWLQVTYFLKEMRSCYFSQVGWPQTPGLKQCSHLKLLSSWDYRHMSPHLAISGS

SEQ ID NO: 52438 - protein, 48 aa, Homo sapiens
  misc_feature (1)...(48): Xaa = X or * as defined in Table 2
MISTRRGWAERPYLAAVLVFTQTMEDSPPDQEAXAWAPELATPPCTDE

SEQ ID NO: 52439 - protein, 144 aa, Homo sapiens
  DOMAIN (58)..(102): OXIDASE BIOSYNTHESIS OXIDOREDUCTASE PORP domain identified by eMATRIX, accession number PD01498C, p-value=1.114e-13, raw score of 24.90
RYCKDVTWMRFLAKNILRFCHSLLRELLLFSVQENQPVKTKYKDRYSERSLTKCIGITIETRPDYCMKRHLSDMLTYGCTRLEIGVQSVYEDVARDTNRIWVGVIGVVPGEGSKGELGKQALISILETTKRNARPRRMEFSLKE

SEQ ID NO: 52440 - protein, 452 aa, Homo sapiens
MQRRAVSQEGCTGRVEQKGKNLGQHLESWDIPMPLVSSGVEHGNLRELALARMKDLGIQCRDVRTREVGIQEIHHKVRPYQVELVRRDYVANGGWETFLSYEDPDQDILIGLLRLRKCSEETFRFELGGGVSIVRELHVYGSVVPVSSRDPTKFQHQSLGSRDVIFLPQETSTAFTMVTDHMCHSSKTKLQHGAGRGFVHVGFREELYDTLTDILRQAGLFCGCQLSPWSEFVAAFLSLVALLRRRRNEAEAERVKTKTAAKYGLSAQPRLVDIIAAVPPQYRKVLMPKLKAKPIRTASGIRNGEAPDGVQNTLPQKTVSWHTEYLKTLKHEAASLIVPAANIEIQCVHEAFESQRYCPGGPDSDFEYSTQSYTGYEPTSMRAIRARYDPFLQTRHRIEQLKQLGHSVDKVEFIVMGGTFMALPEEYRDYFIRNLHDALSGHTSNNIYEAVK

SEQ ID NO: 52441 - protein, 584 aa, Homo sapiens
  DOMAIN (219)..(263): OXIDASE BIOSYNTHESIS OXIDOREDUCTASE PORP domain identified by eMATRIX, accession number PD01498C, p-value=6.880e-14, raw score of 24.90
  misc_feature (1)...(584): Xaa = X or * as defined in Table 2
ILHSLEISALLSLMMLTIGDVIKQLIEAHEQGKDIDLNKVKTKTAAKYGLSAQPRLVDIIASVPPQYRKVLMPKLKAEPIKTASGIVVVAVMCKPHRCPHISFTGNICVYCPGVGPDSDFEYSTQSYTGYEPTSMRSIFRARYDPFLQTKDRIEQXRQLGHSVDKVEFIVMGGTFMALPEEYRDYFIRNLHDALSGHTSNNIYEAVKYSERSLTKCIGITIETRPDYCMKRHLSDMLTYGCTRLEIGVQSVYEDVARDTNRGHTVKAVCESFHLAKDSGFKVVAHMMPDLPNVGLERDIEQFTEFFENPAFRPDGLKIYPTLVIRGTGLYELWKSGRYKSYFSXXPGLNWVARFLALVPPWTRVYRVQRDIPMPLVSSGVEHGNLRELALARNEDLRIQCRDVRTREVGIQEIHHKVRPYQVELVRRDYVANGGWETFLSYEDPDQDILIGLLRLRKCSEETFRFELGGGVSIVRELHVYGSVVPVSSRDPTKFQHQGFGMLLMEEAERISXRRNMGLGKIAVISGVGTRNYYGKIGYRLPRPRTMVKMLEIMGHTQSHSFCSILPWHEHRRIRISLNTQQRGL

SEQ ID NO: 52442 - protein, 152 aa, Homo sapiens
  DOMAIN (10)..(34): Dehydrogenase E1 component domain identified by eMATRIX, accession number PF00676C, p-value=5.500e-21, raw score of 16.88
  DOMAIN (1)..(121): Dehydrogenase E1 component domain identified by PFam, accession name E1_dehydrog, E-value=5.9e-06, PFam score of -70.0
GDGIAARGPGYGIMSIRVDGNDVFAVYNATKEARRRAVAENQPFLIEAMTYRIGHHSTSDDSSAYRSVDEVNYWDKQDHPISRLRHYLLSQGWWDEEQEKAWRKQSRRKVRAHSGLEAPLGMGWTWQVSLWNLRRCEWPAEVTNKLHLCAKK

SEQ ID NO: 52443 - protein, 100 aa, Homo sapiens
  DOMAIN (59)..(83): Dehydrogenase E1 component domain identified by eMATRIX, accession number PF00676C, p-value=5.500e-21, raw score of 16.88
CVMYRDYPLELFMAQCYGNISDLGKGRQMPVHYGCKERHFVTISSPLATQIPQAARGPGYGIMSIRVDGNDVFAVYNATKEARRRAVAENQPFLIEARPT

SEQ ID NO: 52444 - protein, 474 aa, Homo sapiens
  DOMAIN (304)..(328): Dehydrogenase E1 component domain identified by eMATRIX, accession number PF00676C, p-value=5.500e-21, raw score of 16.88
  DOMAIN (123)..(453): Dehydrogenase E1 component domain identified by PFam, accession name E1_dehydrog, E-value=6.6e-38, PFam score of 139.4
  misc_feature (1)...(474): Xaa = X or * as defined in Table 2
DWLLAKMAEAIAAARVWRLNRGLSHAALLLLRQLGGSGDXARSHPPRQQQQCSALDDKPQFPGASAGVIDKLEFIQPNVISGIPIYRVMDPQGQIHQPQARDPHLAEGERWLKLYKSMTLLXHPWDRILXXVFSGQGRILLLTXTNYWLRRGTHVGSARRLGQTRTLVFGQYREAGVLMYRDYPLELFMAQCYGNISDLGKGRQMPVNYGCKERHFVTISSPLATQDPSGRWGAAYAATGGANANRVRVICYFRARGAASXGGDAHAGFNFRCHNLSCPIIFFCRNNGYAISTPTSEQYRGDGIAARGPGYGIMSIRVDGNDVFAVYNATKEARRRAVAENQPFSHQAHDSRVQAPSPSDASXTYRSVDEVNYWENKGPPILPGFGHYLFSQGWWDEEQQKAWRKQSRRKDPGPVQPSVMEAFEQAERKPKPNPNLLFSDVYQNMPAPVRQPPESLARHFKTYGNHYPWDHFDK

SEQ ID NO: 52445 - protein, 96 aa, Homo sapiens
  DOMAIN (13)..(26): OCTAMER-BINDING TRANSCRIPTION FACTOR SIGNATURE domain identified by eMATRIX, accession number PR00029C, p-value=6.000e- 16, raw score of 6.10
  DOMAIN (64)..(89): Pou domain - N-terminal to homeobox domain identified by PFam, accession name pou, E-value=4.2e-11, PFam score of 45.2
GLLQRQNLLTQLPQQSQANLLQSQPSITLTSEPATPTRTIAATPIQTLPQSQSTPKRIDTPSLEEPSDLEELEQFAKTFKQRRIKLGFTSRHLHLC

SEQ ID NO: 52446 - protein, 630 aa, Homo sapiens
  DOMAIN (185)..(228): 'Homeobox' domain proteins domain identified by eMATRIX, accession number BL00027, p-value=8.800e-29, raw score of 26.43
  DOMAIN (73)..(148): Pou domain - N-terminal to homeobox domain identified by PFam, accession name pou, E-value=1.4e-42, PFam score of 154.9
  misc_feature (1)...(630): Xaa = X or * as defined in Table 2
QSLADLLQSQPSITLTSQIWPSPAXGFWSWGNLSVTTPSKPATPTRTIAATPIQTLPQSQTAPKRIDTPSLEEPSDLEELEQFAKTFKQRRIILGFTQGDAGLAMVKLYGNDFSPTTIFRFEALNLSFKNMCKLKPLLEKWLNDAENLSSDSSLSSPSALNSPGIEGLSRRRKKRTSIETNIRVALEKSFLENQKPTSEEITMIADQLNMEKEVIRVWFCNRRQKEKRINPPSSGGTSSSPIKAIFPSPTSLVATTPSLVTSSAATTLTVSPVLPLTSAAVTNLSVTASTSEASSASETSTTQTTSTPLSSPLGTSQVMVTASGLQTAAAAALQGAAQLPANASLAAMAAAAGLNPSLMAPSQFAAGGALLSLNPGTLSGALSPALMSNSTLATIQALASGGSLPITSLDATGNLVFANAGGAPNIVTAPLFLNPQNLSLLTSNPPGGFTIEISNNNSTMVMTGMRIQIGTQAIERAPSYIEIFGRTMQLNLSRSRWFDFPFTREEALQADKKLNLFTVRKFQNIRHTLFKCENKNTFQQCLLLEQDSSCGTGFCSMTTYPVMLLSSEQPVQSLSVRQCVILLDAAAVISGGMGAVCLLLTHLCPLCYAGLLSEITDPESFVKDLLYSVP

SEQ ID NO: 52447 - protein, 800 aa, Homo sapiens
  DOMAIN (421)..(464): 'Homeobox' domain proteins domain identified by eMATRIX, accession number BL00027, p-value=7.188e-28, raw score of 26.43
  DOMAIN (311)..(385): Pou domain - N-terminal to homeobox domain identified by PFam, accession name pou, E-value=8.7e-52, PFam score of 185.5
  misc_feature (1)...(800): Xaa = X or * as defined in Table 2
MRVRTSSLPSTMLRVQNYARAKAGPEYAFVDSTECSPQWMVSPLKRGTQTNGLDFQKQPVPVGGAISTAQAQAFLGHLHQVQLAGTSLQAAAQSLNVQSKSNEESGDSQQPSQPSQQPSVQAAIPQTQLMLAGGQITGLTLTPAQQQLLLQQAQAQAQLLAAAVQQHSASQQHSAAGATISASAATPMTQIPLSQPIQIAQDLQQLQQLQQQNLNLQQFVLVHPTTNLQPAQFIISQTPQGQQGLLQAQNLLTQLPRQSQANLLQSQPRITLTSQPATPTCTIAATPIQTLPQSQSTPKRIDTPSLEEPSDLEELEQFAKTFKQRRIKLGFTQGDVGLAMGKLYGNDFSQTTISRFEALNLSFKNMCKLKPLLEKWLNDAENLSSDSSLSSPSALNSPGIEGLSRRRKKRTSIEANIRVALEKSFLENQKPTSEEITMIADQLNMEKGVIRVWFCNRRQKEKRINPPSSGGTSSSPIKAIFPSPTSLVATTPSPVTSSATTTLTVSPVLPLTSAAVTNLSVTGTSDTTSNNTATVISTAPPASSAVTSPSLSPSPSASASTSEASSASETSTTQTTSTPLSSPLGTSQVMVTASGLQTAAQLLPFKGAAQLPANASLAAMAAAAGLNPSLMAPSQFAAGGALLSLNPGTLSGALSPALMSKSTLATIQTLASGGSLSKXTSLECKLGTLVICPMREEPPDIVTAPLFLNPQNLSLLTSNPVSLVSAAAASAGNSAPVASLHATSTSAESIQNSLFTVASAQRGCRPTHPPTASQGTVSWAELGCPEAFFTLQCDWTASPG

SEQ ID NO: 52448 - protein, 36 aa, Homo sapiens
GRLISWSGSQKTLRSPRLDLTGSSGHSLQPQPRDEL

SEQ ID NO: 52449 - protein, 168 aa, Homo sapiens
NLGVDLLPGYQDPYSGRTLTKGEVGCFLSHYSIWEEVVARGLARVLVFEDDVRFESNFRGRLERLMEDVEAEKLSWYSYWTLAYALRLAGARKLLASQPLRRMLPVDEFLPIMFDQHPNEQYKAHFWPRDLVAFSAQPLLAAPTHYAGDAEWLSDTETSSPWDDDSGR

SEQ ID NO: 52450 - protein, 208 aa, Homo sapiens
RAARAAPLLHLLLLLGPWLEAAGVAESPLPAEVLAILARNAEHSLPHYLGALERLDYPRARMALWCATDHNVDNTTEMLQEWLAAEGDDYAAVVWRPEGEPRFYPDEEGPKHWTKERHQFLMELKQEALTFARNWGADYILGATLGLWQDHSVNSLGGCSPGRAGACDVPSSKFADTDNILTNNQTLRLLMGQGLPVVAPMLDSQTNV

SEQ ID NO: 52451 - protein, 662 aa, Homo sapiens
  misc_feature (1)...(662): Xaa = X or * as defined in Table 2
MRAARAAPLLQLLLLLGPWLEAAGVAESPLPAVVLAILARNAEHSLPHYLGALERLDYPRARMALCLQGPAQPQWDLWLAGFEEEQTGTSEVHWGPTWQGSTTLEASGHRCATDHNVDNTTEMLQEWLAAVGDDYAAAVWRPEGEPRFYPDEEGPKHWTKERHQFLMELKQEALTFARNWGADYILFADTDNILTNNQTLRLLMGQGLPEVAPMLDSQTYYSNFWCGITPQGYYRRTAEYFPTKNRQRRGCLRVPMVHSTFLASLRAEGADQLAFYPPHPNYTWPFDDIIVFAYACQAAGVSVHVCNEHRYGYMNVPVKSHQGLEDERVNFIHLILEALVDGPRMQASAHVTRPSKRPSKIGFDEVFVISLGRRPDRRERMLASLWEMEISGRVVDAVDGWMLQQQVPFRNLRPXDLLPGLYKDPYFGPHSXPRAEVGLLSSDHYSIWEEVVSQGAWPRVLVVXRNDVAPLRTNFQGGGLERLMEDVEGKRNLSWEKPPFRILPLGRKQVEPLRRETAVEGLPGLVVAGXLPNWTLAYALRLAGGPASLLALQPFAPHCCPVERISLPIHCFDQHPNEASTKAHFWPRDLVAFSAQPLLAAPTHYAGDAEWILLSRRHHSPWDDDSGRLISWSGSQKTLRSPRLDLTGSSGHSLQPQPRDEL

SEQ ID NO: 52452 - protein, 156 aa, Homo sapiens
ELSHNAKAKVMVASHNEDTVLFALRRMEELGLHPADHQVYFGQLLGMCDQISFPLGQAGYPILTQIHLFSPHTCRAAGGEVRCLPALPRVWALRCGPNLIPAWDSHWKLLGTLLELCAQGPHLCDPHVLGPRGLSTFCQGQPTQPEPLGEQWPGWG

SEQ ID NO: 52453 - protein, 631 aa, Homo sapiens
  DOMAIN (227)..(613): Proline dehydrogenase domain identified by PFam, accession name Pro_dh, E-value=2.7e-158, PFam score of 539.3
MALRRALPALRPCIPRFVPLSTAPASREQPAAGPAAVPGGGSATAVRPPVPAVDFGNAQEAYRSRRTWELARSLLVLRLCAWPALLARHEQLLYVSRKLLGQRLFNKLMKMTFYGHFVAGEDQESIQPLLRHYRAFGVSAILDYGVEEDLSPEEAEHKEMESCTSAAERDGSGTNKRDKQYQAHWAFGDRRNGVISARTYFYANEAKCDSHMETFLRCIEASGRVSDDGFIAIKLTALGRPQFLLQFSEVLAKWRCFFHQMAVEQGQAGLAAMDTKLEVAVLQESVAKLGIASRAEIEDWFTAETLGVSGTMDLLDWSSLIDSRTKLSKHLVVPNAQTGQLEPLLSRFTEEEELQMTRMLQRMDVLAKKATEMGVRLMVDAEQTYFQPAISRLTLEMQRKFNVEKPLIFNTYQCYLKASPRSAPPCLPWGLETPQEGLLSSELPGIWLDAYDNVTLDVELARREGWCFGAKLVRGAYLAQERARAAEIGYEDPINPTYEATNAMYHRCLDYVLEELKHNAKAKVMVASHNEDTVRFALRRMEELGLHPADHRVYFGQLLGMCDQISFPLGQAGYPVYKYVPYGPVMEVLPYLSRRALENSSLMKGTHRERQLLWLELLRRLRTGNLFHRPA

SEQ ID NO: 52454 - protein, 536 aa, Homo sapiens
  DOMAIN (162)..(522): Proline dehydrogenase domain identified by PFam, accession name Pro_dh, E-value=6.7e-145, PFam score of 494.8
  misc_feature (1)...(536): Xaa = X or * as defined in Table 2
INRDVETACTYILRNTEDVMLEFVMREWKKSRKLLGQRLFNKLMKMTFYGHFVAGEDQESIQPLLRHYRAFGVSAILDYGVEEDLSPEEAEHKEMESCSSAAERDGSGTNKRDKQYQAHRAFGDRRNGVISARTYFYANEAKCDSHMETFLRCIEASGRVSDDGFIAIKLTALGRPQFLLQFSEVLAKWRCFFHQMAVEQGQAGLAAMDTKLEVAVLQESVAKLGIASRAEIEDWFTAETLGVSGTMDLLDWSSLIDSRTKLSKHFVXVPNAQTGQLEPLLSRFTEEEELQMTRMLQRMDVLAKKATEMGVRLMVDAEQTYFQPAISRLTLEMQRKFNVEKPLIFNTYQCYLKDAHDNVTLDVDLSPREGWCFGAKPVRGAYLAQERACAAEIGYEDPINPMYEATNTMYHRCLDYVLEELKHNAKAKVMVASHNEDTVRFALRRMEELGLHPADHQVYFGQLLGMCDQISFPLGQAGYPVYKYVPYGPVMEVLPYLSRRALENSSLMKGTHRERQLLWLELLRRLRTGNLFHRPP

SEQ ID NO: 52455 - protein, 100 aa, Homo sapiens
  DOMAIN (28)..(76): TRANSCRIPTION PROTEIN DNA-BINDIN domain identified by eMATRIX, accession number PD02448B, p-value=1.802e-18, raw score of 10.17
  DOMAIN (11)..(52): HMG (high mobility group) box domain identified by PFam, accession name HMG_box, E-value=0.021, PFam score of -3.2
RSHGALWTAGPCSPKSCRTGGWSLLSESEKRPFVEEAERLRVQHKKDHPDYKYQPRRRKSAKAGHSDSDSGAELGPHPGGGAVYKAEAGLGDGHHHGDHT

SEQ ID NO: 52456 - protein, 485 aa, Homo sapiens
  DOMAIN (133)..(181): TRANSCRIPTION PROTEIN DNA-BINDIN domain identified by eMATRIX, accession number PD02448B, p-value=1.802e-18, raw score of 10.17
  DOMAIN (101)..(158): HMG (high mobility group) box domain identified by PFam, accession name HMG_box, E-value=0.0094, PFam score of -0.1
  misc_feature (1)...(485): Xaa = X or * as defined in Table 2
VPRAPQGMLXGPRKDAGTPERRAGPPGGRGTADGGGCGALAGSGSDDPRLCIWTFLVTDQLLLPTGPGRPRGSVAAAATGPGVGALRAPARAQPRGAVDGRPLLPQVLPHRRLEVSLGKSPKECVLWRHLLSESEKRPFVEEAERLRVQHKKDHPDYKYQPRRRKSAKAGHSDSDSGAELGPHPGGGAVYKAEAGLGDGHHHGDHTGQTHGPPTPLTTPKTELQQAGAKPELKLEGRRPVDSGRQNIDFSNVDISELSSEVMGTMDAFDVHEFDQYLPLGGPAPPEPGQAYGGAYFHAGASPVWAHKSAPSASASPTETGPPRPHIKTEQPSPGHYGDQPRGSPDYGSCSGQSSATPAAPAGPFAGSQGDYGDLQASSYYGAYPGYAPGLYQYPCFHSPRRPYASPLLNGLALPPAHSPTSHWDQPRRNGSTAQGPKEGVAGALQGAVRSKAGLGAEKPLHSRPHSLDNGCTGCPGSGVSVRRLG

SEQ ID NO: 52457 - protein, 446 aa, Homo sapiens
  misc_feature (1)...(446): Xaa = X or * as defined in Table 2
LLEPHCGGKCFKRHWFPCSCEASCPSAAPQRWXHTGSPEVPAAPGAQGREPSMRDGEGAVRGGSCMEAGPMGLQCVDKKHQGVHNRGEARVFLQSQVGAILPRPWPNPAPSEPVQSPLASSTGPXVFPSRPGQQASGPARRHPGAEPGQRGDAVQLLPRPQTSPHGPQDAALSSAPHPWRQLMASPGLQEAPLHPFCGHRSPCPVPWQLSPTDPIQSRPPARGWAPANQGRPSHPRCRGGGGAFCGHGFSYTQPLTFRLASMVLSIHPKPPKETLRFRPNMVVAAEPGVPAMSQRRPRGCTRFSHTDKAPLDTCTDMNAYTCARRHSSTYSDHITLQGAFACTHTWAQSCTCQPPPTPAAKCLDRGQSSGMLHAGCVGWGGGTHVRVDLSSQLNRRVRPHLCMLRCWSSCHRASVSCTHPSLHTTGPVLISARTGADHTWYTAGTY

SEQ ID NO: 52458 - protein, 127 aa, Homo sapiens
RHQGNQKRKELSLKCQKSRQESPRAEENPKWREGKKETSESSVQKAGRAAAAQAGAAASRVPGLSGSNLAPCNKGRLSAREDVSNSKLKILSSGRKHTEHVIMLKAWGLGRQSLRCRLFDLIPSHKV

SEQ ID NO: 52459 - protein, 203 aa, Homo sapiens
  DOMAIN (103)..(148): PTN/MK heparin-binding protein family proteins domain identified by eMATRIX, accession number BL00619B, p-value=1.826e- 10, raw score of 17.94
  DOMAIN (32)..(203): PTN/MK heparin-binding protein family domain identified by PFam, accession name PTN_MK, E-value=1e-35, PFam score of 132.1
  misc_feature (1)...(203): Xaa = X or * as defined in Table 2
QPSPLAPKADLSAREGRFQLKVRCRLQQYQQQRRKFAAAFLAFHFSLLGSCGILAEAGKKEKPEKKVKKSDCGRIGSWSVCVAPPSGDCGLGHHGRATRTXAECKQTMKTQRCKIPCNWEGRQFGRGSAKLPSFQAWGECDLDTALKTKTGSLKRALHKSPNAQKTVTISKSPCGKLTKPQNLQAESKKKKKEGKKPEGRLRD

SEQ ID NO: 52460 - protein, 635 aa, Homo sapiens
  DOMAIN (232)..(282): HMG1/2 proteins domain identified by eMATRIX, accession number BL00353B, p-value=5.692e-11, raw score of 11.47
  DOMAIN (38)..(476): HMG (high mobility group) box domain identified by PFam, accession name HMG_box, E-value=6.2e-18, PFam score of 73.0
MKYIQDFQREKQEFERNLARFREDHPDLIQNAKKSDIPEKPKTPQQLWYTHEKKVYLKVRPDATTKEVKDSLGKQWSQLSDKKRLKWIHKALEQRKEYEEIMRDYIQKHPELNISEEGITKSTLTKAERQLKDKFDGRPTKPPPNSYSLYCAELMANMKDVPSTERMVLCSQQWKLLSQKEKDAYHKKCDQKKKDYEVELLRFLESLPEEEQQRVLGEEKMLNINKKQATSPASKKPAQEGGKGGSEKPKRPVSAMFIFSEEKRRQLQEERPELSESELTRLLARMWNDLSEKKKAKYKAREAALKAQSERKPGGEREERGKLPESPKRAEEIWQQSVIGDYLARFKNDRVKALKAMEMTWNNMEKKEKLMWIKKAAEDQKRYERELSEMRAPPAATNSSKKMKFQGEPKKPPMNGYQKFSQELLSNGELNHLPLKERMVEIGSRWQRISQSQKEHYKKLAEEQQKQYKVHLDLWVKSLSPQDRAAYKEYISNKRKSMTKLRGPNPKSSRTTLQSKSESEEDDEEDEDDEDEDEEEEDDENGDSSEDGGDSSESSSEDESEDGDEGGADRAQWEGRGVLPGGPPGDSTSFLTPQNEEDDEDEDDDEDDDEDEDNESEGSSSSSSSSGDSSDSDSN

SEQ ID NO: 52461 - protein, 745 aa, Homo sapiens
  DOMAIN (112)..(162): HMG1/2 proteins domain identified by eMATRIX, accession number BL00353B, p-value=1.330e-13, raw score of 11.47
  DOMAIN (129)..(615): HMG (high mobility group) box domain identified by PFam, accession name HMG_box, E-value=1.1e-39, PFam score of 145.3
PRVARPARPRRWLDSWRMNGEADCPTDLEMAAPKGQDRWSQEDMLTLLECMKNNLPSNDSSKFKTTESHMDWEKVAFKDFSGDMCKLKWVEISNEVRKFRTLTELILDAQEHVKNPYKGKKLKKHPDFPKKPLTPYFRFFMEKRAKYAKLHPEMSNLDLTKILSKKYKELPEKKKMKYIQDFQREKQEFERNLARFREDHPDLIQNAKKSDIPEKPKTPQQLWYTHEKKVYLKVRPDEIMRDYIQKHPELNISEEGITKSTLTKAERQPQGQSLTGRPTKPPPNSYSLYCAELMANMKDVPSTERMVLCSQQWKLLSQNEKDAYHKKCDQKKKDYEVELLRFLESLPEEEQQRVLGEEKMLNINKKQATSPASKKPAQEGGKGGSEKPKRPVSAMFIFSEEKRRQLQEERPELSESELTRLLARMWNDLSEKKKAKYKAREAALKAQSERKPGGEREERGKLPESPKRAEEIWQQSVIGDYLARFKNDRVKALKAMEMTWNNMEKKEKLMWIKKAAEDQKRYERELSEMRAPPAATNSSKKMKFQGEPKKPPMNGYQKFSQELLSNGELNHLPLKERMVEIGSRWQRISQSQKEHYKKLAEEQQKQYKVHLDLWVKSLSPQDRAAYKEYISNKRKSMTKLRGPNPKSSRTTLQSKSESEEDDEEDEDDEDEDEEEEDDENGDSSEDGGDSSESSSEDESEDGDENEEDDEDEDDDEDDDEDEDNESEGSSSSSSSSGDSSDSDSN

SEQ ID NO: 52462 - protein, 904 aa, Homo sapiens
  DOMAIN (234)..(284): HMG1/2 proteins domain identified by eMATRIX, accession number BL00353B, p-value=5.872e-13, raw score of 11.47
  DOMAIN (254)..(619): HMG (high mobility group) box domain identified by PFam, accession name HMG_box, E-value=2.7e-38, PFam score of 140.7
  misc_feature (1)...(904): Xaa = X or * as defined in Table 2
PSLRFAISGFVWRLAAPASAAAELRLDCSARRAPRCPRPALPSTRSAEGAVLCAFRREEQQAAATAAAAAAAATAAAAAAPAPPPRPEEEPLPPREGAAAVPGRAGEGAATQSQGGSRWSGKPGGRAAPARPRRWLDSWRMNGEADCPTDLEMAAPKGQDRWSQEDMLTLLECMKNNLPSNDSSKFKTTESHMDWEKVAFKDFSGDMCKLKWVEISNEVRKFRTLTELILDAQXHFKNPYKGKKLKKHPDFPKKPLTPYFRFFMEKRAKYAKLHPEMSNLDLTKILSKKYKELPESKKMKYIQDFXREKQEFERNLARFREDHPDLIQNAKKSDIQEKPKTPQQLWYTHEKKVYLKVRPDATTKEVKDSLGKQWSQLSDKKRLKWIHKALEQRKEYEEIMRDYIQKHPELNISEEGITKSTLTKAERQLKDKFDGRPTKPPPNSYSLYCAELMANMKDVPSTERMVLCSQQWKLLSQKEKDAYHKKCDQKKKDYEVELLRFLESLPEEEQQRVLEEEKMLNINKKQATSPRLKKPAQEGGKGGSEKPKRPVSAMFIFSEEKRRQLQEERPELSESELTRLLARMWNDLSEKKKAKYKAREAALKAQSERNPGGERKERGKLPESPKRAEEIWQQSVIGDYLARFKNDRVKALKAMEMTWNNMEKKEKLMWIKKAAEDQKRYERELSEMRAPPAATNSSKKMKFQGEPKKPPMNGYQKFSQELLSNEELNHLPLKERMGEIGSRWQRISQSQKEHYKKLAEEQQKQYKVHLDLWVKSLSPQDRAAYKEYISNKRKSMTKLRGPNPKSSRTTLQSKSESEEDDEEDEDDEDEDEEEEDDENGDSSEDGGDSSESSSEDESEDGDENKEDDEDEDDDEDDDEDEDNESEGSSSSSSSSGDSSDSDSN

SEQ ID NO: 52463 - protein, 148 aa, Homo sapiens
  misc_feature (1)...(148): Xaa = X or * as defined in Table 2
RPSPPTSSMPGLWGYSRPCSSGVPASALQAXSPAFSPASQRPPTTSWWEVPXEEGRAPVWEGRIRAVGPAPASXPSDLPAWSCRSWRETRGSPAEDAMLLRAVEPLEGCQRPLLDSEPPSPARTSAPAASASPPAPGGPPCLARPLPR

SEQ ID NO: 52464 - protein, 197 aa, Homo sapiens
  DOMAIN (113)..(157): Synapsins proteins domain identified by eMATRIX, accession number BL00415N, p-value=3.365e-09, raw score of 4.29
  misc_feature (1)...(197): Xaa = X or * as defined in Table 2
THTHVPAGTHPHTQTTSHSHLIGRALTVPESPKCPCLLPSACXPRPGRAQPAGPAWSKKEASNPGSEPPQHSLXRRMAPPEPVPARAVHTCRCLSSAPPGARLPLDPERRAPQSPRSPPPSAQPPPPPPPPPPPPPGRRGPSQQSWRPSPPPPRTRSRSPRRSRVRGPRAPALAAPPPPGARPGPCAAACGSPTGCS

SEQ ID NO: 52465 - protein, 1543 aa, Homo sapiens
  DOMAIN (157)..(198): Tropomyosins proteins domain identified by eMATRIX, accession number BL00326D, p-value=6.694e-11, raw score of 8.76
  DOMAIN (759)..(976): PH domain identified by PFam, accession name PH, E-value=4.9e -32, PFam score of 119.4
  misc_feature (1)...(1543): Xaa = X or * as defined in Table 2
GPQTTWCGRPTMCQHCGPAVSSWKQPSHDPCCRGGENRRQPGTPARATQGRLRRRPEGARVPSARRGRPRARWRDKERNNTCVAMLXQVTNSTANAPQNNPEVDSIMAELKVEAPASVDWQKRCLTLETQLFRFRLQASKIRELLADKGHGTYISPFSLAKQMQELEQRLLEAEQRAENAETQVGVMEEKVKLSNLKNVDSEGSLHRKYQELLKAIKGKDELISQLEAQLEKQKQMRAEEAKTVQEKAAKIKEWVTLKLAKIAPSRKLLVPPYGAAEQDSVPSEPGIQPMGQDSGSQAQGLKAAVLAPSPGALQSKDSVSEAASPLEDSSSSTVHSGETVEAKPLQPHLGRESPPHQPCMKLLTFRCSSASWGEGLVTAQRGMLPGTKTSAREGGPGSSLTLPKVRAPGTPRDSIQLAKRHHSQPQVGHGHFGRVVNIETEAFSALHPSGLPELESRARSREEPEKMEMEEPPPAGKNEERESPKALGAELEEVELGNKPPTPPLHQFSSWLGPKDPRISQKNAQWSKQIQKVQGTLWVVYEQSGPLGKAPLACGLLQTQGPPQDGHSPSVFCMGESRIYAVATSGMRLSDMSPRSNTACCGEFQVRLGGTKHPSQPPYLHNEGLWGVPXPYDLXLTSATVEHCASLMGIIWLKRATQISNMPFMDESSGSDDDCSSQASFRISVPSSESRKTSGLGSPRAIKRGVSMSSLSSEGDYAIPPDACSLDSDYSEPEHKLQRTSSYSTDGLGLGGESLEKSGYLLKMGSQVKTWKRRWFVLRQGQIMYYKSPSDVIRKPQGQVDLNSRCQIVRGEGSQTFQLISEKKTYYLTADSPSLLEEWIRVLQSLLKVQATGPPALLRGGTKPTVKGWLTKVKHGHSKVVWCALVGKIFYYYRSHEDKRPLGCLPVRDAHIEEVDRSCDSDEDYEAGGTRRLLSSHCTLVIHPTEHSPTYLLIGTKHEKDTWLYHLTVAAGGSSAKVGTAYEQLIGKLMDGEGDPDSPLWRHPMLCYSKDGLYASLTTLPSEALQTEALKLFKSCQLFINVPVEAASVDYHVSLAQTALQVCLVHPELQSEIYCQLMKQTSCRPPQKYSLMQVGMPGVEQLTEAIGKGCQHHFLWYVKQQLQRHADPRSETGQYATYCQRAVERTLRTGEREARPSRMEVVSILLRNPFHHSLPFSIPVHFTNGTYHVVGFDGSSTVDEFLQRLNQEIGMRKPSHSGFALFTDDPSGRDLEHCLQGSVKICDAISKWEQAMKELHPGKSEGGTRVVKLMYKNRLYFRSQVKGETDRERLLLASQTSREIVAGRFPINKELALEMAALMAQVEYGDLEKPALPGPGGTSPAKAQHLLQQVLDRFHPRRYRHGAPAEQLRHLADMLTTKWATLQGCSPPECIRIYLTVARKWPFFGAKLFAAQPAQLSSKENALVWIAVNEDGVSILDHNTMQVHITYPYSSVTTFGGCRDDFMLVIRSIPDKSSGKSHIEKLIFRMAAPKIAEATFIMASYMNHCTTTVNPPTNPPGACQLWELDGRQFFSSVSCATKGPTLL

SEQ ID NO: 52466 - protein, 68 aa, Homo sapiens
  DOMAIN (2)..(19): Elongation factor Tu family domain identified by PFam, accession name GTP_EFTU, E-value=0.0037, PFam score of 13.3
RGISKNGQTREHALLAYTLEPAYSEKRYDEIVKKVSTYIKKIGYNPATVPFVPISGWHGDNMLEPSPN

SEQ ID NO: 52467 - protein, 3680 aa, Homo sapiens
  DOMAIN (1532)..(1564): GTP-binding elongation factors proteins domain identified by eMATRIX, accession number BL00301B, p-value=5.500e-31, raw score of 20.09
  DOMAIN (1447)..(3283): Elongation factor Tu family domain identified by PFam, accession name GTP_EFTU, E-value=1.2e-181, PFam score of 614.8
YIKKIGYNPATVPFVPISGWHGDNMLEPSPNEGHQCLLLTSDSQTRAVLRGSSAGHTVGALADSTEAPSKKPMSSSPSRSAADIYIREYFHSHVSGGHPEATPLRVMYTDRPLSQTDPVTLQYCCLTDDRQAFRPPTRAELARHRVVVTTTSQARELRVPVGFFSHILIDEAAQMLECEALTPLAYASHGTRLVLAGDHMQVTPRLFSVARARAAEHTLLHRLFLCYQQETHEVARQSRLVFHENYRCTDAIVSFISRHFYVAKGNPIHARGKGPPHPRHYPLMFCHVAGSPDRDMSMASWLNLAEIAQVVEKVQEAYNTWPSCWGGREQRCICVVSHGAQVSALRQELRRRDLGQVSVGSFEILPGRQFRVVVLSTVHTCQSLLSPGALAPEFFTDARVLNTVLTRAQSQLVVVGDAVALCSFGACGKLWESFIRECVERHSVCPEGLSMEQVEQGVAQRRRWPPRGTQAGAAGNWEAAPEPVGDLAEEQAAVVTAMVKAEPGDEALSPASRDITATTAQTEAAAAPAGDAVKEDVVPGACAAGAAAAAGVESTEAEDAEADFWPWDGELNADDAILRELLDESQKVMVTVGEDGLLDTVARPESLHHARLYDNLPPAALRKLLHAEPERYRHCSFVPYTFERASAIPLDDASSGPIQVRGRLDCGMAFAGDEVLVQLLSGDKAPEGRLRGRVLGVLKRKRHELAFVCRMDTWDPRIMVPINGSVTKIFVAELKDPSQVPIYSLRKGRLQRVGLERLTAEARHSRLFWVQIVLWRQGFYYPLGIVREVLPEASTWEQGLRILGLEYSLRVPPSDQATITKVLQKYHTELGRVAGRREDCRAFLTFTVDPQGACNLDDALSVRDLGPRCEVAVHITDVASFVPRDGVLDVEARRQGAAFYAPGREPVPMLPASLCQDVLSLLPGRDRLAISLFLTMEKASGQLKSLRFAPSVVQSVCQLSYEEPEEVIRQLPGAGREMKNSLDSVDACVVAACYFSRLLRRHRLRSDCFYEQPHEPGTLGFRAAHIMVKEYMIQFNRLVAEFLVGSECTRTVTPLRWQPAPRSQQLKALCEKHGDRVPLSLHLGHHLHGGGGSPPDTRLHLLASLWKQVQFAARTQDYEQMVDLVTTDDMHPFLAPAGRDLRKALERSAFGRCARGHQQQGGHYSLQVDWYTWATSPIRRYLDVVLQRQILLALGHGGSAYSARDIDGLCQAFSLQHALAQSYQRRARSLHLAVQLKAQPLDKLGFVVDVEAGSRCFRLLFPSNRETLPDPCPVPYGSLQLAEHPHALAGRPGLRLLWRRRVYSAQGSSPPLPLPGTVPDPHTLAVETALWKQLLELDRAWNDAANHRVTYHLSVFYGLDTNRSVSRRKVLKAATHQGLPEVVSTQEPKSLDSYGADAATDQGPPERPSPQAGENCLAPTLGPHLSFLLTPASRPAPHTPSKMGKEKTHINIVVIGHVDSGKSTTTGHLIYKCGGIDKRTIEKFEKEAAEMGKGSFKYAWVLDKLKAERERGITIDISLWKFETTKYYITIIDAPGHRDFIKNMITGTSQADCAVLIVAAGVGEFEAGISKNGQTREHALLAYTLGVKQLIVGVNKMDSTEPAYSEKRYDEIVKEVSAYIKKIGYNPATVPFVPISGWHGDNMLEPSPNEGHQCLLLTSDSQTRAVLRGSSAGHTVGALADSTEAPSKKPMSSSPSRSAADIYIREYFHSHVSGGHPEATPLRVMYTDRPLSQTDPVTLQYCCLTDDRQAFRPPTRAELARHRVVVTTTSQARELRVPVGFFSHILIDEAAQMLECEALTPLAYASHGTRLVLAGDHMQVTPRLFSVARARAAEHTLLHRLFLCYQQETHEVARQSRLVFHENYRCTDAIVSFISRHFYVAKGNPIHARGKGPPHPRHYPLMFCHVAGSPDRDMSMASWLNLAEIAQVVEKVQEAYNTWPSCWGGREQRCICVVSHGAQVSALRQELRRRDLGQVSVGSFEILPGRQFRVVVLSTVHTCQSLLSPGALAPEFFTDARVLNTVLTRAQSQLVVVGDAVALCSFGACGKLWESFIRECVERHSVCPEGLSMEQVEQGVAQRRRWPPRGTQAGAAGNWEAAPEPVGDLAEEQAAVVTAMVKAEPGDEALSPASRDITATTAQTEAAAAPAGDAVKEDVVPGACAAGAAAAAGVESTEAEDAEADFWPWDGELNADDAILRELLDESQKVMVTVGEDGLLDTVARPESLHHARLYDNLPPAALRKLLHAEPERYRHCSFVPYTFERASAIPLDDASSGPIQVRGRLDCGMAFAGDEVLVQLLSGDKAPEGRLRGRVLGVLKRKRHELAFVCRMDTWDPRIMVPINGSVTKIFVAELKDPSQVPIYSLRKGRLQRVGLERLTAEARHSRLFWVQIVLWRQGFYYPLGIVREVLPEASTWEQGLRILGLEYSLRVPPSDQATITKVLQKYHTELGRVAGRREDCRAFLTFTVDPQGACNLDDALSVRDLGPRCEVAVHITDVASFVPRDGVLDVEARRQGAAFYAPGREPVPMLPASLCQDVLSLLPGRDRLAISLFLTMEKASGQLKSLRFAPSVVQSVCQLSYEEPEEVIRQLPGAGREMKNSLDSVDACVVAACYFSRLLRRHRLRSDCFYEQPHEPGTLGFRAAHIMVKEYMIQFNRLVAEFLVGSECTRTVTPLRWQPAPRSQQLKALCEKHGDRVPLSLHLGHHLHGGGGSPPDTRLHLLASLWKQVQFAARTQDYEQMVDLVTTDDMHPFLAPAGRDLRKALERSAFGRCARGHQQQGGHYSLQVDWYTWATSPIRRYLDVVLQRQILLALGHGGSAYSARDIDGLCQAFSLQHALAQSYQRRARSLHLAVQLKAQPLDKLGFVVDVEAGSRCFRLLFPSNRETLPDPCPVPYGSLQLAEHPHALAGRPGLRLLWRRRVYSAQGSSPPLPLPGTVPDPHTLAVETALWKQLLELDRAWNDAANHRVTYHLSVFYGLDTNRSVSRRKVLKAATHQGLPEVVSTQEPKSLDSYGADAATDQGPPERPSPQAGENCLAPTLGPHLSFLLTPASRPAPHTPSKMGKEKTHINIVVIGHVDSGKSTTTGHLIYKCGGIDKRTIEKFEKEAAEMGKGSFKYAWVLDKLKAERERGITIDISLWKFETTKYYITIIDAPGHRDFIKNMITGTSQADCAVLIVAAGVGEFEAGISKNGQTREHALLAYTLGVKQLIVGVNKMDSTEPAYSEKRYDEIVKEVSAYIKKIGYNPATVPFVPISGWHGDNMLEPSPNHTPASWGSPGVTILDTPRCPSFTFRKMLEEDTLSILLISTPTEPRQIVISFAYGPPCSTTSPALQELLKGSVLHTWGDCEPLPITKAACPPTTAQDKRGSPQRTLLFSYHTCRPGAHQLSLNECVDERMNEQIATDMRFPTQNPAVVLDSPAGGEAGSDSEAEILSQKKDRKASRLLRNGSIPRGHHAGPEGHGSPRARKRNWQGRAPQSNSRPCPRRSGGSTEKRCCSAPAVVAKPELHSGDHLLLRCCPLWRSLLDFCEAQQTLVPAGQGRCLRLPVWGGEGRAWCGGDKPQLQSCSGVTRLAKSKVPEATSLDCPAGPTFKAAPQDPLAAVDWGPSAPGPFVAASTGAPVASQSQLGGQMVAGAMVTVGKEVLGICGGRGGAWSLQDCGPVGVLDGPCLEDHVYSWTVMK

SEQ ID NO: 52468 - protein, 492 aa, Homo sapiens
  DOMAIN (119)..(151): GTP-binding elongation factors proteins domain identified by eMATRIX, accession number BL00301B, p-value=5.500e-31, raw score of 20.09
  DOMAIN (34)..(456): Elongation factor Tu family domain identified by PFam, accession name GTP_EFTU, E-value=8.1e-132, PFam score of 446.9
  misc_feature (1)...(492): Xaa = X or * as defined in Table 2
DLGSGITASPPRPEPEHPVFPPAPHTPSKMGKEKTHINIVVIGHVDSGKSTTTGHLIYKCGGIDKRTIEKFEKEAAEMGKGSFKYAWVLDKLKAEREPGITIDISLWKFETTKYYITIIDAPGHRDFIKNMITGTSQADCAVLIVAAGVGEFEAGISKNGQTREHALLAYTLGVKQLIVGVNKMDSTEPAYSEKRYDEIVKEVSAYIKKIGYNPATVPFVPISGWHGANMLEPSPNMPWFKGWKVERKEGNASGVSLLEALDTILPPTRPTDKPLRLPLQDVYKIGGIGTVPVGRVETGILRPGMVVTFAPVNITTEVKSVEMHHEALSEALPGDNVGFNVKNVSVKDIRRGNVCGDSKSDPPQEAAQFTSQVIILNHPGQISAGYSPVIDCHTAHIACKFAELKEKIDRRSTKKLEDNPKSLKSGDAAIVEMVPGKPMCVESFSQXPVIGRTPVRDMRQTAAVGVIKNVQKKSVGAGKVTKSAQKAQKAGK

SEQ ID NO: 52469 - protein, 341 aa, Homo sapiens
  DOMAIN (242)..(333): Cyclic nucleotide-binding domain identified by PFam, accession name cNMP_binding, E-value=1.6e-12, PFam score of 55.0
MEGETLKIQTPVGAKLWTELSPICPPPPSKLRDLEGAGISAGFGGLGGKDTEGASVAPRTAPSLSMVLTARGTDSRIQEFRLSGWLAQQEDAHRIVLYQTDASLTPWTVRCLRQADCILIVGLGDQEPTLGQEGAGPTRTVEWLNMRSWCSGHLHLRCTRRLFSRRSLAKLHELYEKVFSRRADRHSDFSRLARVLTGNTIALGCSHIGVLKALEEAGVPVDLVGGTSIGSFIGALYAEERSASRTKQRAREWAKGDRSDCTYIVLNGRLRSVIQRGIGKKELVGEYVRGDLIGVVEALTRQPRATTVHAVRDTELAKLPEGTLGHIKRRYPQVRPVVGGA

SEQ ID NO: 52470 - protein, 132 aa, Homo sapiens
MEGETLKIQTPVGAKLWTELSPICPPPPSKLRDLEGAGISAGFGGLGGKDTEGASVAPRTAPSLSMVLTARGTDSRIQEFRLSGWLAQQEDAHRIVLYQTDASLTPWTVRCLRQADCILIVGLGDQEPTLGQ

SEQ ID NO: 52471 - protein, 419 aa, Homo sapiens
QTPTPCLTKHPTLQQTLRQNTADTGQQRRRTTEPPTEKTNKTTAKKKQKNPKQGNNTATTQRNNTDTRPTVSWLSISEAGPATCICPFTELSLLPDMDIGRNWLPVHSCVIIPPLSLPIIVAWLYSTTLAIIVLPRHSRSPHPCFIALPCHYVYMPNVPPNNPRPIANPGLDLLAHLYPGAYGPLHSPVDITWLIPRNKWLGWTPDTSRWERLDTLLFTNGSMTSVLEPVLDLTYPVTSMFTGSAFNRSIHRVFQDKQIEVRHLIPWPAYRNQEETQNQQQSKPGNEKTQRENGERMKEKYGVFRSGHNEAVSHYKLLLQQNKKFQNLIKKPTINYQQQMNATTNTFPLQITATTDGHHSTGHQASPEFPAENNPPPTNNIKHQPPPPPAHLQEPLSPRTCNKKQPQPPPQPMTPTTQQ

SEQ ID NO: 52472 - protein, 838 aa, Homo sapiens
  DOMAIN (371)..(385): C2H2-TYPE ZINC FINGER SIGNATURE domain identified by eMATRIX, accession number PR00048A, p-value=1.529e-12, raw score of 10.52
  DOMAIN (260)..(448): Zinc finger, C2H2 type domain identified by PFam, accession name zf-C2H2, E-value=4.8e-47, PFam score of 169.7
MLRGCSHIGVLKALEEAGVPVDLVGGTSIGSFIGALYAEERSASRTKQRAREWAKSMTSVLEPVLDLTYPVTSMFTGSAFNRSIHRVFQDKQIEVLPQKLRAHPRLKCWRSVLVRNPGHKGLRPVYEELDSDSEDLDPNPEDLDPVSEDPEPDPEDLNTVPEDVDPSYEDLEPVSEDLDPDAEAPGSEPQDPDPMSSSFDLDPDVIGPVPLILDPNSDTLSPGDPKVDPISSGLTATPQPSADSSGLSQHRRTHSGEKPYRCPDCGKSFSHGATLAQHRGIHTGARPYQCAACGKAFGWRSTLLKHRSSHSGEKPHHCPVCGKAFGHGSLLAQHLRTHGGPRPHKCPVCAKGFGQCSALLKHLRTHTGERPYPCPQCGKAFGQSSALLQHQRTHTAERPYRCPHCGKAFGQSSNLQHHLRIHTGERPYACPHCSKAFGQSSALLQHLHPLGPSKRPWDLHNTRETHGTSWVPRCNIMARESTRLPKTHLYPRASQEVANPTKNAYIPMLVQIPLTLEDPRKRGQWERYTTAKTAPTRRTIHAMERNVLEPDTNVAPSFPNFLYSNVILSRDPPDHTLLDTSYPCYLLVTCLVHGYIRTAWQKTENLFSSYQQCMKVLNCSVFSPKYVNSQSHQFLLTNPLAPPPADSVQDSPKSSVVRASSTCRWPQPRRYTSQAFGSSFGADTTLSKELKDSGAKKKSLQETDKHWQWLTWRTLEIFTMKGSRRPRSPSDSCTESKSDHAGESGSSGTPSNAPKRQKVEELGPHPGAEPAPVQPAPQHPAQLPLELPQRTKSRSGGQRPAAAPARKPLGRSRYPGLAPPPGAARRRRGDVTELPWRR

SEQ ID NO: 52473 - protein, 675 aa, Homo sapiens
  DOMAIN (149)..(173): Cyclic nucleotide-binding domain proteins domain identified by eMATRIX, accession number BL00888B, p-value=4.692e-10, raw score of 14.79
  DOMAIN (26)..(240): Cyclic nucleotide-binding domain identified by PFam, accession name cNMP_binding, E-value=2e-28, PFam score of 107.9
  misc_feature (1)...(675): Xaa = X or * as defined in Table 2
EESDCLTEYEEDAGPDCSRDEGGSPEGASPSTASEMDVSLHFVLWGCLHVYQRMIDKAEDVCLFVAQPGELVGQLAVLTGEPLIFTLRAQRDCTFLRISKSDFYEYDSPKLECGWHSEDPNPWTSPSTGLNPLFLELCRHMVFQRLGQGDYVFRPGQPDASIYVVQDGLLELCLPGPDGKECVVKEVVPGDSVNSLLSILDVITGHQHPQRTVSARAARDSTVLRLPVEAFSAVFTKSARTITGCVWRYVRASASYCPYLPPLCDPKDGHLLVDGCYVNNVPGSLWRYVRASMTRRATCPRCATPRTGTYSWMAATSTICQASGRPHHPHTQAPPAPHTRTRRTSPAAWVPKRSSPLTWGARMRRTSAPTGTACPAGGCCGSGXIPGLTRXRFQTWLKSSPAWPTCPVCGSXRLSSPAPTASTCARPSTASRPWTLGSSTRSILRTTRRMSTAVTTTATPAPIITPSTXGTNGTGCAPQIRPAEPSPGARTSWNPSLSATFAPEEFVASPXLDVPICRMGQCCSLPGGATLPXGPCGPQCMPGNVVPPERTAARYRQTTAYQTPACPTPPRGQRPTCVPTVSSLQAGLQGGPRSDFDMAYERGRISVSLQEEASGGSLAAPAREPREQPAGACEYSYCEDESATGGCPFGPYQGRQTSSIFEAAKQELAKLMRIE

SEQ ID NO: 52474 - protein, 517 aa, Homo sapiens
  DOMAIN (186)..(210): Cyclic nucleotide-binding domain proteins domain identified by eMATRIX, accession number BL00888B, p-value=4.692e-10, raw score of 14.79
  DOMAIN (178)..(278): Cyclic nucleotide-binding domain identified by PFam, accession name cNMP_binding, E-value=4.5e-23, PFam score of 90.1
NDSGLPDRPSSWNQPMEAPLQTGMVLGVMIGAGVAVVVTAVLILLVVRRLRVPKTPAPDGPRYRFRKRDKVLFYGRKIMRKVSQSTSSLVDTSVSATSRPRMRKKLKMLNIAKKILRIQKETPTLQRKEPPPAVLEADLTEGDLANSHLPSEVLYMLKNVRVLGHFEKPLFLELCRHMVFQRLGQGDYVFRPGQPDASIYVVQDGLLELCLPGPDGKECVVKEVVPGDSVNSLLSILDVITGHQHPQRTVSARAARDSTVLRLPVEAFSAVFTKYPESLVRVVQPGPPSGPAPYPAPSYGHAPRALQIIMVRLQRVTFLALHNYLGLTNELFSHEIQPLRLFPSPGLPTRTSPVRGSKRMVSTSATDEPRETPGRPPDPTGAPLPGPTGLQGGPRSDFDMAYERGRISVSLQEEASGGSLAAPAREPREQPAGACEYSYCEDESATGGCPFGPYQGRQTSSIFEAAKQELAKLMRIEDPSLLNSRVLLHHAKAGTIIARQGDQMEEVKVPAFAVIVD

SEQ ID NO: 52475 - protein, 1402 aa, Homo sapiens
  DOMAIN (207)..(231): Cyclic nucleotide-binding domain proteins domain identified by eMATRIX, accession number BL00888B, p-value=4.692e-10, raw score of 14.79
  DOMAIN (198)..(738): Cyclic nucleotide-binding domain identified by PFam, accession name cNMP_binding, E-value=4.3e-58, PFam score of 206.4
  misc_feature (1)...(1402): Xaa = X or * as defined in Table 2
PGRKSPGAEDRALWGPACRLLTDSGLPDRPSSWNQPMEAPLQTGMVLGVMIGAGVAVVVTAVLILLVVRRLRVPKTPAPDGPRYRFRKRDKVLFYGRKIMRKVSQSTSSLVDTSVSATSRPRMRKKLKMLNIAKKILRIQKETPTLQRKEPPPAVLEADLTEGDLANSHLPSEVLYMLKNVRVLGHFEKPLFLELCRHMVFQRLGQGDYVFRPGQPDASIYVVQDGLLELCLPGPDGKECVVKEVVPGDSVNSLLSILDVITGHQHPQAGPVSARAARDSTVLRLPVETFSAVFTKYPESLVRVLQIIMVRLQRVTFLALQNYLGLTNELFSHEIKPLRLFPSPGLPTRTSPVRGSKRMVSTSATDEPRETPGRPPDPTGAPQHGPTGDPVKPTSLETPSAPLLSRCVSMPGDISGLQGGPRSDFDMAYERGRISVSLQEEASGGSLAAPARTPTQEPREQPAGACEYSYCEDESATGGCPFGPYQGRQTSSIFEAAKQELAKLMRIEDPSLLNSRVLLHHAKAGTIIARQGDQDVSLHFVLWGCLHVYQRMIDKAEDVCLFVAQPGELVGQLAVLTGEPLIFTLRAQRDCTFLRISKSDFYEIMRAQPHVELNAAHTVAARNVPLWGRQMDFAIDWTAVEAGRALYRQGDRSDCTYIVLNGRLRSVIQRGSGKKELVGEYGRGDLIGVVEALTRQPRATTVHAVRDTELAKLPEGTLGHIKRRYPQVVTRLIHLLSQKILGNLQQLQGPFPAGSGLGVPPHSELTNPASNLATVAILPVCAEVPMVAFTLELQHALQAIGPTLLLNSDIIRARLGASALDSIQEFRLSGWLAQQEDAHRIVLYQTDASLTPWTVRCLRQADCILIVGLGDQEPTLGQLEQMLENTAVRALKQLVLLHREEGAGPTRTVEWLNMRSWCSGHLWHLRCPRRLFSRRSPAKLHELYEKVFSRRADRHSDFSRLARVLTRGNTIALVLGEGAHGARGCSHIGVLKALEEAGVPVDLVGGTSIGSFIGALYAEERSASRTKQRAREWAKSMTSVLEPVLDLTDPATSMFTGSAFNRSIHRVFPGXSRFEDLFLPYFKRXPTDITASAMRGHKDGSLWRYVRASMDTLSGYLPPLCDPKDGHLLMDGGYINNLPADIARSMGAKTVIAIDVGSQDETDLSTYGDSLFGWWLLWKRLNPWGLTRXRFPDMAEIQFPPGPNVSCVRQLEVVKSSSYCEYLRPPIDCFKTMDFGKFDQIYDVGYQYGKAVFGGWSRGNVIEKMLTDRRSTDLNESRRADVLAFPSSGFTDLAEIVSRIEPPTSYVSDGLCLTERESDCLTEFXGRDGRDPNCSKGXKGGSPEGASPSTASEMEEEKSILRQRRCLPQEAPGSAHRCLRTSTGGHPPPSHPWTGLGVASWG

SEQ ID NO: 52476 - protein, 40 aa, Homo sapiens
  misc_feature (1)...(40): Xaa = X or * as defined in Table 2
TCLSLVSGCGHCEKMNSEENWXIPIQWASSNPGRRRKNIR

SEQ ID NO: 52477 - protein, 63 aa, Homo sapiens
NGPMCFVKQLEIPQYGYRNNVPTTTPRSNLAKELEKYSKTSFEYTINDNHTYGGLGCMRPRLV

SEQ ID NO: 52478 - protein, 619 aa, Homo sapiens
  DOMAIN (559)..(569): Granins proteins domain identified by eMATRIX, accession number BL00422B, p-value=7.828e-09, raw score of 12.83
MTAELGEARLRPPHERNAGLGKARKAGLRPPHVRNAGLGKARKAWLRPPHVRNAGVWEARLRPPHGRNAGLRKARKAWLRPPHGRNAGVWEARLRPPHGRNAGLGKARKAWLRPPQGRNADKERGTWEGRKARLRPPHVGTRASGRPGCVPLTEGTRDSGRPEARKARLRPPHVRNAGVWEARLRPPHVRNAGLGKARKARLRPPHVRNAGVWEARLRPPHRRNAGLGKARKAWLRPPHGRNAGLEEARLRPPHRRNAGLGKARKAWLRPPHRRNAGLEEARLRPPHVWRPISWKPQANPNHRFRQESLLQLKLTDEERLISSQEENRAFLPQLGKSAGSAGEAASPLVGVRYFVLSLYPLENELRGELVNSYPVGIFKPWSTAEEYQVLRSPTRRGNSAGTSAQHGAPGDRVQVPLPSTGLLATVQGGRASWTWLGEKRDLEVLAAEILSCFALETAILSGVSAGTPPARPRKKPKEVIERAETQPAECAPTTLPKELREKRSAVPHRLKSRSVTVTPTAPCFTKYFPGSLRSSSHVPVPADCYSNLRIVEVRCGQPNNALSGTSVPSSANEGNNAFSAECLQCQNETALERTLYGLTGSVATEPDMTEFSSFSCDRL

SEQ ID NO: 52479 - protein, 123 aa, Homo sapiens
  misc_feature (1)...(123): Xaa = X or * as defined in Table 2
GITACVFFSMAEGRTRAERSCDSKXAIGAPAEEXGGASPGKSPELWQGAGYSPLGACGHKARLWIPWRRSWSGEKGARGCRGTGKKLGHQGWRWETPGRPGGAGPAGFPDPVVMGCEKEASRV

SEQ ID NO: 52480 - protein, 459 aa, Homo sapiens
MRTAVLGQAPTQVQPAAVREDQNEIFYLLNVEYSESPFVAISLRPAPMSLSHFPQLPVGIENDEEIKQLDEEIKELNESNSQMEADMIKLRTQRLRLGKVEGLSHSQPGVVNGSAQQVVSTHWTQFSQGWRHPLGLGPHQATERDFQAPRRGPDLNLIKNKSKRRKKETPSKPLNFTPVPDGEDRHACAGWRETAAPVPDGGRPPRLCRRRGRPPRLCRMEGDRRACAGWRETAAPVPEKRETAAPVPDGGRPPRLCRRRGRPPRLCRMGGDRRACAGWGETAAPVPEKGETAAPVPEKGETAAPVPEKGETAAPVPDGGRPPRLCRMQERPLLPLSAEGVACYLSSPGVFLLKLGKITTMESNLKTIEEENKVIEQQNESLLHELANLSQSLIHSLANIQLPHMFLRIFVEQAFWIVTRDSDQDSCTSDLQIAGGHPGLLLAGDTRSSCGLQQESCVL

SEQ ID NO: 52481 - protein, 742 aa, Homo sapiens
  DOMAIN (120)..(163): Domain of Unknown Function 2 domain identified by eMATRIX, accession number PF00563C, p-value=8.452e-09, raw score of 26.21
  DOMAIN (322)..(415): Zinc finger, C2HC type domain identified by PFam, accession name zf-C2HC, E-value=6.6e-26, PFam score of 99.5
MQDTEKDDNNNDEYDNYDELVAKSLLNLGKIAEDAAYRARTESEMNSNTSNSLEDDSDKNENLGRKSELSLDLDSDVVRETVDSLKLLAQGHGVVLSENMNDRNYADSMSQQDSRNMNYVMLGKPMNNGLMEKMVEESDEEVCLSSLECLRNQCFDLARKLSETNPQERNPQQNMNIRQHVRPEEDFPGRTPDRNYSDMLNLMRLEEQLSPRSRVFASCAKEDGCHERDDDTTSVNSDRSEEVFDMTKGNLTLLEKAIALETERAKAMREKMAMEAGRRDNMRSYEDQSPRQLPGEDRKPKSSDSHVKKPYYGKDPSRTEKKESKCPTPGCDGTGHVTGLYPHHRSLSGCPHKDRVPPEILAMHESVLKCPTPGCTGRGHVNSNRNSHRRDIQVFNLQKQEMIDRLESLSGCPIAAAEKLAKAQEKHQSCDVSKSSQASDRVLRPMCFVKQLEIPQYGYRNNVPTTTPRSNLAKELEKYSKTSFEYNSYDNHTYGKRAIAPKVQTRDISPKGYDDANGYCKDPSPSSSSTSSYAPSSSSNLSCGGGSSASSTCSKSSFDYTHDMEAAHMAATAILNLSTRCREMPQNLSTKPQDLCATRNPDMEVDENGTLDLSMNKQRPRDSCCPILTPLEPMSPQQQAVMNNRCFQLGEGDCWDLPVDYTKMKPRRIDEDESKDITPEDLDPFQEALEERRYPGEVTIPSPKPKYPQCKESKKDLITLSGCPLADKSIRSMLATSSQELK

SEQ ID NO: 52482 - protein, 1214 aa, Homo sapiens
  DOMAIN (159)..(179): Elongation factor 1 beta/beta'/delta chain proteins domain identified by eMATRIX, accession number BL00824B, p-value=4.913e- 10, raw score of 9.21
  DOMAIN (49)..(1058): Zinc finger, C2HC type domain identified by PFam, accession name zf-C2HC, E-value=6.7e-100, PFam score of 345.3
  misc_feature (1)...(1214): Xaa = X or * as defined in Table 2
LWACVLPGVTLPPFLGEKTSCKMEVDTEEKRHRTRSKGVRVPVEPAIQELFSCPTPGCDGSGHVSGKYARHRSVYGCPLAKKRKTQDKQPQEPAPKRKPFAVKADSSSVDECDDSDGTEDMDEKEEDEGEEYSEDNDEPGDEDEEDEEGDREEEEEIEEEDEDDDEDGEDVEDEEEEEEEEEEEEEEEENEDHQMNCHNTRIMQDTDLDDNNNDEYDNYDELVAKSLLNLGKIAEDAAYRARTESEMNSNTSNSLEDDSDKNENLGRKGELSLDLDSDVVRETVDSLKLLAQGHGVVLSENMNDRNYADSMSQQDSRNMNYVMLGKPMNNGLMEFMVXESDEEVCRSSLECLRNHCFYLARKLSETNPQERNPQQNMNIRQHVRPEEDFPGRTPDRNYSDMLNLMRLEEQLSPRSRVFASCAKEDGCHERDDDTTSVNSDRSEEVFDMTKGNLTLLEKAIALETERAKAMREKMAMEAGRRDNMRSYEDQSPRQLPGEDRKPKSSDSHVKKPYYGKDPSRTEKKESKCPTPGCDGTGHVTGLYPHHRSLSGCPHKDRVPPEILAMHESVLKCPTPGCTGRGHVNSNRNSHRSLSGCPIAAAEKLAKAQEKHQSCDVSKSSQASDRVLRPMCFVKQLEIPQYGYRNNVPTTTPRSNLAKELEKYSKTSFEYNSYDNHTYGKRAIAPKVQTRDISPKGYDDAKRYCKDPSPSSSSTSSYAPSSSSNLSCGGGSSASSTCSKSSFDYTHDMEAAHMAATAILNLSTRCREMPQNLSTKPQDLCATRNPDMEVDENGTLDLSMNKQRPRDSCCPILTPLEPMSPQQQAVMNNRCFQLGEGDCWDLPVDYTKMKPRRIDEDESKDITPEDLDPFQEALEERRYPGEVTIPSPKPKYPQCKESKKDLITLSSCPLADKSIRSMLATSSQELKCPTPGCDGSGHITGNYASHRSLSGCPRAKKSGIRIAQSKEDKEDQEPIRCPVPGCDGQGHITGKYASHRSASGCPLAAKRQKDGYLNGSQFSWKSVKTEGMSCPTPGCDGSGHVSGSFLTHRSLSGCPRATSAMKKAKLSGEQMLTIKQRASNGIENDEEIKQLDEEIKELNESNSQMEADMIKLRTQITTMESNLKTIEEENKVIEQQNESLLHELANLSQSLIHSLANIQLPHMDPINEQNFDAYVTTLTEMYTNQDRYQSPENKALLENIKQAVRGIQFRSEQLL

SEQ ID NO: 52483 - protein, 507 aa, Homo sapiens
  misc_feature (1)...(507): Xaa = X or * as defined in Table 2
PASEEFNSLHGRTPRRDLECRNQQSTTEERRRHDCVQQASEHNEGKWDFAFSAQSQPKPXKPFDVPCXDSRPACPXEHTAGTSGSTSSETCFFQSSEWPYGELGAYNIFTGPKSTLSSLVTGVSNSSSLSXLPSPKNTITNWFHTRDHSSYSEIHSKACANPXAPSQPSRXASWIATGSFRRAGLATXPCCTGSKLLPAWVLANHRWDRTRDGIQKQGNSEXPSSPGTRAFEGNSSSPAPAASITSMLSPSFTPTSVIRKMYESKEKSKEEPASGKAALGDSKEDTQKASEENLLSSSSVPSADRDYFSHYKFQTVRHYRGSSCSPHLSQGQPFTPKEQDYSDLKGNWGRKNTHFGHSPVSLQHFFFRPVPPSSPLSPMVPNGXGLLTKLHPGFGTEDAGPGSTSTASSKFAPNWCASSWDGLESFTGNIWPHPGSALLPFNXSLVHPLLNPRPGNTSASGNGATAANSAQSCILQALVSHGSSCSAFQDNPSETCPAGQACPHALP

SEQ ID NO: 52484 - protein, 384 aa, Homo sapiens
  misc_feature (1)...(384): Xaa = X or * as defined in Table 2
EGKVPLAFIVLTSLLNAVMSPSFFSCRLLVTALKVSSRCSAMKGVEFFTCWSTFKPFRPASTSSTESTTPECELSLSFSLFAERLERRGFKSTLAFCSISKISTLFSAWSSNGIGAKXFPEFCPGDRMACSRPASLSSSSCGSXPKTAGSASXSARVREPPTEPTGRDXPFSQTSSIIEAKHGTLSRLKNSLKSKSPGDCSGKTASLGTSXSAAGSCARMTSTSSSSATPPLHSTIPSFTEAVRRLVLFLPLXSSSSILSSKPVSSMVSDXLVGPAENHSGSSSVXESFLLRSPKTRLLSPNSLLKRLSLKSLSRSLSLKSRRSLSLSGDPSQRSGQRLSSHCQSYVHQADEAHHYLSLMDFLSAGSXQRLSRGSPLQSSVSEG

SEQ ID NO: 52485 - protein, 22 aa, Homo sapiens
FYFLFQKSLRKWKWATVSEDIF

SEQ ID NO: 52486 - protein, 77 aa, Homo sapiens
MFASQASILPSSPSHLHTALRKLPQVQASGEPCPQADPTAFSEPSLPSSEVADEPPTLTKEEPVPLETQVSNHFEFS

SEQ ID NO: 52487 - protein, 276 aa, Homo sapiens
  misc_feature (1)...(276): Xaa = X or * as defined in Table 2
MCAGNLCSWEERWAVDEKEATDKKPHVGGFGQGAPAPAAPAAAMSGRSVRAVTRSRFXDDIKKVMAAIEKVRKWEKKWVTVGDTSLRIFKWVPVTDSKEKEKSKSNSSAAREPNGFPSDASANSSLLLEFQDENSNQSSVSDVYQLKVDSSTNSSPKPPKQSESLSPAHTSDFRTDDSQPPTLGQGDPGRSPPLPSSEVADEPPTLTKGRTSFHLETQVVEEEEDSGAPPLKRFCVDQPTVPQTGSEKLAPSRPSAFWALPLFIAFWFWPRRVCWG

SEQ ID NO: 52488 - protein, 80 aa, Homo sapiens
PSQSFRGRRKYHYGAWVGWHREVGTRCGGLGCPLVAKGSSWSFHPTPTPGSPIPDCLAAHLLGLQGKFDKDLLQLLIARS

SEQ ID NO: 52489 - protein, 148 aa, Homo sapiens
  misc_feature (1)...(148): Xaa = X or * as defined in Table 2
XPVPRPFAGPRIAATFFSCIACVAYATEWPGPGPGPARSLAIWPRTRAAEGAGDLRCLHHFAFISDPNLYQHQPALGGAWRFLSGLALLSVLLYATALFSGPSTSSMRSMAASSALERCKLQPQPCLLRCAWDRRLAVAILTAINHWX

SEQ ID NO: 52490 - protein, 44 aa, Homo sapiens
  misc_feature (1)...(44): Xaa = X or * as defined in Table 2
XSMRSMAASSALERCKLQPQPCLLRCAWDRRLAVAILTAINHWX

SEQ ID NO: 52491 - protein, 29 aa, Homo sapiens
  misc_feature (1)...(29): Xaa = X or * as defined in Table 2
GSTWWPADXAQLXLHLPTRCMAECWEIPA

SEQ ID NO: 52492 - protein, 269 aa, Homo sapiens
  DOMAIN (168)..(197): MYOSIN HEAVY CHAIN SIGNATURE domain identified by eMATRIX, accession number PR00193E, p-value=5.957e-09, raw score of 19.47
  DOMAIN (138)..(197): Myosin head (motor domain) domain identified by PFam, accession name myosin_head, E-value=4.3e-09, PFam score of 33.1
PGGRHGRQNDFAAPGGRLEARIHGTVSAPLYHRVLCRLLGSRPASAAGPAARGGDLAPGEHSFCEDGNYARVESVDRSAINRAMQNPRKSTASVCWTFTASDLPAQGVPRTSSTRTLREDPFPPSAEKWLRAVLHHFVNEKLQQIFIELTLKPSRRSMSGRHPLDSNPVLQQQGRCDLIENKLSPPGIMSVLDDVCPPCTPRAGEQTRHCCRTAGGCGDPRAFQQLERRFVIHHYAGKTHRPLPGLTPTGNSTNARNIVMDTQQRTGNN

SEQ ID NO: 52493 - protein, 21 aa, Homo sapiens
AAAAAMPTTCVPGTADWLWPS

SEQ ID NO: 52494 - protein, 124 aa, Homo sapiens
  misc_feature (1)...(124): Xaa = X or * as defined in Table 2
YSPSSWFSNLYQPSTGALSSSETPKDMAPMKSLREVRSQSHTSTLSRRSTSPGFRLNTKVSFHTGFSVAFTVRVFCFVRFRGSGMSFSFTXGSERPLGSIGIRLRASPTVTWISSAVGARISSC

SEQ ID NO: 52495 - protein, 318 aa, Homo sapiens
  misc_feature (1)...(318): Xaa = X or * as defined in Table 2
SVSTTRSFSVDSSAKTAAMPVTVTRTTHHNHPDVIFGAWGPPXSWGPLWALTQPLGLLRLLQLVSTCVAFSLVASVGAWTGSMGNWSMFTWCFCFSVTLIILIVELCGAPGPFPPWSWRNFPITFACYAALFCLSASIIYPTTYVQFLSHGRSRDHAIAATFFSCIACGCYATEVAWTRARPGEITGYMATVPGLLKVLETFVACIIFAFISDPNLYQHQPALEWCVAVYAICFILAAIAILLNLGECTNVLPIPFPSFLSALAFCLSSSMPPPLFSGPSTSSMRSMAASLGAREMXAAAAGMPTTWVPGTADWLRPS

SEQ ID NO: 52496 - protein, 105 aa, Homo sapiens
  misc_feature (1)...(105): Xaa = X or * as defined in Table 2
CTRVSVAEKTSVCLFGLYWESLSISSSCESSAKWPFSTIRSASSTTRHLSCRRFLKXXCFSLINSHSRPGVATTISGRRFSILCCFCVDIPPTKIAVLIPVNLAT

SEQ ID NO: 52497 - protein, 74 aa, Homo sapiens
RRRQKGGKADQQEERRRQKQMKVLKKELRHLLSQPLFTESQKTKYPTQSGKPPLLVSAPSKSESALSCLFHSHP

SEQ ID NO: 52498 - protein, 37 aa, Homo sapiens
WVFSYFRYLISLPGSGKVSRSFIRYFPMAFRTRSRQR

SEQ ID NO: 52499 - protein, 38 aa, Homo sapiens
YWVFSYFRYLISLPGSGKVSRSFIRYFPMAFRTRSRQR

SEQ ID NO: 52500 - protein, 58 aa, Homo sapiens
  misc_feature (1)...(58): Xaa = X or * as defined in Table 2
GPGGRSFTVWWNWXRRMAQCPPAEGVQRPECLGPHRAVPAPAHVGLHQEPSRLLPALH

SEQ ID NO: 52501 - protein, 452 aa, Homo sapiens
  DOMAIN (44)..(111): PAS domain identified by PFam, accession name PAS, E-value= 2.5e-05, PFam score of 25.1
  misc_feature (1)...(452): Xaa = X or * as defined in Table 2
GRCATPRPRWRGHQCDPPPGDVCVAWREMQLRNKKRRRDLGNLIKRFLTAPNSLPDAVVLTTEEAVIFWCNVLAQQIFGLPLEMMNEQPLEGAVREKALHTMREQTQRMEGLVKQLLTLSKIEAAPTHLLNEKVDVPMMLRVVEREAQTLVYNAVNHTPEGTHITVRWQRVPHGAEFSVEEXSEGWPVPVPKPHRAVVGANAHISFCPPQELSKRFTAIRKTKGDGNCFYRALGYSYLESLLPDAFQPLLPPQAWVSPGESQGAGIRDPLWPVPVPKPHRAVVGANAHISFCPPQELSKRFTAIRKTKGDGNCFYRALGYSYLESLLPDAFQPLLPPQAWVSPGESQGAGTRDPLWLWLFRLWLLRLLCLLLLLLGETAQSRLALTWGRHKQGRLARLSGILGFLALRKQWLGQQVAQLLLQNLHLLLLRWAGLGVIVFQVSNQPAWERTGV

SEQ ID NO: 52502 - protein, 590 aa, Homo sapiens
  DOMAIN (499)..(545): DEAD-box subfamily ATP-dependent helicases proteins domain identified by eMATRIX, accession number BL00039D, p-value=8.200e- 32, raw score of 21.67
  DOMAIN (64)..(400): DEAD/DEAH box helicase domain identified by PFam, accession name DEAD, E-value=1e-48, PFam score of 157.0
MTSENLVQTAPKKKKNKGKKGLEPSQSTAAKVPKKAKTWIPEVHDQKADVSAWKDLFVPRPVLRALSFLGFSAPTPIQALTLAPAIRDKLDILGAAETGSGKTLAFAIPMIHAVLQWQKRNAAPPPSNTEAPPGETRTEAGAETRSPGKAEAESDALPDDTVIESEALPSDIAAEARAKTGGTVSDQALLFGDDDAGEGPSSLIREKPVPKQNENEEENLDKEQTGNLKQELDDKSATCKAYPKRPLLGLVLTPTRELAVQVKQHIDAVARFTGIKTAILVGGMSTQKQQRMLNRRPEIVVATPGRLWELIKEKHYHLRNLRQLRCLVVDEADRMVEKGHFAELSQLLEMLNDSQYNPKRQTLVFSATLTLVHQAPARILHKKHTKKMDKTAKLDLLMQKIGMRGKPKVIDLTRNEATVETLTETKIHCETDEKDFYLYYFLMQYPGRSLVFANSISCIKRLSGLLKVLDIMPLTLHACMHQKQRLRNLEQFARLEDCVLLATDVAARGLDIPKVQHVIHYQVPRTSEIYVHRSGRTARVTNEAFSLMLIGPEDVINFKKISKPLKKDEDIPLFPRADINTWMWSRSESV

SEQ ID NO: 52503 - protein, 62 aa, Homo sapiens
  misc_feature (1)...(62): Xaa = X or * as defined in Table 2
LHLLSFGYLTHQLLCLHLKWDSHTLHHSHHTIARXAGCSEATWSPPRRLRAPRSRALCSGFR

SEQ ID NO: 52504 - protein, 158 aa, Homo sapiens
MAVKHNVMILQFDKQQQLGRFFKVVDELDNQMREGGVIVDYHGCDFFPERWFHIVFVLRTDTNVLYERLETRLKMEALTDREHGMIDPDSGDEAQLNGGHSAEESLGEPTQATVPETWSLPLSQNSASELPASQPQPFSAQGDMEENIIIEDYESDGT

SEQ ID NO: 52505 - protein, 49 aa, Homo sapiens
  misc_feature (1)...(49): Xaa = X or * as defined in Table 2
VKYHEFTCSFKKQITVPEDARLLKXDVRGRPSRLFLADPPPPHTVNREY

SEQ ID NO: 52506 - protein, 746 aa, Homo sapiens
  DOMAIN (128)..(149): Bacterial type II secretion system protein E proteins domain identified by eMATRIX, accession number BL00662D, p-value=7.459e- 10, raw score of 8.67
  misc_feature (1)...(746): Xaa = X or * as defined in Table 2
YQSQSFDEDEMNQVTDWVDPSFDDFLECSGVSTITATSLGVNNSSHRRKNGPSTLESSRFPARKRGNLSSLEQIYGLENSKEYLSENEPWVDKYKPETQHELAVHKKKIEEVETWLKAQVLGRQPKQGGSILLITGPPGCGKTTTLKILSKEHGIQVQEWINPVLPDFQKDDFKGMFNTESSFHMFPYQSQIAVFKEFLLRATKYNKLQMLGDDLRTDKKIILVEDLPNQFYRDSHTLHEVLRKYVRIGRCPLIFIISDSLSGDNNQRLLVPKEIQEEWSISNIRFNPWAPTIMMKFLNRIVTIEANKNGGKITVPDKTSLELLCQGCSGDIRSAINSLQFSSSKGENNLRPRKKGMSLKSDAVLSKSKRRKKPDRVFENQEVQAIGGKDVSLFLFRALGKILYCKRASLTELDSPRLPSHLSEYERDTLLVEPEEVVEMSHMPGDLFNLYLHQNYIDFFMEIDDIVRASEFLSFADILSGDWNTRSLLREYSTSIATRGVMHSNKARGYAHCQGGGSSFRPLHKPQWFLINKKYRENCLAAKALFPDFCLPALCRQTQLLPYLALLTIPMRKSSFRFSFYSKDIGEGLPSGRRTLWGRIGKWEGPGLDRGTWDDXTPDSGDEAQLNGGHSAEESLGEPTQATVPETWSLPLSQNSASELPASQPQPFSAQGDMEENIIIEDYESDGDIEASLLIRLLLHSFHFCFHFSGTSAELICFSDELHNSLLILHSCSISSQETYSSVILK

SEQ ID NO: 52507 - protein, 53 aa, Homo sapiens
LREDDRRGEADRDTYRRSAVPPGADKKAEAGAGSATEFQFRGGFGRGRGQPPQ

SEQ ID NO: 52508 - protein, 195 aa, Homo sapiens
  misc_feature (1)...(195): Xaa = X or * as defined in Table 2
VTRLFFQPGYGTLQPQRLLMPKKNRIAIYELLFKEGVMVPKKDVPIPKHPELADRNVPNLHVMKPMQSLKSRGYVKEQFAWRHFYWYLTKXGYQGVSISSRDYLHLPPEIVPCHPYGRSPSRRLARPSGXKVLEGXANLRGLHKNGEADKRLPTRRECLCHPGADKKAEAGALGSSNPNFQFRGGFGRGRGQPPQ

SEQ ID NO: 52509 - protein, 115 aa, Homo sapiens
KHPELADKNVPNLHVMKAMQSLKSRGYVKEDYLHLPPEIVPATLRRSRPETGRPRPKGLEGERPARLTRGEADRDTYRRSAVPPGADKKAEAGAGSATEFQFRGGFGRGRGQPPQ

SEQ ID NO: 52510 - protein, 53 aa, Homo sapiens; identical to SEQ ID NO: 52507

SEQ ID NO: 52511 - protein, 210 aa, Homo sapiens
  misc_feature (1)...(210): Xaa = X or * as defined in Table 2
RRPQHRACSFFFSPGTGPCSRRRCLMPKKNRIAIYELLFKEGVMVAKKDVHMPKHPELADKNGAPTFHVMKGHAGLSKSPRATVKGTSFAWGDIFYWYLTNXGYQGVSISSRDYLSSCPREICCLATATARSPSKRLGKAFGLKRSWEGLRRPGEDFTRGGKFDRGYLTGRIAVATLVADKKAEAGALGSSNPNFQFRGGFGRGRGQPPQ

SEQ ID NO: 52512 - protein, 563 aa, Homo sapiens
  misc_feature (1)...(563): Xaa = X or * as defined in Table 2
MFNSVPVQNEDGSFNFEGVKAEFRPGTQTQEYIKGMEDSASEVTVNREVTTDNPYTISVTNKTLSAIRIKMFMPRAYELKVTVIKMAFELSTRCSKRLMDGSFETVLTDVIEGKTMSGYDRSRRVNLPNFNNQVIFRVVRKTPDSNDSNVVDAIQVRSYAEVIDAKFRYPLTGLLFVEFDSKMFPNQLPTISIRKRWKIVNVPSNYDPESRTYNGNWDGTFKKAWTNNPAWVLYDLMINQRYGLDQKELGISVDKWALYEAAQYCDQMVLTAKAARNLATFVTCIIQSQTDAPREPAYIFTNDNVVNGDFSYTSQARRACTRRATXCLMMSKTCINRTLSQYSIVEGHSTVRNNVTSITAIGAHVEAKANRRGRWILKTNLRSTTVNFATGLEGMIPTIGDVVAISDNFWSSNLTMNLSGRLLEVSGSQIFLPFRVDARAGDFIIVNKPDGKPVKRTISSVSADGKTIEINIGFGFPVKPNTVFAIDRTDLALQQYVVTKIDKGDDDEEFTSKSRRWSTILISTMKLITGLTSTTDRQASLSQIRCPKPENVKCPQSRESSRG

SEQ ID NO: 52513 - protein, 613 aa, Homo sapiens
  misc_feature (1)...(613): Xaa = X or * as defined in Table 2
MEDNLISINKIKILLSVSDGEIDETFSLKQLMFNSVPVQNEDGSFNFEGVKAEFRPGTQTQEYIKGMEDSSSEVTVNREVTTDNPYTISVTNKTLSAIRIKMFMPRAYELKVTVIKMAFELSTRCSKRLMDGSFETVLTDVIEGKTMSGYDRSRRVNLPNFNNQVIFRVVRKTPDSNDSNVVDAIQVRSYAEVIDAKFRYPLTVLLFVEFDSKMFPNQLPTISIRKRWKIVNVPSNYDPESRTYNGNWDGTFKKAWTNNPAWVLYDLMINQRYGLDQKELGISVDKWALYEAAQYCDQMVLTAKAARNLATFVTCIIQSQTDAYKVVRDICSIFRGMSFWNGPREPAYIFTNDNVVNGDFSYTSQARRACTRRATXCLMMSKTCINRTLSQYSIVEGHSTVRNNVTSITAIGAHVEAKANRRGRWILKTNLRSTTVNFATGLEGMIPTIGDVVAISDNFWSSNLTMNLSGRLLEVSGSQIFLPFRVDARAGDFIIVNKPDGKPVKRTISSVSADGKTIEINIGFGFPVKPNTVFAIDRTDLALQQYVVTKIDKGDDDEEFTSKSRRWSTILISTMKLITGLTSTTDRQASLSQIRCPKPENVKCPQSRESSRG

SEQ ID NO: 52514 - protein, 483 aa, Homo sapiens
  DOMAIN (477)..(483): Single-strand binding protein family proteins domain identified by eMATRIX, accession number BL00735D, p-value=2.286e- 10, raw score of 5.51
MEDNLISINKIKILLAVSDGEIDETFSLKQLMFNSVPVQNEDGSFNFEGVKAEFRPGTQTQEYIKGMEDSSSEVTVNREVTTDNPYTISVTNKTLSAIRIKMFMPRGVRIESNGDKNGVRVEYEVQQAVDGGSFETVLTDVIEGKTMSGYDRSRRVNLPNFNNQVIFRVVRKTPDSNDSNVVDAIQVRSYAEVIDAKFRYPLTGLLFVEFDSKMFPNQLPTISIRKRWKIVNVPSNYDPESRTYNGNWDGTFKKAWTNNPAWVLYDLMINQRYGLDQKELGISVDKWALYEAAQYCDQMVPDGKGGTEPRYLCDVIIQSQTDAYKVVRDICSIFRGMSFLQWPREPAYIFTNDNVVNGDFSYTFRSEKSMYTTCHVMFDDEQTCIHKTLSHFRSDGGKPGLADWYREAFQVGRVISVSCETLKISSREHNGTTYNSLQAADFPKLVFSQRGQSNQQRAPQQQQRTQSQPQPNPQSTFDDDIPF

SEQ ID NO: 52515 - protein, 633 aa, Homo sapiens
  misc_feature (1)...(633): Xaa = X or * as defined in Table 2
MIQKVISGSKGGSQKPHNPVEMEDNLISFNKIKILLAVSDGEIDETFSLKQLMFNSVPVQNEDGSFNFEGVKAEFRPGTQTQEYIKGMEDSSSEVTVNREVTTDNPYTISVTNKTLSAIRIKMFMPRAYELKVTVIKMAFELSTRCSKRLMDGSFETVLTDVIEGKTMSGYDRSRRVNLPNFNNQVIFRVVRKTPDSNDSNVVDAIQVRSYAEVIDAKFRYPLTGLLFVEFDSKMFPNQLPTISIRKRWKNVNAPSNYDPESRTYNGNWDGTFKKAWTNNPAWVLYDLMINQRYGLDQKELGFSVDKWALYEAAQYCDQMVLTAKAARNLATFVTCIIQSQTDAPREPAYIFTNDNVVNGDFSYTSQARRACTRRATXCLMMSKTCINRTLSQYSIVEGHSTVRNNVTSITAIGAHVEAKANRRGRWILKTNLRSTTVNFATGLEGMIPTIGDVVAISDNFWSSNLTMNLSGRLLEVSGSQIFLPFRVDARAGDFIIVNKPDGKPVKRTISSVSADGKTIEINIGFGFPVKPNTVFAIDRTDLALQQYVVTKIDKGDDDEEFTSKSRRWSTILISTMKLITGLTSTTDRQASEVKPVNFTSSRHQAQPEVGLIPPPLWPQGKGIIAQTSKSSA

SEQ ID NO: 52516 - protein, 225 aa, Homo sapiens
MEDSSSEVTVNREVTTDNPYTISVTNKTLSAIRIKMFIVAAYELKVTVIKMAFELSTRCSKRLMAVKTCPGYDRSRRVNLPNFNNQVIFRVVRKTPDSNDSNVVDAIQGKKIGDRVHFEHVSQNNCAVTHGERKRKTGSQAARARLKLANFAVKSSARKSTDGSHFPHHFPPHLVPNGGCHRSDLSPVVGVMTFPISPKTKFNAFAAGFTWAMLEAAAPDHPQLL

SEQ ID NO: 52517 - protein, 181 aa, Homo sapiens
SGVLVGHALTARQPSSGRRLVVDHSANRRGRWILKTNLCSTTVNFATGLEGMIPTIGDGDFIIVNKPDGKPVKRTISSVSADGKTIEINIGFGFPVKPNTVFAIDRTDLALQQYVVTKIDKGDDDEEFTSKSRRWSTILISTMKLITGLTSTTDRQASLSQIRCPKPENVKCPQSRESSRG

SEQ ID NO: 52518 - protein, 622 aa, Homo sapiens
  misc_feature (1)...(622): Xaa = X or * as defined in Table 2
MEDNLISINKIKILLAVSDGEIDETFSLKQLMFNSVPVQNEDGSFNFEGVKAEFRPGTQTQEYIKGMEDSSSEVTVNREVTTDNPYTISVTNKTLSAIRIKMFMPRAYELKVTVIKMAFELSTRCSKRLMDGSFETVLTDVIEGKTMSGYDRSRRVNLPNFNNQVIFRVVRKTPDSNDSNVVDAIQVRSYAEVIDAKFRYPLTGLLFVEFDSKMFPNQLPTISIRKRWKIVNVPSNYDPESRTYNGNWDGTFKKAWTNNPAWVLYDLMINQRYGLDQKELGISVDKWALYEAAQYCDQMVLTAKAARNLATFVTCIIQSQTDAYKVVRDICSIFRGMSFWNGESISVIIDRPREPAYIFTNDNVVNGDFSYTSQARRACTRRATXCLMMSKTCINRTLSQYSIVEGHSTVRNNVTSITAIGAHVEARPTDCGRWILKTNLRSTTVNFATGLEGMIPTIGDVVAISDNFWSSNLTMNLSGRLQEVSGSQIFLPFRVDARAGDFNIVNKPDAKPVKRTISSVSADGKTIEINIGFGFPVKPNTVFAIDRTDLALQQYVVTKIDKGDDDEEFTSKSRRWSTILISTMKLITGLTSTTDRQASLSQIRCPKPENVKCPQSRESSRG

SEQ ID NO: 52519 - protein, 665 aa, Homo sapiens
  misc_feature (1)...(665): Xaa = X or * as defined in Table 2
CRSSQNTQETSPDRALLVNLRPSQGPLLALWVPAEGVGGKGHCLPPRSFFRMDNQLVPAVSDGEIDETFSLKQLMFNSVPVQNEDGSFNFEGVKAEFRPGTQTQEYIKGMEDSSSEVTVNREVTTDNPYTISVTNKTLSAIRIKMFMPRAYELKVTVIKMAFELSTRCSKRLMDGSFETVLTDVIEGKTMSGYDRSRRVNLPNFNNQVIFRVVRKTPDSNDSNVVDAIQVRSYAEVIDAKFRYPLTGLLFVEFDSKMFPNQLPTISIRKRWKIVNVPSNYDPESRTYNGNWDGTFKKAWTNNPAWVLYDLMINQRYGLDQKELGISVDKWALYEAAQYCDQMVLTAKAARNLATFVTCIIQSQTDAYKVVRDICSIFRGMSFWNGESISVIIDRPREPAYIFTNDNVVNGDFSYTSQARRACTRRATXCLMMSKTCINRTLSQYSIVEGHSTVRNNVTSITAIGAHVEAKANRRGRWILKTNLRSTTVNFATGLEGMIPTIGDVVAISDNFWSSNLTMNLSGRLLEVSGSQIFLPFRVDARAGDFIIVNKPDGKPVKRTISSVSADGKTIEINIGFGFPVKPNTVFAIDRTDLALQQYVVTKIDKGDDDEEFTSKSRRWSTILISTMKLITGLTSTTDRQASLSQIRCPKPENVKCPQSRESSRG

SEQ ID NO: 52520 - protein, 136 aa, Homo sapiens
  misc_feature (1)...(136): Xaa = X or * as defined in Table 2
PAAVAXVKTEPETPGPSCLSQEGQTAVKTEESSELGNYVIKIDHLETIQQLLTAVVKKIPLITAKWQRAMTMRKVLQEILEKNPRFHHLTPLKTKHIAHWCRCHGYTPPDPESLRNDGDSIEDVLTQIDSEPECPS

SEQ ID NO: 52521 - protein, 171 aa, Homo sapiens
IFACWGKQAWPACCNSLRGQAVKGNQLLPVSLVKRKTTLAPNTQTASPRALADSLMQLARQVSRLEQRAKREPENEEEVDILSLSEPVKINIKKEQEEKQEEVKFYLPPTPGSEFIGDVTQKRLEEVDSTFGDDLVQGFSGGISRRYGEKPGVQDLEVEPDSVTEMLQFYD

SEQ ID NO: 52522 - protein, 398 aa, Homo sapiens
  misc_feature (1)...(398): Xaa = X or * as defined in Table 2
MAWPCISRLCCLARRWNQLDRSDVAVPLTLHGYSDLDSEEPGTGGAASRRGQPPAGARDSGRDVPLTQYQRDFGLWTTPAGPKDPPPGRGPGAGGRRGKSSAQSSAPPAPGARGVYVLPIGDADAAAAVTTSYRYGLGRDRNESPPCGGRTRRPGARGMGWAAERRRLEPGSHATSELPAASEVTPVWSVGTAGGAFAAPCPETVLEHPRAGSAPLPSQPPSWGQPSEWPAFSRVGTGLPLTPTAGPSRARGARRPCPPALPGHCLLDRTYTGLQTLGAETLLAVVNSAAMNVGVQVVDVELHRHSLGEDCIYPQSSESDISDAPPSLPLTIPAPVKASSPIKQSHEPVPDTSVEKGSPGSCPFHLXGPLSHLGSSPGFLLWRPPGLLSSVALVASCS

SEQ ID NO: 52523 - protein, 182 aa, Homo sapiens
  misc_feature (1)...(182): Xaa = X or * as defined in Table 2
PSSLSCDIFLRSPISTPSPSPLPRTPTSTPVHVKQGTAGSVINNPYVIMDKQPGQVIGATTPSTGSPTNKISTASQISQGTGSPVPKIHGSSFVTSTVKVIIKQEPGEAPHVPATGAASQSPLPQYVTVKGGHMIAVSPQKQVITPGEGIAQSAKVQPSKVLGQIGXCLPTLARADLLYSVC

SEQ ID NO: 52524 - protein, 1707 aa, Homo sapiens
  misc_feature (1)...(1707): Xaa = X or * as defined in Table 2
LLKIHSSQSSPQQAVLTIPSQLKPLSVNTSGGVQTILMPVNKVVQSFSTSKPPAILPVAAPTPVVPSSAPAAVAKGEDASCFSAKSVEQYYGWNIGKRRAAEWQRAMTMRKVLQEILEKNPRFHHLTPLKTKHIAHWCRCHGYTPPDPESLRNDGDSIEDVLTQIDSEPDHGSLGDGKSSSVGPTAVVTLLACHLECPSSFSSADNLCRKLEDLQQFQKREPENEEEVDILSLSEPVKINIKKEQEEKQEEVKFYLPPTPGSEFIGDVTQKGGMLVWREAVSKAAIRTNGFLLLFQIGITLQPVALHRNVYASVVEDMILKATEQLVNDILRQALAVGYQTASHNRYYYLCSLWCEAYTSFLTVELPMKVFYTYINPVGDGGSKTCDTMVFNHPAIKKFLESPSRSSSPANQRAETPSANHSESDSLSQHNDFLSDKDNNSNMDIEERLSNNMEQRPSRNTGRDTSRITGSHKTEQRNADLTDETSRLFVKKTIVVGNVSKYIPPDKREENDQSTHKWMVYVRGSRREPSINHFVKKVWFFLHPSYKPNDLVEVREPPFHLTRRGWGEFPVRVQVHFKDSQNKRIDIIHNLKLDRTYTGLQTLGAETVVDVELHRHSLGEDCIYPQSSESDISDAPPSLPLTIPAPVKASSPIKQSHEPVPDTSVEKGFPASTEAERHTPFYALPSSLERTPTKMTTSQKVTFCSHGNSAFQPIASSCKIVPQSQVPNPESPGKSFQPITMSCKIVSGSPISTPSPSPLPRTPTSTPVHVKQGTAGSVINNPYVIMDKQPGQVIGATTPSTGSPTNKISTASQISQGTGSPVPKIHGSSFVTSTVKQEDSLFASMPPLCPIGSHPKVQSPKPITGGLGAFTKVIIKQEPGEAPHVPATGAASQSPLPQYVTVKGGHMIAVSPQKQVITPGEGIAQSAKVQPSKVAGVPVGSALPSTVKQAVAISGGQILVAKASSSVSKAVGPKQVVTQGVAKAIVSGGGGTIVAQPVQTLTKAQVTAAGPQKSGSQGSVMATLQLPATNLANLANLPPGTKLYLTTNSKNPSGKGNLLLFPQEPIMXVTSNANFQYGSPTSGGSGLGAAGGEGGGGGSGSGGGVSTGGGGGTAGGGTQSIAGPGGISQHLTYTSYIFKQTPQGTFLVGQPSPQTSGKQLTSGSVVQGTLGVYSSSAQGQQTLKVISGQKTTLFTQAAHGGQASLMKISDSTLKTVPATSQLSKPGTTMLRVAGGVITTATSPAVALSANGPAQQSEGVAPVVFILRFSSVTKTSGQQQVCVSQATVGTCKAATPTVVSATSLVPTPNPISGKATVSGLLKIHSSQSSPQQAVLTIPSQLKPLSVNTSGGVQTILMPVNKVVQSFSTSKPPAILPVAAPTPVVPSSAPAAVAKVKTEPETPGPSCLSQEGQTAVKTEESSELGNYVIKIDHLETIQQLLTAVVKKIPLITAKSEDASCFSAKSVEQYYGWNIGKRRAAEWQRAMTMRKVLQEILEKNPRFHHLTPLKTKHIAHWCRCHGYTPPDPESLRNDGDSIEDVLTQIDSEPECPSSFSSADNLCRKLEDLQQFQKREPENEEEVDILSLSEPVKINIKKEQEEKQEEVKFYLPPTPGSEFIGDVTQKIGITLQPVALHRNVYASVVEDMILKATEQLVNDILRQALAVGYQTASHNRIPKEITVSNIHQAICNIPFLDFLTNKHMGILNEDQ

SEQ ID NO: 52525 - protein, 178 aa, Homo sapiens
  DOMAIN (67)..(85): HISTONE H3 SIGNATURE domain identified by eMATRIX, accession number PR00622D, p-value=4.930e-12, raw score of 12.71
  misc_feature (1)...(178): Xaa = X or * as defined in Table 2
GGLCTMARTKADWPANRTGGKAPRKQLAYKKPASQECGPLTGGVKKPHRYRPGTVGGSVKFRRYQKSTELLIRKLPFQRRLVREIAQGLXNKILRFQSAAIGALQEGKWRPNLVWPFLKDTNLVCXSMAKRVTIIAKKTFQLAPPHTVENRALRIHSWMGKHFISQKKKKNFSSSCYW

SEQ ID NO: 52526 - protein, 113 aa, Homo sapiens
  DOMAIN (64)..(77): BTB (also known as BR-C/Ttk) domain proteins domain identified by eMATRIX, accession number PF00651, p-value=6.211e-11, raw score of 15.00
IKIGILSLETQVLAELVILSHDSVITTMDTASHSLVLLQQLNMQREFGFLCDCTVAIGDVYFKAHRAVLAAFSNYFKMIFIHQTRQQITHLEVIKELEAAGCLCCSLDGLSQG

SEQ ID NO: 52527 - protein, 455 aa, Homo sapiens
  DOMAIN (56)..(69): BTB (also known as BR-C/Ttk) domain proteins domain identified by eMATRIX, accession number PF00651, p-value=6.211e-11, raw score of 15.00
  DOMAIN (29)..(140): BTB/POZ domain identified by PFam, accession name BTB, E- value=2.2e-15, PFam score of 64.6
  misc_feature (1)...(455): Xaa = X or * as defined in Table 2
EPAPPARRSLSAAAAASGTTVDTASHSLVFSQQLNMQREIGFRVNCTVAMXDVYFKAHRAVLAAFSNYFKMIFIHQTSECIKIQPTDIQPDIFSYLLHIMYTGKGPKQIVDHSRLEEGIRFLHADYLSHIATEMNQVFSPETVQSSNLYGIQISTTQKTVVKQGLEVKEAPSSNSGNRAAVQGDLPQLQLSLAIGLDDGTADQQRACPATQALEEHQKPPVSIKQERCDPESVISQSHPSPSSEVTGPTFTENSVKIHLCHYCGERFDSRSNLRQHLHTHVSGSLPFGVPASILESNDLGEVHPLNENSEALECRRLSSFIVKENEQQPDHTNRGTTEPLQISQVSLISKDTEPVELNCNFSFSRKRKMSCTICGHKFPRKSQLLEHMYTHKGKSYRYNRCQRFGNALAQRFQPYCDSWSDVSLKSSRLSQEHLDLPCALESELTQENVDTILVE

SEQ ID NO: 52528 - protein, 193 aa, Homo sapiens
  DOMAIN (46)..(61): HISTONE H3 SIGNATURE domain identified by eMATRIX, accession number PR00622A, p-value=7.652e-17, raw score of 6.52
  misc_feature (1)...(193): Xaa = X or * as defined in Table 2
STARRGKSRSRPAVALQRQPSAASRSPSSSRRRRGVSKEVSVPLARTKQTARKSTNGKAPRKQLAYKKPARKSAPSTGGVKKPHRYRPGYCGRSVKFRRYQKSHXDFXFRKLPFQAVWVRENLLKDFXKQILRFQSRSYRVALQGGQVEALSGVGLFXKTTNLLCXSMPKRVNNYCQKDIPAKHARIPWRTVL

SEQ ID NO: 52529 - protein, 30 aa, Homo sapiens
  DOMAIN (11)..(25): GPCR KINASE SIGNATURE domain identified by eMATRIX, accession number PR00717D, p-value=2.841e-11, raw score of 13.76
RHEDIEQFSTVKGVELEPTDQDFHCPGRPR

SEQ ID NO: 52530 - protein, 62 aa, Homo sapiens
MRPGAGPPGHSRSRRRRRGPRFGEASLAHVVDVELRSPPFISVSTRHSASSPKPPLPGLGIA

SEQ ID NO: 52531 - protein, 44 aa, Homo sapiens
MNGTRSALTGGRSAASLRDDRRPVALPAEEEEDKREEVERLVKE

SEQ ID NO: 52532 - protein, 631 aa, Homo sapiens
  DOMAIN (340)..(371): Protein kinases ATP-binding region proteins domain identified by eMATRIX, accession number BL00107A, p-value=1.000e-19, raw score of 18.39
  DOMAIN (231)..(501): Eukaryotic protein kinase domain identified by PFam, accession name pkinase, E-value=4.4e-67, PFam score of 236.3
  misc_feature (1)...(631): Xaa = X or * as defined in Table 2
RGHCEPSRAAPSRADRHPASALARDPGRRRGPAGQAAPQPMEPENIVANTVLLKAREGGGGNRKGKSKKWRQMLQFPHISQCEELRLSLERDYHSLCERQPIGRLLFXEFCATRPELSRCIAFQDGMAEYEATPDEKRKACGRRLMQNFLSHTGPDLIPEVPRQLVTNCTQRLEQGPCKELSQELTRVTHEYLSVAPFADYLDSIYFNRFLQGKGLEREAITKNTLRQYRVLGKGGFGEVCACQVRATGKMYACKKLEKKRIKKRKGEAMSLNEKQILEKVNSRFVVSLAYGYETKDALCLVLTLMNGGDLKFHIYHMGQAGFPEARAVFYAAEICCGLEDLHRERIVYRDLKPENILLDDHGHIRISDLGLAVHVPEGQTIKGRVGTVGYMAPECLKNERYTFSPDWWALGCLLYEMIAGQSPFQQRKKKIKREEVERLVKEVPEEYSERFSPQARSLCSQLLCKDPAERLGCRGGSAREVKEHPLFKKLNFKRLGAGMLEPPFKPDPQAIYCKDVLDIEQFSTVKGVELEPTDQTFYQKFATGSVPIPGKNEQMVETECFQELNVFGLDGSVPPDLDWKGQPPAPPKKGLLQRLFSSPKDCCGNCSDSEEELPYPPLAPSPRPPPAVGR

SEQ ID NO: 52533 - protein, 100 aa, Homo sapiens
  DOMAIN (70)..(85): G-PROTEIN BETA WD-40 REPEAT SIGNATURE domain identified by eMATRIX, accession number PR00320A, p-value=2.756e-09, raw score of 16.74
PGHPGHCRLRPHRALLAGPQRHLHPDGAAPGLPGECLGGHTGPQHDCCCSYDGVNKNIASVGFHEDGRWMYTGGEDCTARIWDLRSRNLQCQRIFQVNAP

SEQ ID NO: 52534 - protein, 116 aa, Homo sapiens
  DOMAIN (28)..(64): Synapsins proteins domain identified by eMATRIX, accession number BL00415Q, p-value=7.872e-09, raw score of 2.23
CRPGAGRPSPRLGPDTRYVGLQRRVQPVAGTLAPAVARAPRPRWRRPRPPAPRPGLGCPARRPWARGRRPGAGAGRARCSRPCRRPPGWRRAPRGRRSPGAAASRRRQRGSCCCCW

SEQ ID NO: 52535 - protein, 88 aa, Homo sapiens
SSPRPCATCSSPAACSWAPTWTTGFRLRTAASSRVPGVWSEPWRWPPSARPTSSGSPAASFSTACPRNTASTPSAPSWWETAWTQTSS

SEQ ID NO: 52536 - protein, 258 aa, Homo sapiens
  DOMAIN (29)..(44): G-PROTEIN BETA WD-40 REPEAT SIGNATURE domain identified by eMATRIX, accession number PR00320C, p-value=4.900e-09, raw score of 13.01
  misc_feature (1)...(258): Xaa = X or * as defined in Table 2
TPSFSLRTGVNKEHWVLLGFSTEDGRWMFTRGGEDCTARIWDLRSRNLQCQRIFQVNAPINCVCLHPNQAELIVGDQSGAIHIWDLKTDHNEQLIPEPEVSITSAHIDPDASLHGQLFNSTGNCYVWDLTGGIGDEVTQFIPKTKIPAHTRYALQCRFSPDSTLLATCSAXLRRCKIWRTSNFSLMTELSIKSGNPGESSRGWMWGCALIGGTPSNIVTASSNNLARLWCVKTGEIKREYGGHQKAVVCLPFNDSVLG

SEQ ID NO: 52537 - protein, 76 aa, Homo sapiens
MLDEGGDTQTEETQPSETKEVEPEPTEDKDLEADEEDTRKKDASDDLDDLNFFNQKKKKKKTKKIFDIDEAEEGVK

SEQ ID NO: 52538 - protein, 357 aa, Homo sapiens
  DOMAIN (272)..(307): INITIATION FACTOR PROTEIN TRANSLATION BIO domain identified by eMATRIX, accession number PD01485C, p-value=4.724e-32, raw score of 20.40
  DOMAIN (200)..(344): Domain found in IF2B/IF5 domain identified by PFam, accession name eIF5_eIF2B, E-value=7.2e-10, PFam score of 46.2
  misc_feature (1)...(357): Xaa = X or * as defined in Table 2
LPVRAEPTRAAAMSGDEMIFDPTMSKNMKKKKKKPFMLDEEGDTQTEETQPSETKEVEPEPTEDKDLEADEEDTRKKDASDDLDDLNFFNQKKKKKKTKKIFDIDEAEKGVKDLKIXSDVQEPTEPEDDLDIMLGHKKKKKKNVKFPDEDEILEKDEALEDEDNKKDDGISFSNQTGPAWAGSERDYTYEELLNRVFNIMREKNPGYWLPGGRKRKFGPWKPPQVVRVGTKKTFFCPLLQDICKLLHRSAQSISFAFLLGXIGVPSGSIDGXXPNLXSKGRFQQKQIENVLRRYIKEYVTCHTCRSPDTILQKDTRLLFPYSAETCHSRCFCWPVFKTGLPQAVHGQSRGTAPVPKA

SEQ ID NO: 52539 - protein, 90 aa, Homo sapiens
RNYAGRWDVLIQQATQCLNRLIQIAARKKRNYILDQTNVYGSAQRRKMRPFEGFQRKAIVICPTDEDLKDRTIKRTDEEGKDVPDHAVSQ

SEQ ID NO: 52540 - protein, 77 aa, Homo sapiens
  misc_feature (1)...(77): Xaa = X or * as defined in Table 2
LLLYPLRSLPENPLRLVQQIYSFLKGSSEKXNDLPRVPLLELGVGLLPPNQYSCSRAKPCLTCGLTMSLDGAQQGFW

SEQ ID NO: 52541 - protein, 947 aa, Homo sapiens
  DOMAIN (714)..(745): Protein kinases ATP-binding region proteins domain identified by eMATRIX, accession number BL00107A, p-value=7.000e-19, raw score of 18.39
  DOMAIN (590)..(857): Eukaryotic protein kinase domain identified by PFam, accession name pkinase, E-value=1.9e-71, PFam score of 250.8
  misc_feature (1)...(947): Xaa = X or * as defined in Table 2
WAKPVARASPAAVPGRQCQIRGAWSWGEGRGQPGPAPSPAGSPATSEESLAPMAWRCPRMGRVPLAWCLALCGWACMAPKGTQAEESPFVGNPGNITGARGLTGTLRCQLQVQGEPPEVHWLRDGQILELADSTQTQVPLGEDEQDDWIVVSQLRITSLQLSDTGQYQCLVFLGHQTFVSQPGYVGLEGLPYFLEEPEDRTVAANTPFNLSCQAQGPPEPVDLLWLQDAVPLATAPGHGPQRSLHVPGLNKTSSFSCEAHNAKGVTTSRTATITVLPQQPRNLHLVSRQPTELEVAWTPGLSGIYPLTHCTLQAVLSDDGMGIQAGEPDPPEEPLTSQASVPPHQLRLGSLHPHTPYHIRVACTSSQGPSSWTHWLPVETPEGVPLGPPKNISATRNGSQAFVHWQEPRAPLQGTLLGYRLAYQGQDTPEVLMDIGLRQEVTLELQGDGSVSNLTVCVAAYTAAGDGPWSLPVPLEAWRPGEAQPVHQLVKEPSTPAFSWPWWYVLLGAVVAAACVLILALFLVHRRKKETRYGEVFEPTVERGELVVRYRVRKSYSRRTTEATLNSLGISEELKEKLRDVMVDRHKVALGKTLGEGEFGAVMEGQLNQDDSILKVAVKTMKIAICTRSELEDFLSEAVCMKEFDHPNVMRLIGVCFQGSERESFPAPVVILPFMKHGDLHSFLLYSRLGGQPVYLPTQMLVKFMADIASGMEYLSTKRFIHRDLAARNCMLNENMSVCVADFGLSKKIYNGDYYRQGRIAKMPVKWIAIESLADRVYTSKSDVWSFGVTMWEIATRGQTPYPGVENSEIYDYLRQGNRLKQPADCLDGLYALMSRCWELNPQDRPSFTELREDLENTLKALPPAQEPDEILYVNMDEGGGYPEPPGAAGGADPPTQPDPKDSCXLPSLAAEVHPAGRYVLCPSTTPSPAQPADRGSPAAPGQEDGA

SEQ ID NO: 52542 - protein, 179 aa, Homo sapiens
  misc_feature (1)...(179): Xaa = X or * as defined in Table 2
LVFLFDDLGIVELVLPGNIVHGIMSVRPRVAAGLRVRLQPGRRWLRGPLQLGAPLGLDLLVDVPGSPRFVVGVELPLVVEAPRPPTPPAAAQQARSXGLECPGRGAAAPREVLHLQTAHIHGPGPRGGPRARPGLPGLCPPXTFSCQEAKGERGGAHSNGGSGSKWPPPPPPPSLVPRP

SEQ ID NO: 52543 - protein, 995 aa, Homo sapiens
  DOMAIN (823)..(839): Protein kinases ATP-binding region proteins domain identified by eMATRIX, accession number BL00107B, p-value=6.400e-15, raw score of 13.31
  DOMAIN (626)..(906): Eukaryotic protein kinase domain identified by PFam, accession name pkinase, E-value=1.6e-39, PFam score of 144.7
  misc_feature (1)...(995): Xaa = X or * as defined in Table 2
PNPNTCLCNHVESGPCCPSTHTYTLTDLQPLFGVRVPTRPSGRGTQAEESPFVGNPGNITGARGLTGTLRCQLQVQGEPPEVHWLRDGQILELADSTQTQVPLGEDEQDDWIVVSQLRITSLQLSDTGQYQCLVFLGHQTFVSQPGYVGLEGLPYFLEEPEDRTVAANTPFNLSCQAQGPPEPVDLLWLQDAVPLATAPGHGPQRSLHVPGAAVGAWEGGSRLWLRAPEAGRKRWGGEVPPVTHAGAGMLRSERDPAPEPTSSPRASPAGGASSRALTLAGPHVPGLNKTSSFSCEAHNAKGVTTSRTATITVLPQQPRNLHLVSRQPTELEVAWTPGLSGIYPLTHCTLQAVLSNDGMGIQAGEPDPPEEPLTSQASVPPHQLRLGSLHPHTPYHIRVACTSSQGPSSWTHWLPVETPEGVPLGPPENISATRNGSQAFVHWQEPRAPLQGTLLGYRLAYQGQDTPEVLMDIGLRQEVTLELQGDGSVSNLTVCVAAYTAAGDGPWSLPVPLEAWRPGQAQPVHQLVKEPSTPAFSWPWWYVLLGAVVAAACVLILALFLVHRRKKETRYGEVFEPTVERGELVVRYRVRKSYSRRTTEATLNSLGISEELKEKLRDVMVDRHKVALGKTLGEGEFGAVMEGQLNQDDSILKVAVKTMKIAICTRSELEDFLSEAVCMKEFDHPNVMRLIGVCFQGSERESFPAPVVILPFMKHGDLHSFLLYSRLGDQPVYLPTQMLVKFMADIASGMGVSXVPRDFIHRGPGRPGNCIAGMRTCSVCVAGLSGFSKKVYNGDYYRQGHVFAKMPVKWIAIESLADRVYTSKSDVWSFGVTMWEIATRGQTPYPGVENSEIYDYLRQGNRLKQPADCLDGLYALMSRCWELNPQDRPSFTELREDLENTLKALPPAQEPDEILYVNMDEGGDARQPGFTGTADXRIRESGRXTSGCLSGGEGSMVACRAPVPRPGKVXGGQSPGRPGRARGPPRGPGPWMCAV

SEQ ID NO: 52544 - protein, 77 aa, Homo sapiens
  misc_feature (1)...(77): Xaa = X or * as defined in Table 2
SEAGQAQPAAAVGFVWTGRRAWETGEGYYSNSLSMELQLXRQCIXDCFFSSSWRCSVPVYFKEEKYKGNLVCLLFFK

SEQ ID NO: 52545 - protein, 592 aa, Homo sapiens
  DOMAIN (102)..(122): kw OSTEOINDUCTIVE YOPM MEMBRANE OUTER domain identified by eMATRIX, accession number DM01551C, p-value=8.859e-10, raw score of 14.62
  DOMAIN (59)..(295): Leucine Rich Repeat domain identified by PFam, accession name LRR, E-value=4.4e-28, PFam score of 106.7
MISAAWSIFLIGTKIGLFLQVAPLSAMAKSCPSVCRCDAGFIYCNDRFLTSIPTGIPEDATTLYLQNNQINNAGIPSDLKNLLKVERIYLYHNSLDEFPTNLPKYVKELHLQENNIRTITYDSLSKIPYLEELHLDDNSVSAVSIEEGAFRDSNYLRLLFLSRNHLSTIPWGLPRTIEELRLDDNRISTISSPSLQGLTSLKRLVLDGNLLNNHGLGDKVFFNLVNLTELSLVRNSLTAAPVNLPGTNLRKLYLQDNHINRVPPNAFSYLRQLYRLDMSNNNLSNLPQGIFDDLDNITQLILRNNPWYCGCKMKWVRDWLQSLPVKVNVRGLMCQAPEKNWLNVKDSGIVSTIQITTAIPNTVYPAQGQWPAPVTKQPDIKNPKLTKDHQTTGSPSRKTITITVKSVTSDTIHISWKLALPMTALRLSWLKLGHSPAFGSITETIVTGERSEYLVTALEPDSPYKVCMVPMETSNLYLFDETPVCIETETAPLRMYNPTTTLNREQEREPYKNPNLPLAAIIGGAVALVTIALLALCVGMFIGMDRSSQGTVAYSKGRRRKDDYAEAVHLRKDNSYSWEIRETSFSDVTNKQ

SEQ ID NO: 52546 - protein, 56 aa, Homo sapiens
YLGVELVKSAYPFFQIHLSFPSCMWLCGLFLLFYIDFLTSINNYHQITITENFLRK

SEQ ID NO: 52547 - protein, 60 aa, Homo sapiens
  misc_feature (1)...(60): Xaa = X or * as defined in Table 2
PSLFKNIMTFYPNLHFLWCRGRLYLDVWRQVRXFVRNTNYQLPLVLHNLLSRFNTFDELV

SEQ ID NO: 52548 - protein, 159 aa, Homo sapiens
MEYYVAMKKDEFMSFGGTWMKLEAIILSKLTQEQKTKHRMFSLIRLHQGGEIQAQENLMGEAGRRWVFQEREKQTKSSRDFADFGTTIKQDFRLLGQTSVDRLLQLSQGQAVKGNQLLPVSLVKRKTTLAPNTQTASPRALADSLMQLARQVSRLESGQ

SEQ ID NO: 52549 - protein, 138 aa, Homo sapiens
  DOMAIN (49)..(98): kw TRANSCRIPTASE REVERSE II ORF2 domain identified by eMATRIX, accession number DM01354Z, p-value=7.043e-25, raw score of 9.06
  misc_feature (1)...(138): Xaa = X or * as defined in Table 2
WYQHLLLMRASGSFQSWWKVKGEPAYHMANRPXXSLISLRTKAKTGAXLFDYFVPHFIRKNXSLFTIAKAWNHPKCTSVTDWIKKMWYIYTMEYYAVTRRNKIVSFAETXMELEVIIVSKLTQEQKTKHCMFSLTSGS

SEQ ID NO: 52550 - protein, 56 aa, Homo sapiens; identical to SEQ ID NO: 52546

SEQ ID NO: 52551 - protein, 147 aa, Homo sapiens
  misc_feature (1)...(147): Xaa = X or * as defined in Table 2
LVFLTNQRLVSTHQGTWWEXKXCQPVIPSLXFYFLRKFSVIVIWXXLLILPXHPMALKICCCQAACSGHFTAGTGEITRPCSISSKVLKRLSRLXSTSGSXXLVFLTNQRLVSTHQGTWMKLEAIILSKVTQEQKTKHHMLSLRSGS

SEQ ID NO: 52552 - protein, 63 aa, Homo sapiens
CPSMIDWLKKMWHRYTMEYYAAIKKNEIMSFAGTWMKLEAIILSKLTQEQKNKHCMFSLITGS

SEQ ID NO: 52553 - protein, 614 aa, Homo sapiens
  DOMAIN (282)..(332): Sugar transport proteins domain identified by eMATRIX, accession number BL00216B, p-value=5.846e-09, raw score of 27.64
  DOMAIN (181)..(607): Sugar (and other) transporter domain identified by PFam, accession name sugar_tr, E-value=0.0061, PFam score of -110.2
MEEREEVLAVTAAQGSSVLVYRFVCPSSPHWALPVLEMLNTSACKIRTMSLPALRKMNCSRTFKNVSLYHAHITPNPFVVIAEFIFLVLSTISHSSLSFSSLLLTGLAQPERQGYVPQARGIVLDSQEAYPSPGGTTLCMHDPDKQAPGQSGGQLWRVPLCPPGQHHLPSSEKGLWLPPATPECQAWTGTLLLGTCLLYCARSSMPICTVSMSQDFGWNKKEAGIVLSSFFWGYCLTQVVGGHLGDRIGGEKVILLSASAWGSITAVTPLLAHLSSAHLAFMTFSRILMGLLQGVYFPALTSLLSQKVRESERAFTYSIVGAGSQFGTLLTGAVGSLLLEWYGWQSIFYFSGGLTLLWVWYVYRYLLSEKDLILALGVLAQSRPVSRHNRVPWRRLFRKPAVWAAVVSQLSAACSFFILLSWLPTFFEETFPDAKGWIFNVVPWLVAIPASLFSGFLSDHLINQGYRAITVRKLMQGMGLGLSSVFALCLGHTSSFCESVVFASASIGLQTFNHSGISVNIQDLAPSCAGFLFGEDLALPQLCPSLGLRVGVANTAGALAGVVGVCLGGYLMETTGSWTCLFNLVAIISNLGLCTFLVFGQAQRVDLSSTHEDL

SEQ ID NO: 52554 - protein, 460 aa, Homo sapiens
  misc_feature (1)...(460): Xaa = X or * as defined in Table 2
MRFQDRTWQVPYPSQCSWGSSRQGYVPQARGIVLDSQEAYPSPGGTTLCMHDPDKQAPGPVRRPAPGNPNRLVVSVALQFLTFHESGITSALRVRPLPQSVSFQGPGCTEAXRRASICRRRVSXHSTKLDLGAVAAQQQAWVAGPRSPQRRCHQYSXAGPAWLGLQRGRGSHRPDTSPWHWFWALAGREEQVLPPESLLRARTPGTHLAPGPGAXTRVQSGPGSWLTWAGXGTPQVISSPGAGAVGAPETTAVPTVSIAPRRSVEMWPETKEHLVAVARRKWVSAQEKRLSLRGCGSEKMGVSPGETRVYFPALTSRCRRRCGRVSEPSPTASWAPAPSLGWAYQLAGGRLVLRVGLSAGWRAACPQGGPISWLEGGLSSGVGLSAGWRAACPQGGPISWLEGGLSSSTMRQPRAPQSSLPAPAPWGAPDPLAMLAAWIEARPGVWPTQPGPWQVSWVCV

SEQ ID NO: 52555 - protein, 139 aa, Homo sapiens
  DOMAIN (89)..(100): Nuclesosome assembly protein (NAP) domain identified by eMATRIX, accession number PF00956A, p-value=1.000e-13, raw score of 11.88
  DOMAIN (43)..(139): Nucleosome assembly protein (NAP) domain identified by PFam, accession name NAP_family, E-value=1.7e-48, PFam score of 174.5
RHLLAAPPPAPPAAAAAAALSHCLRSSGRLAPHTSRRLPRVVKRRVNALKNLQVKCAQIEAKFYEEVHDLERKYAVLYQPLFDKRFEIINAIYEPTEEECEWKPDEEDEISEELKEKAKIVDEKKDEEKEDPKGIPEFW

SEQ ID NO: 52556 - protein, 134 aa, Homo sapiens
  DOMAIN (97)..(108): Nuclesosome assembly protein (NAP) domain identified by eMATRIX, accession number PF00956A, p-value=1.000e-13, raw score of 11.88
  DOMAIN (51)..(134): Nucleosome assembly protein (NAP) domain identified by PFam, accession name NAP_family, E-value=5.3e-36, PFam score of 132.2
PAAWLPILVAARQLTVQMMQNPQILAALQERLDGLVETPTGYIESLPRVVKRRVNALKNLQVKCAQIEAKFYEEVHDLQRKYAVLYQPLFDKRFEIINAIYEPTEEECEWKPDEEDEISEELKEKAKIEDEKKD

SEQ ID NO: 52557 - protein, 58 aa, Homo sapiens
  DOMAIN (16)..(36): Elongation factor 1 beta/beta'/delta chain proteins domain identified by eMATRIX, accession number BL00824B, p-value=4.652e- 10, raw score of 9.21
  DOMAIN (3)..(15): Nucleosome assembly protein (NAP) domain identified by PFam, accession name NAP_family, E-value=0.00089, PFam score of 17.0
HEPRSVLYFTGEAIEDDDDDYDEYGEEADEEREEEGDEENDPDYDPKKDQNPAECKQQ

SEQ ID NO: 52558 - protein, 50 aa, Homo sapiens
  DOMAIN (6)..(35): Nucleosome assembly protein (NAP) domain identified by PFam, accession name NAP_family, E-value=3.1e-16, PFam score of 61.5
MMLKPILAADFEIGHFLRERIIPRSVLYFTGEAIEDDDDDYDEKSEEADE

SEQ ID NO: 52559 - protein, 45 aa, Homo sapiens
  misc_feature (1)...(45): Xaa = X or * as defined in Table 2
WRVKFKNTVKIQANFXKSRFIHLTVVPVTILSQVTLQLTMSPKTQ

SEQ ID NO: 52560 - protein, 421 aa, Homo sapiens
  DOMAIN (239)..(257): Nuclesosome assembly protein (NAP) domain identified by eMATRIX, accession number PF00956C, p-value=6.850e-22, raw score of 7.72
  DOMAIN (105)..(394): Nucleosome assembly protein (NAP) domain identified by PFam, accession name NAP_family, E-value=1.5e-123, PFam score of 423.8
  misc_feature (1)...(421): Xaa = X or * as defined in Table 2
VTACAAPAAWLPILVADIWSSYNMADIDNKEQSELDQDLDDVEEVEEEETGEETKLKARSAXLFRMMQNPQILAALQERLDGLWVETPTGYIESLPRVVKRRVNALKNLQVKCAQKETQFYEEVHDLERKYAVLYQPLFDKRFEIINAIYEPTEEECEWKPDEEDEISEELKEKGQIEDEKKDEEKEDPKGIPXIWLTVFKNVDLLSDMVQEHDEPILKHLKDIKVKFSDAGQPMSFVLEFHFEPNEYFTNEVLTKTYRMRLEPEPDDSDHFSFDGQEIMGCTGCQIDWKKGKNVTLKTIRKXRRNHKGRGTVRTGHXNQFPNDSFSNFFCPLLKSPESGDLDEDAEAILAADFEIGHFLRERIIPRSVLYFTGEAIEDDDDDYDEEGEEADEEGEEEGDEENDPDYDPKKDQNPAECKQQ

SEQ ID NO: 52561 - protein, 140 aa, Homo sapiens
  misc_feature (1)...(140): Xaa = X or * as defined in Table 2
GCGCGGAAARGSPAPGRPAASPPDCPLWLQGCYPPPSCDALSATEADGCDXIYPPDTSRDGPHQASLPGESSSFPGQPNDSYLPERGSERSRQASYATPAAETQDPDEGLPQPGPEALPGGLQVPKSAAPFCGAQHAAGQ

SEQ ID NO: 52562 - protein, 93 aa, Homo sapiens
  misc_feature (1)...(93): Xaa = X or * as defined in Table 2
SRFEPRVRPTGGDRPHQASPPGDSSSFPGQPNDSRLPECGSECRGQASYATPAAETQDPEXRSSPTRSXSPPGGFQVPKSAAPFCGAQHAAGQ

SEQ ID NO: 52563 - protein, 129 aa, Homo sapiens
  misc_feature (1)...(129): Xaa = X or * as defined in Table 2
FTMPAVALVPKELYLSSSLKDLNKKTEVKPEKISTKQDYVHSILGTANIKKAIEEAERLSESLKLRYKEAEVRKXLEEKDRQKEAQQLQQKRQETGREDGGTLAKVSLENVLDYQDKTQKSNGEKSEKM

SEQ ID NO: 52564 - protein, 483 aa, Homo sapiens
  DOMAIN (374)..(406): Ribosomal protein S19e proteins domain identified by eMATRIX, accession number BL00628A, p-value=6.577e-09, raw score of 21.53
  DOMAIN (164)..(275): Rhodanese-like domain identified by PFam, accession name Rhodanese, E-value=8.3e-06, PFam score of 32.7
MMRAHMFVYKELKQIYKKKTHPHQKVGKGYKQTLLRGRHLRGQETYEKKLTHVYETTDFKQQQYYFHSILGPANIKKATGETERLSESLKLRYEEVEIWKKLEEKDRQGEAQWLQQKRQETGREDGSMLAKGSLEIVLDSKDKTQKSNGEKNEKCETKEKGAITAKELYTMMMDKNISLIIMDAQRMQDYQDSCILHSLSVPEKAISPGVTASWIEAHLPDDSIDTWKKRGNVEYMVLLDWFSSAKDLQIGTTLWHLKDALFKWEKGGYKNWFLCYSQYTTNAKVTPPPQHQNEELSISLDFTYPSLEESIPSKPAAEMPPPPIKVDEDIELISDQISDNDQNERTGPLNISIPVESVAASKSDVSPIIQPVPSIKNVPQIDHTKKLAVKLPEEHIIKSESTNHEQQSPQNEKVIPDCSTKPVVSSPTLMLTDEEKAHIHAETALLMEKNKQEKELQERQQGKQKEKLRREEHEQKAKKKQEA

SEQ ID NO: 52565 - protein, 932 aa, Homo sapiens
  DOMAIN (382)..(435): Clathrin light chain proteins domain identified by eMATRIX, accession number BL00224B, p-value=2.817e-10, raw score of 16.94
  DOMAIN (117)..(240): Rhodanese-like domain identified by PFam, accession name Rhodanese, E-value=1.5e-19, PFam score of 78.4
  misc_feature (1)...(932): Xaa = X or * as defined in Table 2
FIMPAVASVPKELYLSSSLKDLNKKTEVKPEKISTKSYVHSALKIFKTAEECRLDRDEERAYVLYMKYVTVYNLIKKRPDFKQQQADCAYFLGQTVHILFQHRALLEKKYRAVGAITAKELYTMMTDKNISLIIMDARRMQDYQDSCILHSLSVPEEAISPGVTASWIEAHLPDDSKDTWKKRGNVEYVVLLDWFSSAKDLQIGTTLRSLKDALFKWESKTVLRNEPLVLEGGYENWLLCYPQYTTNAKVTPPPRRQNEEVSISLDFTYPSLEESIPSKPAAQTPPASIEVDENIELISGQNERMGPLNISTPVEPVAASKSDVSPIIQPVPSIKNVPQKRWRDRYRRKINSVQKDMGRTYHGTQVFDLCNYWESESGYIHESKEEQKEKLRKEEQEQKAKKKQEAEENEITEKQQKAKEEMEKKESEQAKKEDKETSAKRGKEITGVKRQSKSEHETSDAKKSVEDRGKRCPTPEIQKKSTGDVPHTSVTGDSGSGKPFKIKGQPESGILRTGTFREDTDDTERNKAQREPLTRARSEEMGRIVPGLPSGWAKFLDPITGTFRYYHSPTNTVHMYPPEMAPSSAPPSTPPTHKAKPQIPAERDREPSKLKRSYSSPDITQAIQEEEKRKPTVTPTVNRENKPTCYPKAEISRALSASQISGTLNPCFWEVPGPSSLPGPSRPXGNTLVIXTLNIASPPCNRPPHFGXLFPTRNCYQDDINRSNLLGHKGEVAEEFGIIMKALWTGQYRYISPKDFKITIGKINDQFAGYSQQDSQELLLFLMDGLHEDLNKADNRKRYKEENNDHLDDFKAAEHAWQKHKQLNESIIVALFQGQFKSTVQCLTCHKKSRTFEAFMYLSLPLASTSKCTLQNHYGGLDGGHYTAYCKNAARQRWFKFDDHEVSDISVSSVKSSAAYILFYTSLGPRVTDVAT

SEQ ID NO: 52566 - protein, 1130 aa, Homo sapiens
  DOMAIN (486)..(539): Clathrin light chain proteins domain identified by eMATRIX, accession number BL00224B, p-value=8.962e-10, raw score of 16.94
  DOMAIN (188)..(311): Rhodanese-like domain identified by PFam, accession name Rhodanese, E-value=1.5e-19, PFam score of 78.4
  misc_feature (1)...(1130): Xaa = X or * as defined in Table 2
FIMPAVASVPKELYLSSSLKDLNKKTEVKPEKISTKSYVHSAPRKIFKTAEECRLDRDEERAYVLYMKYVTVYNLIKKRPDFKQQQDYFHSILGPGNIKKAVEEAERLSESLKLRYEEAEVRKKLEEKDRQEEAQRLQQKRQETGREDGGTLAKGSLENVLDSKDKTQKSNGEKNEKCETKEKGAITAKELYTMMTDKNISLIIMDARRMQDYQDSCILHSLSVPEEAISPGVTASWIEAHLPDDSKDTWKKRGNVEYVVLLDWFSSAKDLQIGTTLRSLKDALFKWESKTVLRNEPLVLEGGYENWLLCYPQYTTNAKVTPPPRRQNEEVSISLDFTYPSLEESIPSKPAAQTPPASIEVDENIELISGQNERMGPLNISNSSXTSCCFXIXMFHPIIQPVPSIKNVPQIDRTKKPAVKLPEEHRIKSESTNQSEQSPQSGKVIPDRSTKPVVFSPTLMLTDEEKARIHAETALLMEKNKQEKELRERQQEEQKEKLRKEEQEQKAKKKQEAEENEITEKQQKAKEEMEKKESEQAKKEDKETSAKRGKEITGVKRQSKSEHETSDAKKSVEDRGKRCPTPEIQKKSTGDVPHTSVTGDSGSGKPFKIKGQPESGILRTGTFREDTDDTERNKAQREPLTRARSEEMGRIVPGLPSGWAKFLDPITGTFRYYHSPTNTVHMYPPEMAPSSAPPSTPPTHKAKPQIPAERDREPSKLKRSYSSPDITQAIQEEEKRKPTVTPAVNRENKPTCYPKAEISRLSASQIRNLNPVFGGSGPALTGLRNLGNTCYMNSILQCLCNAPHLADYFNRNCYQDDINRSNLLGHKGEVAEEFGIIMKALWTGQYRYISPKDFKITIGKINDQFAGYSQQDSQELLLFLMDGLHEDLNKADNRKRYKEENNDHLDDFKAAEHAWQKHKQLNESIIVALFQGQFKSTVQCLTCHKKSRTFEAFMYLSLPLASTSKCTLQDCLRLFSKEEKLTDNNRFYCSHCRARRDSLKKIGNLGRLPPVAFRCIWKRFSYDGRWETKITGHLWDFPLGNLGLCSQYVIGPKEQFEGNYNLFSCFQIHYGWGWDGEGHYTAYCKNAARQRWFKFDDHEVSDISVSSVKSSAAYILFYTSLGPRVTDVAT

SEQ ID NO: 52567 - protein, 173 aa, Homo sapiens
  misc_feature (1)...(173): Xaa = X or * as defined in Table 2
LLQGPGFCGDSMPVEARPSAAWRGGRAPGWTPFSPPDRETWKPQRASQGESGQRRFGPCPRSGGRPPGPGSAAHSSRSQRWRKASRAWPAAPRKGLLPPAQAWPPTPAAGLXGFLAACKRPPVGGRGPAPAPCRPASSRCFLICDSGPPCLCSASRAAWMGSAASSRVLFIEG

SEQ ID NO: 52568 - protein, 122 aa, Homo sapiens
PLPRPRRTGYGATGRLCRDRVGREMRTAGRLEGTASAGQAGERRSAGADGAAGPGQQLQAERCERFAAGYIQCMHEVHTFVSTCQAIDATVAAELLNHLLESMPLREGSSFQDLLGDAWRAT

SEQ ID NO: 52569 - protein, 105 aa, Homo sapiens
  misc_feature (1)...(105): Xaa = X or * as defined in Table 2
CQWNTQTQVCYKQDVQSITALGSAAQCTCLSSPRXSGKFKLLFSPGLPGTLVPSTIPATSAPRASHRAGEAWVGEPGRALAALQNSSPDWAGYQGLPCKPSIRAA

SEQ ID NO: 52570 - protein, 219 aa, Homo sapiens
  misc_feature (1)...(219): Xaa = X or * as defined in Table 2
SPSGSNLETHLRAPDLGGPCPPGPRWWAXTPQPGHPQTRPSPAAQPCPFPPQCQQLIHCPCSPAPGTVAAPPAPPTPASQCLLCPWTSAPVCSPAPTFPCPMAPVMAFMLPSYSFPPGTPNLPQAFFPSQPQFPSHPTLTSEMASASQPGSPAGPRSPDSHVLVQPPGPPHHRPWVGPPHRSFSPAAARPCSSTCCSWRKPLRVALEPWGPQGPQRQQL

SEQ ID NO: 52571 - protein, 360 aa, Homo sapiens
  misc_feature (1)...(360): Xaa = X or * as defined in Table 2
GRLGDARGPQGPEAPGGEEAARADSTRACRSCGLLLGGRRGCRPSLKNAELLELTVRRVQCVLRGRAREREQLQAEARRALRCRLHPVACTKVHTFVSTCQAIDATVAAELLNHLLESMPLREGSSFQDLLGDALAGPPRAPGRSGWPAGGAPGSPIPSPPGPGDDLCSDLEEAPEAELSQAPCXGARLGARSPGQPDHSPNCPGVSGGLGDQCQPESCRGGARPSLGSPPLLPGVQMWWGXGPGSLPGSSLPPLMDGLQGQPLVTSPAQRPSPVSXKNFXGPCSSGSGWREGATGRRKNFVELPALSQVSPSPAFNPRLCGLWGQRWQKLVLGTSVPGSPGLNKSLNLPLQRGDERQVH

SEQ ID NO: 52572 - protein, 508 aa, Homo sapiens
  DOMAIN (294)..(312): von Willebrand factor type D domain proteins domain identified by eMATRIX, accession number PF00094B, p-value=1.857e- 14, raw score of 10.43
  DOMAIN (240)..(317): von Willebrand factor type D domain identified by PFam, accession name vwd, E-value=2.7e-16, PFam score of 61.0
MVPAPPLPLGEFGREPTGPGSFWLVSIDYGPISEPVMGQSEIHFFRFSLGGPMKISDGNWLIQPGLNLIHPLQVFEVEQQDNEMVVYAAPRDVRERTWQLDTPLFTLRFFSPQEGIVGVRIEHFQGALNNGPHYPLNILQDVKVTIENTERYAEFKSGNLSARVSKGEFWSLDFLRNGERITGSQVKNNGYVQDTNNQRNYMFERLDLGVGETVYGLGERFTALVRNGQTVETWNRDAAQVNGVDMKLPVVLANGQIRASQHGSDVVIETDFGLRVAYDLVYYVRVTVPGNYYQLMCGLCGNYNGDPKDDFQKPNGSQAGNANEFGNSWEEVVSDSPCLPPPTCPPGSEGCIPSEECPPELEKKYQKEEFCGLLSSPTGPLSSCHKLVDPQGPLKDCIFDLCLGGGNLSILCSNIHAYVSACQVAGGHVEPWRNETFCPMECPQNSHYELCADTCSLGCSALSAPLQCPDGCAEGCQCDSGFLYNGQACVPIQQCGCYHNGAYYEVGT

SEQ ID NO: 52573 - protein, 2957 aa, Homo sapiens
  DOMAIN (901)..(917): AGRIN domain identified by eMATRIX, accession number DM00758, p-value=7.492e-10, raw score of 13.12
  DOMAIN (533)..(2734): von Willebrand factor type D domain identified by PFam, accession name vwd, E-value=4.6e-237, PFam score of 801.0
EDGSLLQEVGIICLARGPGCGPETPLYSPATGLALQLQGPAAMGALWSWWILWAGATLLWGKSGEDWISGPTTVFSQPGLTQEASVDLKNTGREEFLTAFLQNYQLAYSKAYPRLLISSLSESPASVSILSQADNTSKKVTVRPGESVMVNISAKAEMIGSKIFQHAVVIHSDYAISVQALNAKPDTAELTLLRPIQALGTEYFVLTPPGTSARNVKEFAVVAGAAGASVSVTLKGSVTFNGKFYPAGDVLRVTLQPYNVAQLQSSVDLSGSKVTASSPVAVLSGHSCAQKHTTCNHVVEQLLPTSAWGTHYVVPTLASQSRYDLAFVVASQATKLTYNHGGITGSRGLQAGDVVEFEVRPSWPLYLSANVGIQVLLFGTGAIRNEVTYDPYLVLIPDVAAYCPAYVVKSVPGCEGVALVVAQTKAISGLTIDGHAVGAKLTWEAVPGSEFSYAEVELGTADMIHTAEATTNLGLLTFGLAKAIGYATAADCGRTVLSPVEPSCEGMQCAAGQRCQVVGGKAGCVAESTAVCRAQGDPHYTTFDGRRYDMMGTCSYTMVELCSEDDTLPAFSVEAKNEHRGSRRVSYVGLVTVRAYSHSVSLTRGEVGFVLVDNQRSRLPVSLSEGRLRVYQSGPRAVVELVFGLVVTYDWDCQLALSLPARFQDQVCGLCGNYNGDPADDFLTPDGALAPDAVEFASSWKLDDGDYLCEDGCQNNCPACTPGQAQHYEGDRLCGMLTKLDGPFAVCHDTLDPRPFLEQCVYDLCVVGGERLSLCRGLSAYAQACLELGISVGDWRSPANCPLSCPANSRYELCGPACPTSCNGAAAPSNCSGRPCVEGCVCLPGFVASGGACVPASSCGCTFQGLQLAPGQEVWADELCQRRCTCNGATHQVTCRDKQSCPAGERCSVQNGLLGCYPDRFGTCQGSGDPHYVSFDGRRFDFMGTCTYLLVGSCGQNAALPAFRVLVENEHRGSQTVSYTRAVRVEARGVKVAVRREYPGQVLVDDVLQYLPFQAADGQVQVFRQGRDAVVRTDFGLTVTYDWNARVTAKVPSSYAEALCGLCGNFNGDPADDLALRGGGQAANALAFGNSWQEETRPGCGATEPGDCPKLDSLVAQQLQSKNECGILADPKGPFRECHSKLDPQGAVRDCVYDRCLLPGQSGPLCDALATYAAACQAAGATVHPWRSEELCPLSCPPHSHYEACSYGCPLSCGDLPVPGGCGSECHEGCVCDEGFALSGESCLPLASCGCVHQGTYHPPGQTFYPGPGCDSLCHCQEGGLVSCESSSCGPHEACQPSGGSLGCVAVGSSTCQASGDPHYTTFDGRRFDFMGTCVYVLAQTCGTRPGLHRFAVLQENVAWGNGRVSVTRVITVQVANFTLRLEQRQWKVTHFTNINLSDPDNSSVGQTPYSRLIDEETETGRGDFVTPKVTKRVNGVDMKLPVVLANGQIRASQHGSDVVIETDFGLRVAYDLVYYVRVTVPGNYYQQMCGLCGNYNGDPKDDFQKPNGSQAGNANEFGNSWEEVVPDSPCLPPTPCPPGSEDCIPSHKCPPELEKKYQKEEFCGLLSSPTGPLSSCHKLVDPQGPLKDCIFDLCLGGGNLSILCSNIHAYGSDRHPLLAAMECPPNSHYELCADTCSLGCSALSAPPQCQDGCAEGCQCDSGFLYNGQACVPIQQCGCYHNGVYYEPEQTVLIDNCRQQCTCHAGKGMVCQEHSCKPGQVCQPSGGILSCVTKGAELGLGLGLMRLGMEDKDSGAEGGVTGVSMAGDPCHGVTCRPQETCKEQGGQGVCLPNYEATCWLWGDPHYHSFDGRKFDFQGTCNYVLATTGCPGVSTQGLTPFTVTTKNQNRGNPAVSYVRVVTVAALGTNISIHKDEIGKVRVNGVLTALPVSVADGRISVTQGASKALLVADFGLQVSYDWNWRVDVTLPSSYHGAVCGLCGNMDRNPNNDQVFPNGTLAPSIPIWGGSWRAPGWDPLCWDECRGSCPTCPEDRLEQYEGPGFCGPLAPGTGGPFTTCHAHVPPESFFKGCVLDVCMGGGDRDILCKALASYVAACQAAGVVIEDWRAQVGCEITCPENSHYEVCGSPCPASCPSPAPLTTPAVCEGPCVEGCQCDAGFVLSADRCVPLNNGCGCWANGTYHEAGSEFWADGTCSQWCRCGPGGGSLVCTPASCGLGEVCGLLPSGQHGCQPVSTAECQAWGDPHYVTLDGHRFNFQGTCEYLLSAPCHGPPLGAENFTVTVANEHRGSQAVSYTRSVTLQIYNHSLTLSARWPRKLQVDGVFVTLPFQLDSLLHAHLSGADVVVTTTSGLSLAFDGDSFVRLRVPAAYAGSLCGLCGNYNQDPADDLKAVGGKPAGWQVGGAQGCGECVSKPCPSPCTPEQQESFGGPDACGVISATDGPLAPCHGLVPPAQYFQGCLLDACQVQGHPGGLCPAVATYVAACQAAGAQLREWRRPDFCPFQCPAHSHYELCGDSCPGSCPSLSAPEGCESACREGCVCDAGFVLSGDTCVPVGQCGCLHDDRYYPLGQTFYPGPGCDSLCRCREGGEVSCEPSSCGPHETCRPSGGSLGCVAVGSTTCQASGDPHYTTFDGRRFDFMGTCVYVLAQTCGTRPGLHRFAVLQENVAWGNGRVSVTRVITVQVANFTLRLEQRQWKVTVNGVDMKLPVVLANGQIRASQHGSDVVIETDFGLRVAYDLVYYVRVTVPGNYYQLMCGLCGNYNGDPKDDFQKPNGSQAGNANEFGNSWEEVVPDSPCLPPPTCPPGSEGCIPSEECPPELEKKYQKEEFCGLLSSPTGPLSSCHKLVDPQGPLKDCIFDLCLGGGNLSILCSNIHAYGSDRHPLLAAMECPQNSHYELCADTCSLGCSALSAPLQCPDGCAEGCQCDSGFLYNGQACVPIQQCGCYHNGAYYEPEQTVLIDNCRQQCTCHVGKVVVCQEHSCKPGQVCQPSGGILSCVNK

SEQ ID NO: 52574 - protein, 735 aa, Homo sapiens
  DOMAIN (310)..(328): von Willebrand factor type D domain proteins domain identified by eMATRIX, accession number PF00094B, p-value=2.957e- 18, raw score of 10.43
  DOMAIN (186)..(727): von Willebrand factor type D domain identified by PFam, accession name vwd, E-value=2.7e-48, PFam score of 172.5
ISATDGPLAPCHGLVPPAQYFQGCLLDACQVQGHPGGLCPAVATYVAACQAAGAQLGEWRRPDFCPLQCPAHSHYELCGDSCPVSCPSLSAPEGCESACREGCVCDAGFVLSGDTCVPVGQCGCLHDGRYYPLGEVFYPGPECERRCECGPGGHVTCQEGAACGPHEECRLEDGVQACHATGCGRCLANGGIHYITLDGRVYDLHGSCSYVLAQVCHPKPGDEDFSIVLEKNAAGDLQRLLVTVAGQVVSLAQGQQVTVDGEAVALPVAVGRVRVTAEGRNMVLQTTKGLRLLFDGDAHLLMSIPSPFRGRLCGLCGNFNGNWSDDFVLPNGSAASSVETFGAAWRAPGSSKGCGEGCGPQGCPVCLAEETAPYESNEACGQLRNPQGPFATCQAVLSPSEYFRQCVYDLCAQKGDKAFLCRSLAAYTAACQAAGVAVKPWRTDSFCPLHCPAHSHYSICTRTCQGSCAALSGLTGCTTRCFEGCECDDRFLLSQGVCIPVQDCGCTHNGRYLPVNSSLLTSDCSERCSCSSSSGLTCQAAGCPPGRVCEVKAEARNCWATRGLCVLSVGANLTTFDGARGATTSPGVYELSSRCPGLQNTIPWYRVVAEVQICHGKTEAVGQVHIFFQDGMVTLTPNKGVWVNGLRVDLPAEKLASVSVSRTPDGSLLVRQKAGVQVWLGANGKVAVIVSNDHAGKLCGACGNFDGDQTNDWHDSQEKPAMEKWRAQDFSPCYG

SEQ ID NO: 52575 - protein, 7337 aa, Homo sapiens
  DOMAIN (1804)..(1822): von Willebrand factor type D domain proteins domain identified by eMATRIX, accession number PF00094B, p-value=2.957e- 18, raw score of 10.43
  DOMAIN (125)..(7337): von Willebrand factor type D domain identified by PFam, accession name vwd, E-value=0, PFam score of 2372.5
  misc_feature (1)...(7337): Xaa = X or * as defined in Table 2
ITCPENSHYEVCGPPCPASCPSPAPLTTPAVCEGPCVEGCQCDAGFVLSADRCVPLNNGCGCWANGTYHEAGSEFWADGTCSQWCRCGPGGGSLVCTPASCGLGEVCGLLPSGQHGCQPVSTAECQAWGDPHYVTLDGHRFDFQGTCEYLLSAPCHGPPLGAENFTVTVANEHRGSQAVSYTRSVTLQIYNHSLTLSARWPRKLQVDGVFVTLPFQLDSLLHAHLSGADVVVTTTSGLSLAFDGDSFVRLRVPAAYAGSLCGLCGNYNQDPADDLKAVGGKPAGWQVGGAQGCGECVSKPCPSPCTPEQQESFGGPDACGVISATDGPLAPCHGLVPPAQYFQGCLLDACQVQGHPGGLCPAVATYVAACQAAGAQLREWRRPDFCPFQCPAHSHYELCGDSCPGSCPSLSAPEGCESACREGCVCDAGFVLSGDTCVPVGQCGCLHDDRYYPLGQTFYPGPGCDSLCRCREGGEVSCEPSSCGPHETCRPSGGSLGCVAVGSTTCQASGDPHYTTFDGHRFDFMGTCVYVLAQTCGTRPGLHRFAVLQENVAWGNGRVSVTRVITVQVANFTLRLEQRQWKVTVNGVDMKLPVVLANGQIRASQHGSDVVIETDFGLRVAYDLVYYVRVTVPGNYYQLMCGLCGNYNGDPKDDFQKPNGSQAGNANEFGNSWEEVVPDSPCLPPPTCPPGSAGCIPSDKCPPELEKKYQKEEFCGLLSSPTGPLSSCHKLVDPQGPLKDCIFDLCLGGGNLSILCSNIHAYVSACQAAGGHVEPWRNETFCPMECPQNSHYELCADTCSLGCSALSAPLQCPDGCAEGCQCDSGFLYNGQACVPIQQCGCYHNGVYYEPEQTVLIDNCRQQCTCHVGKVVVCQEHSCKPGQVCQPSGGILSCVTKDPCHGVTCRPQETCKEQGGQGVCLPNYEATCWLWGDPHYHSFDGRKFDFQGTCNYVLATTGCPGVSTQGLTPFTVTTKNQNRGNPAVSYVRVVTVAALGTNISIHKDEIGKVRVNGVLTALPVSVADGRISVTQGASKALLVADFGLQVSYDWNWRVDVTLPSSYHGAVCGLCGNMDRNPNNDQVFPNGTLAPSIPIWGGSWRAPGWDPLCWDECRGSCPTCPEDRLEQYEGPGFCGPLAPGTGGPFTTCHAHVPPESFFKGCVLDVCMGGGDRDILCKALASYVAACQAAGVVIEDWRAQVGCEITCPENSHYEVCGPPCPASCPSPAPLTTPAVCEGPCVEGCQCDAGFVLSADRCVPLNNGCGCWANGTYHEAGTVGWVKCVPPAIRPARCQPVSTAECQAWGDPHYVTLDGHRFDFQGTCEYLLSAPCHGPPLGAENFTVTVANEHRGSQAVSYTRSVTLQIYNHSLTLSARWPRKLQVDGVFVALPFQLDSLLHAHLSGADVVVTTTSGLSLAFDGDSFVRLRVPAAYAASLCGLCGNYNQDPADDLKAVGGKPAGWQVGGAQGCGECVSKPCPSPCTPEQQESFGGPDACGVISATDGPLAPCHGLVPPAQYFQGCLLDACQVQGHPGGLCPAVATYVAACQAAGAQLGEWRRPDFCPLQCPAHSHYELCGDSCPVSCPSLSAPEGCESACREGCVCDAGFVLSGDTCVPVGQCGCLHDGRYYPLGEVFYPGPECERRCECGPGGHVTCQEGAACGPHEECRLEDGVQACHATGCGRCLANGGIHYITLDGRVYDLHGSCSYVLAQVCHPKPGDEDFSIVLEKNAAGDLQRLLVTVAGQVVSLAQGQQVTVDGEAVALPVAVGRVRVTAEGRNMVLQTTKGLRLLFDGDAHLLMSIPSPFRGRLCGLCGNFNGNWSDDFVLPNGSAASRCGDLRGCMAGARLLQGLWRGLRAPKAAQCAWQRRLHPMRATRPCGQLRNHQGPFATCQAVLSPSEYFRQCVYDLCAQKGDKAFLCRSLTAYSPACQAAGVSVKPWSKDKFCPLHCPAHSHYSICTRTCQGSCAALSGLTGCTTRCFEGCECDDRFLLSQGVCIPVQDCGCTHNGRYLPNARDVRVGSPPVVSLMGRTLSPHNRERQSLFTNCGRSASAKGVKSWSAMKTTVNRGRLYLLDHNYSLCHCGVKAAVAYVSEDDPCHGVTCRPQETCKEQGGQGVCLPNYEATCWLWGDPHYHSFDGRKFDFQGTCNYVLATTGCPGVSTQGLTPFTVTTKNQNRGNPAVSYVRVVTVAALGTNISIHKDEIGKVRVNGVLTALPVSVADGRISVAQGASKALLVADFGLQVSYDWNWRVDVTLPSSYHGAVCGLCGNMDRNPNNDQVFPNGTLAPSIPIWGGSWRAPGWDPLCWDECRGSCPTCPEDRLEQYEGPGFCGPLSSGTGGPFTTCHAHVPPESFFKGCVLDVCMGGGDRDILCKALASYVAACQAAGVVIEDWRAQVGCEITCPENSHYEVCGPPCPASCPSPAPLTTPAVCEGPCVEGCQCDAGFVLSADRCVPLNNGCGCWANGTYHEAGSEFWADGTCSQWCRCGPGGGSLVCTPASCGLGEVCGLLPSGQHGCQPVSTAECQAWGDPHYVTLDGHRFDFQGTCEYLLSAPCHGPPLGAENFTVTVANEHRGSQAVSYTRSVTLQIYNHSLTLSARWPRKLQVDGVFVTLPFQLDSLLHAHLSGADVVVTTTSGLSLAFDGDSFVRLRVPAAYAGSLCGLCGNYNQDPADDLKAVGGKPAGWQVGGAQGCGECVSKPCPSPCTPEQQESFGGPDACGVISATDGPLAPCHGLVPPAQYFQGCLLDACQVQGHPGGLCPAVATYVAACQAAGAQLREWRRPDFCPFQCPAHSHYELCGDSCPGSCPSLSAPEGCESACREGCVCDAGFVLSGDTCVPVGQCGCLHDDRYYPLGQTFYPGPGCDSLCRCREGGEVSCEPSSCGPHETCRPSGGSLGCVAVGSTTCQASGDPHYTTFDGHRFDFMGTCVYVLAQTCGTRPGLHRFAVLQENVAWGNGRVSVTRVITVQVANFTLRLEQRQWKVTVNGVDMKLPVVLANGQIRASQHGSDVVIETDFGLRVAYDLVYYVRVTVPGNYYQLMCGLCGNYNGDPKDDFQKPNGSQAGNANEFGNSWEEVVPDSPCLPPPTCPPGSAGCIPSDKCPPELEKKYQKEEFCGLLSSPTGPLSSCHKLVDPQGPLKDCIFDLCLGGGNLSILCSNIHAYVSACQAAGGHVEPWRNETFCPMECPQNSHYELCADTCSLGCSALSAPLQCPDGCAEGCQCDSGFLYNGQACVPIQQCGCYHNGVYYEPEQTVLIDNCRQQCTCHVGKVVVCQEHSCKPGQVCQPSGGILSCVTKDPCHGVTCRPQETCKEQGGQGVCLPNYEATCWLWGDPHYHSFDGRKFDFQGTCNYVLATTGCPGVSTQGLTPFTVTTKNQNRGNPAVSYVRVVTVAALGTNISIHKDEIGKVRVNGVLTALPVSVADGRISVTQGASKALLVADFGLQVSYDWNWRVDVTLPSSYHGAVCGLCGNMDRNPNNDQVFPNGTLAPSIPIWGGSWRAPGWDPLCWDECRGSCPTCPEDRLEQYEGPGFCGPLAPGTGGPFTTCHAHVPPESFFKGCVLDVCMGGGDRDILCKALASYVAACQAAGVVIEDWRAQVGCEITCPENSHYEVCGPPCPASCPSPAPLTTPAVCEGPCVEGCQCDAGFVLSADRCVPLNNGCGCWANGTYHEAGSCGLGEVCGLLPSGQHGCQPVSTAECQAWGDPHYVTLDGHRFDFQGTCEYLLSAPCHGPPLGAENFTVTVANEHRGSQAVSYTRSVTLQIYNHSLTLSARWPRKLQVDGVFVALPFQLDSLLHAHLSGADVVVTTTSGLSLAFDGDSFVRLRVPAAYAASLCGLCGNYNQDPADDLKAVGGKPAGWQVGGAQGCGECVSKPCPSPCTPEQQESFGGPDACGVISATDGPLAPCHGLVPPAQYFQGCLLDACQVQGHPGGLCPAVATYVAACQAAGAQLGEWRRPDFCPLQCPAHSHYELCGDSCPVSCPSLSAPEGCESACREGCVCDAGFVLSGDTCVPVGQCGCLHDGRYYPLGEVFYPGPECERRCECGPGGHVTCQEGAACGPHEECRLEDGVQACHATGCGRCLANGGIHYITLDGRVYDLHGSCSYVLAQVCHPKPGDEDFSIVLEKNAAGDLQRLLVTVAGQVVSLAQGQQVTVDGEAVALPVAVGRVRVTAEGRNMVLQTTKGLRLLFDGDAHLLMSIPSPFRGRLCGLCGNFNGNWSDDFVLPNGSAASRCGDFGAAWRAPGSSKGCGEGCGPPGCPVCLAEETAPYESNEACGQLRNHQGPFATCQAVLSPSEYFRQCVYDLCAQKGDKAFLCRSLTAYSPACQAAGVSVKPWSKDKFCPLHCPAHSHYSICTRTCQGSCAALSGLTGCTTRCFEGCECDDRFLLSQGVCIPVQDCGCTHNGRYLPNARDVRVGSPPVVSLMGRTLSPHNRERQSLFTNCRAQCQCQGGKVVECHENNCQPGQAIPSGSQLLTLPLWCESSRSLCKXRDPCHGVTCRPQETCKEQGGQGVCLPNYEATCWLWGDPHYHSFDGRKFDFQGTCNYVLATTGCPGVSTQGLTPFTVTTKNQNRGNPAVSYVRVVTVAALGTNISIHKDEIGKVRVNGVLTALPVSVADGRISVAQGASKALLVADFGLQVSYDWNWRVDVTLPSSYHGAVCGLCGNMDRNPNNDQVFPNGTLAPSIPIWGGSWRAPGWDPLCWDECRGSCPTCPEDRLEQYEGPGFCGPLSSGTGGPFTTCHAHVPPESFFKGCVLDVCMGGGDRDILCKALASYVAACQAAGVVIEDWRAQVGCEITCPENSHYEVCGPPCPASCPSPAPLTTPAVCEGPCVEGCQCDAGFVLSADRCVPLNNGCGCWANGTYHEAGSEFWADGTCSQWCRCGPGGGSLVCTPASCGLGEVCGLLPSGQHGCQPVSTAECQAWGDPHYVTLDGHRFDFQGTCEYLLSAPCHGPPLGAENFTVTVANEHRGSQAVSYTRSVTLQIYNHSLTLSARWPRKLQVDGVFVTLPFQLDSLLHAHLSGADVVVTTTSGLSLAFDGDSFVRLRVPAAYAGSLCGLCGNYNQDPADDLKAVGGKPAGWQVGGAQGCGECVSKPCPSPCTPEQQESFGGPDACGVISATDGPLAPCHGLVPPAQYFQGCLLDACQVQGHPGGLCPAVATYVAACQAAGAQLREWRRPDFCPFQCPAHSHYELCGDSCPGSCPSLSAPEGCESACREGCVCDAGFVLSGDTCVPVGQCGCLHDDRYYPLGQTFYPGPGCDSLCRCREGGEVSCEPSSCGPHETCRPSGGSLGCVAVGSTTCQASGDPHYTTFDGHRFDFMGTCVYVLAQTCGTRPGLHRFAVLQENVAWGNGRVSVTRVITVQVANFTLRLEQRQWKVTVNGVDMKLPVVLANGQIRASQHGSDVVIETDFGLRVAYDLVYYVRVTVPGNYYQLMCGLCGNYNGDPKDDFQKPNGSQAGNANEFGNSWEEVVPDSPCLPPPTCPPGSAGCIPSDKCPPELEKKYQKEEFCGLLSSPTGPLSSCHKLVDPQGPLKDCIFDLCLGGGNLSILCSNIHAYVSACQAAGGHVEPWRNETFCPMECPQNSHYELCADTCSLGCSALSAPLQCPDGCAEGCQCDSGFLYNGQACVPIQQCGCYHNGVYYEPEQTVLIDNCRQQCTCHVGKVVVCQEHSCKPGQVCQPSGGILSCVTKDPCHGVTCRPQETCKEQGGQGVCLPNYEATCWLWGDPHYHSFDGRKFDFQGTCNYVLATTGCPGVSTQGLTPFTVTTKNQNRGNPAVSYVRVVTVAALGTNISIHKDEIGKVRVNGVLTALPVSVADGRISVTQGASKALLVADFGLQVSYDWNWRVDVTLPSSYHGAVCGLCGNMDRNPNNDQVFPNGTLAPSIPIWGGSWRAPGWDPLCWDECRGSCPTCPEDRLEQYEGPGFCGPLAPGTGGPFTTCHAHVPPESFFKGCVLDVCMGGGDRDILCKALASYVAACQAAGVVIEDWRAQVGCEITCPENSHYEVCGPPCPASCPSPAPLTTPAVCEGPCVEGCQCDAGFVLSADRCVPLNNGCGCWANGTYHEAGTVGWVKCVPPAIRPARCQPVSTAECQAWGDPHYVTLDGHRFDFQGTCEYLLSAPCHGPPLGAENFTVTVANEHRGSQAVSYTRSVTLQIYNHSLTLSARWPRKLQVDGVFVALPFQLDSLLHAHLSGADVVVTTTSGLSLAFDGDSFVRLRVPAAYAASLCGLCGNYNQDPADDLKAVGGKPAGWQVGGAQGCGECVSKPCPSPCTPEQQESFGGPDACGVISATDGPLAPCHGLVPPAQYFQGCLLDACQVQGHPGGLCPAVATYVAACQAAGAQLGEWRRPDFCPLQCPAHSHYELCGDSCPVSCPSLSAPEGCESACREGCVCDAGFVLSGDTCVPVGQCGCLHDGRYYPLGEVFYPGPECERRCECGPGGHVTCQEGAACGPHEECRLEDGVQACHATGCGRCLANGGIHYITLDGRVYDLHGSCSYVLAQVCHPKPGDEDFSIVLEKNAAGDLQRLLVTVAGQVVSLAQGQQVTVDGEAVALPVAVGRVRVTAEGRNMVLQTTKGLRLLFDGDAHLLMSIPSPFRGRLCGLCGNFNGNWSDDFVLPNGSAASRCGDLRGCMAGARLLQGLWRGLRAPKAAQCAWQRRLHPMRATRPCGQLRNHQGPFATCQAVLSPSEYFRQCVYDLCAQKGDKAFLCRSLTAYSPACQAAGVSVKPWSKDKFCPLHCPAHSHYSICTRTCQGSCAALSGLTGCTTRCFEGCECDDRFLLSQGVCIPVQDCGCTHNGRYLPNARDVRVGSPPVVSLMGRTLSPHNRERQSLFTNCGRSASAKGVKSWSAMKTTVNRGRLYLLDHNYSLCHCGVKAAVAYVSEDDPCHGVTCRPQETCKEQGGQGVCLPNYEATCWLWGDPHYHSFDGRKFDFQGTCNYVLATTGCPGVSTQGLTPFTVTTKNQNRGNPAVSYVRVVTVAALGTNISIHKDEIGKVRVNGVLTALPVSVADGRISVAQGASKALLVADFGLQVSYDWNWRVDVTLPSSYHGAVCGLCGNMDRNPNNDQVFPNGTLAPSIPIWGGSWRAPGWDPLCWDECRGSCPTCPEDRLEQYEGPGFCGPLSSGTGGPFTTCHAHVPPESFFKGCVLDVCMGGGDRDILCKALASYVAACQAAGVVIEDWRAQVGCEITCPENSHYEVCGPPCPASCPSPAPLTTPAVCEGPCVEGCQCDAGFVLSADRCVPLNNGCGCWANGTYHEAGSEFWADGTCSQWCRCGPGGGSLVCTPASCGLGEVCGLLPSGQHGCQPVSTAECQAWGDPHYVTLDGHRFDFQGTCRQ

SEQ ID NO: 52576 - protein, 189 aa, Homo sapiens
  DOMAIN (144)..(165): RAB GDI PROTEIN SIGNATURE domain identified by eMATRIX, accession number PR00892I, p-value=4.732e-20, raw score of 12.78
  misc_feature (1)...(189): Xaa = X or * as defined in Table 2
HCYMVVQLWKPRSLRRKSDQLWSSWNQLNTSELSSFISAEMQTEAFDCGSMAGRMXGQGRYLLAALWDSSVPLSXPQAEPWSGVGPAHLTELLSPSRFVSISDLLAPKDLGTESQVSMEVXKDMGRFHWEDIPPXAXVFVIFVFQIFISRTYDATTHFETTCDDIKNLLXRXQGRYLLAALWDSSVPLS

SEQ ID NO: 52577 - protein, 68 aa, Homo sapiens
  DOMAIN (20)..(38): RAB GDI/REP PROTEIN FAMILY SIGNATURE domain identified by eMATRIX, accession number PR00891F, p-value=2.350e-20, raw score of 9.88
  misc_feature (1)...(68): Xaa = X or * as defined in Table 2
LSSSYLDQPCYETINRIKLYSESLARYGKSPYLYPLYGLGELPQGFARXEPVFKTSVIQNLIFNIMCI

SEQ ID NO: 52578 - protein, 151 aa, Homo sapiens
LKPLMTCMTPAWHEGTFEGIDPKKTTMRDVYKKFDLGQDVIDFTGHALAQPHCRGAGREHGMGPCGRAQPLSKLSPGPKCWVEQMHRWTWHTQLSLKHPLEKPVGRLLRFVNCHLAVSQFLKSLRSLRIKSVGEPNWSMGSLRNFGQIPAL

SEQ ID NO: 52579 - protein, 510 aa, Homo sapiens
  DOMAIN (464)..(485): RAB GDI PROTEIN SIGNATURE domain identified by eMATRIX, accession number PR00892I, p-value=8.200e-22, raw score of 12.78
  DOMAIN (59)..(510): GDP dissociation inhibitor domain identified by PFam, accession name GDI, E-value=3.9e-228, PFam score of 771.3
  misc_feature (1)...(510): Xaa = X or * as defined in Table 2
FVFPSEVAVGLALSPASIFLSFSSPFLRAQERLPSLLWWARSPCAFSLLGSCVRACPAMNEEYDVIVLGTGLTECILSGIMSVNGKKVLHMDRNPYYGGESASITALEDLYKRFKIPGSPPRVKWGEERDWNVDLIPKFLKANGQLVKMLLYTEVTRYLDFKVTEGSFVYKGGKIYKVPSTEAEALASSLMGLFEKRRFKEFLVYVANFDEKDPRTFEGIDPKKTTMRDVYKKFDLGQDVIDFTGHALALYRTDDYLDQPCYETINRIKLYSESLARYGKSPYLYPLYGLGELPQGFARLRCYLWEGTYMLNKPIEEIIVQEWGKVIGCKIXREEIARCMQLICDPSYVKDRVEKVGQVITVICIPQPPPSKNTNDANSCQIIIPQNQVNRKSDIYVCMISFAHNVAAQGKSIAIVSTTVETKEPEKEIRPALELLEPIGTEILVSISDLLVPKDLGTESQIFISRTYDATTHFETTSDDIKNIYKRMTGSEFDFEEMKRKKNGHLWGED

SEQ ID NO: 52580 - protein, 117 aa, Homo sapiens
HLIVAMPEPTKKEENEVPAPAPPPEEPSKEKEAGTTPAKDEEEVSPPSALPPGLGSRALERKDSDWTLVETPPGEEQAKQNANSQLSILFIEKPQGGAEIANIAQPGGNSLGRAPIM

SEQ ID NO: 52581 - protein, 25 aa, Homo sapiens
HLIVAMPEPTKKEGKTYLEIFLLYS

SEQ ID NO: 52582 - protein, 84 aa, Homo sapiens
FFTFADSVYFHPIQNRYIFEHKGCQRILFINNCQMTDDSEYYVTAGDEKCSTELFVRGKNEISYCGHQELLASSPRDNDQSESN

SEQ ID NO: 52583 - protein, 1149 aa, Homo sapiens
  DOMAIN (1009)..(1024): FIBRONECTIN TYPE III REPEAT SIGNATURE domain identified by eMATRIX, accession number PR00014D, p-value=5.500e-09, raw score of 12.04
  DOMAIN (625)..(1028): Fibronectin type III domain identified by PFam, accession name fn3, E-value=1.1e-48, PFam score of 175.1
HLIVAMPEPTKKEENEVPAPAPPPEEPSKEKEAGTTPAKDWTLVETPPGEEQAKQNANSQLSILFIEKPQGGTVKVGEDITFIAKVKAEDLSEKPTIKWFKGKWMDLASKAGKHLQLKETFERHSRVYTFEMQIIKAKDNFAGNYRCEVTYKDKFDSCSFDLEVHESTGTTPNIDIRSAFKRSGEGQEDAGELDFSGLLKRREVKQQEEEPQVDVWELLKNTKPSEYEKIAFQYGITDLRGMLKRLKRSIREEKKSAAFAKILDPVYQVDKGGRVRFVVELADPKLEVKWNKNGQELRPSTKYIFEDTRCQSILNIDNCQMTDDSEYYVTAGDEKCSTELLVREPPIMVTKQLEDTTDYCGERVELECEVSEDDAQVKWFKNGEEIILVQTRYRIRVEGKKHILIIEGATKADAADYSVMTTGGQSSAKLSVDLKPLKILTPLTDQTVNLGKEICLKCEISENIPGKWTKNGLPVQESDRLKVVHKGRIHKLVIDHALTEDEGDYVFAPDAYNVTLPAKVHVIDPPKIILDGLDADNTVTVIAGNKLRLEIPISGEPPPKAMWSRGDKAIMEGSGRIRTESYPDSSTLVIDIAERDDSGVYHINLKNEAGEAHASIKVKVVDFPDPPVAPTVTEVGDDWCIMNWEPPAYDGGSPILGYFIERKKKQSSRWMRLNFDLCKETTFEPKKMIEGVAYEVRIFAVNAIGISKPSMPSRPFVPLAVTSPPTLLTVDSVTDTTVTMRWRPPDHIGAAGLDGYVLEYCFEGSTSAKQSDENGEAAYDLPAEDWIVANKDLIDKTKFTITGLPTDAKIFVRVKAVNAAGASEPKYYSQPILVKEIIEPPKIRIPRHLKANLLSAELGEAVQSGLLPFQGKPRTRILTWRRKGGLQEFDKDQINIRNSETDTIIFIRKAERSHSGKYDLQVKVDKFVETASIDIRIIDRPGPPQIVKIEDVWGRNVALTWTPPKDDGNAAITGYTIQKADKKSMEWLRVIEHYHRTSATTELVIGNEYYFRVFSENMCGLSEDATMTKESAVIARDGKIYKNPVYEDFDFSEAPMFTQPLVNRLCHSGYMATLNCSVRGNPKPKITWMKNKVAIVDDPRYRMFSNLGVCTLEIGKPSPYDGGTYCCKAVNDLGTVEIECKLEVKVIAQ

SEQ ID NO: 52584 - protein, 97 aa, Homo sapiens
  DOMAIN (2)..(54): Immunoglobulin domain identified by PFam, accession name ig, E-value=0.0079, PFam score of 14.2
TWVRGNPKPKITWMKNKVAIVDDPRYRMFSNQGVCTLEIRKPSPYDGGTYCCKAVNDLGTVEIECKLEVKVIYQGVNTPGQPVFLEGQQQSLHNKDF

SEQ ID NO: 52585 - protein, 1137 aa, Homo sapiens
  DOMAIN (77)..(917): Immunoglobulin domain identified by PFam, accession name ig, E-value=2.7e-14, PFam score of 51.1
  misc_feature (1)...(1137): Xaa = X or * as defined in Table 2
HLIVAMPEPTKKEENEVPAPAPPPEEPSKEKEAGTTPAKDWTLVETPPGEEQAKQNANSQLSILFIEKPQGGTVKVGEDITFIAKVKAEDLLRKPTIKWFKGKWMDLASKAGKHLQLKETFERHSRVYTFEMQIIKAKDNFAGNYRCEVTYKDKFDSCSFDLEVHESTGTTPNIDIRSAFKRSGEGQEDAGELDFSGLLKRREVKQQEEEPQVDVWELLKNAKPSEYEKIAFQYGITDLRGMLKRLKRMRREEKKSAAFAKILDPAYQVDKGGRVRFVVELADPKLEVKWYKNGQEIRPSTKYIFEHKGCQRILFINNCQMTDDSEYYVTAGDEKCSTELFVREPPIMVTKQLEDTTAYCGERVELECEVSEDDANVKWFKNGEEIIPGPKSRYRIRVEGKKHILIIEGATKADAAEYSVMTTGGQSSAKLSVDLKPLKILTPLTDQTVNLGKEICLKCEISENIPGKWTKNGLPVQESDRLKVVHKGRIHKLVIANALTEDEGDYVFAPDAYNVTLPAKVHVIDPPKIILDGLDADNTVTVIAGNKLRLEIPISGEPPPKAMWSRGDKAIMEGSGRIRTESYPDSSTLVIDIAERDDSGVYHINLKNEAGEAHASIKVKVVDFPDPPVAPTVTEVGDDWCIMNWEPPAYDGGSPILGYFIERKKKQSSRWMRLNFDLCKETTFEPKKMIEGVAYEVRIFAVNAIGISKPSMPSRPFVPLAVTSPPTLLTVDSVTDTDCPRMRWRPPDHIGAAGLDGYVLEYCFEGTEDWIVANKDLIDKTKFTITGLPTDAKIFVRVKAVNAAGASEPKYYSQPILVKEIIEPPKIRIPRHLKQTYIRRVGEAVNLVIPFQGKPRPELTWKKDGAEIDKNQINIRNSETDTIIFIRKAERSHSGKYDLQVKVDKFGGDPHQLDIQIIDRPGPPQIGGRFEDVWGRKLSLSHWTPPKDDGNAAITGYTIQKADKKSMGWVYWFIEHYHRTSGTITELVIGNEYYFRVFSENMCGPPVRMPTMTKESAVIARDGKIYKNPVYEDFXFPQRHIMFTQPLVNTYAIAGYNATLNCSVRGNPQPXKXPWMKNKVAIVDDSRYTRMFSNPGESVPLEKFRQAPAPYDGGTYCCKASQMTLGDQWEIECKTGR

SEQ ID NO: 52586 - protein, 145 aa, Homo sapiens
  misc_feature (1)...(145): Xaa = X or * as defined in Table 2
FQFCVSLFVYIQLNSDVLPEXPRHKKKPPTLSHWFLKXNLHLXNXNTKALKYRKLVXLTSQKHXQMTYPFCNYLKTNXVTTNTKVKXTEGYXTAKTQKLYPDKVVMATNKPLKTRSPKPAKYGSPHDTATWTGSGLGLEASXHSA

SEQ ID NO: 52587 - protein, 37 aa, Homo sapiens
AEISTFCTYSPSEDRVLCIPSTLLCREVQRVTLWPVL

SEQ ID NO: 52588 - protein, 96 aa, Homo sapiens
  misc_feature (1)...(96): Xaa = X or * as defined in Table 2
MALHRASRKAITMDKAATPTRTPTTXPSRPRCCVVRCSGSPCGPSCDPYLAVFGTPCLQWFVSCHYNFVWVEFLSFCSSVSLCLFTLRVSGNSVCL

SEQ ID NO: 52589 - protein, 764 aa, Homo sapiens
  DOMAIN (425)..(439): PROTEIN RNA-BINDING RNA REPEAT HYD domain identified by eMATRIX, accession number PD00567B, p-value=1.310e-10, raw score of 18.23
  DOMAIN (402)..(588): Double-stranded RNA binding motif domain identified by PFam, accession name dsrm, E-value=2.8e-43, PFam score of 157.2
MRPMRIFVNDDRHVMAKHSSVYPTQEELEAVQNMVSHTERALKAVSDWIDEQEKGSSEQAESDNMDVPPEDDSKEGAGEQKTEHMTRTLRGVMRVGLVAKGLLLKGDLDLELVLLCKEKPTTALLDKVADNLAIQLAAVTEDKYEILQSVDDAAIVIKNTKEPPLSLTIHLTSPVVREEMEKVLAGETLSVNDPPDVLDRQKCLAALASLRHAKWFQARANGLKSCVIVIRVLRDLCTRVPTWGPLRGWPLELLCEKSIGTANRPMGAGEALRRVLECLASGIVMPDGSGIYDPCEKEATDAIGHLDRQQREDITQSAQHALRLAAFGQLHKVLGMDPLPSKMPKKPKNENPVDYTVQIPPSTTYAITPMKRPMEEDGEEKSPSKKKKKIQKKEEKAEPPQAMNALMRLNQLKPGLQYKLVSQTGPVHAPIFTMSVEVDGNSFEASGPSKKTAKLHVAVKVLQDMGLPTGAEGRDSSKGEDSAEETEAKPAVVAPAPVVEAVSTPSAAFPSDATAEQGPILTKHGKNPVMELNEKRRGLKYELISETGGSHDKRFVMEVEVDGQKFQGAGSNKKVAKAYAALAALEKLFPDTPLALDANKKKRAPVPVRGGPKFAAKPHNPGFGMGGPMHNEVPPPPNLRGRGRGGSIRGRGRGRGFGGANHGGYMNAGAGYGSYGYGGNSATAGYSQFSRPPPPSRPRCCVVRCSGSPCGPSCDPYLAVFGTPCLQWFVSCHYNFVWVEFLSFCSSVSLCLFTLRVSGNSVCL

SEQ ID NO: 52590 - protein, 146 aa, Homo sapiens
LRHAKWFQARANGLKSCVIVIRVLRDLVTRVPTWGPLRGWPLELLCEKSIGTANRPMGAGEALRRVLECLASGIVMPQHALRLAAFGQLHKVLGMDPLPSKMPKKPKNENPVDYTVQIPPSTTYAITPMKRPMEEDGEEKSPSKKK

SEQ ID NO: 52591 - protein, 119 aa, Homo sapiens
  misc_feature (1)...(119): Xaa = X or * as defined in Table 2
HALAALEKLFPDTPLALDANKKKRAPVPVRGGPKFAAKPHNPGFGMGGPMHNEVPPPPNLRGRGRGGSIRGRGRGRGFGGANHGGYMNAGAGYGSYGYGGNSATQGYKXLFHKTAYGYS

SEQ ID NO: 52592 - protein, 946 aa, Homo sapiens
  DOMAIN (440)..(454): PROTEIN RNA-BINDING RNA REPEAT HYD domain identified by eMATRIX, accession number PD00567B, p-value=1.310e-10, raw score of 18.23
  DOMAIN (440)..(633): Double-stranded RNA binding motif domain identified by PFam, accession name dsrm, E-value=6.3e-37, PFam score of 136.1
  misc_feature (1)...(946): Xaa = X or * as defined in Table 2
FPDTTEEVKMRPMRIFVNDDRHVMAKHSSVYPTQEELEAVQNMVSHTERALKAVSDWIDEQEKGSSEQAESDNMDVPPEDDSKEGAGEQKTEHMTRTLRGVMRVGLVAKCLLLKGDLDLELVLLCKEKPTTALLDKVADNLAIQLAAVTEDKFEILQSVDDAAIVIKNTKEPPLSLTIHLTSPVVREEMEKVLAGETLSVNGPPGNVLDRSRIAFAAFRGSLPETQRWFQARANGLKSCVIVIRVLRDLCTRVPTWGVPLRGWPLELPVXRNPIGTANRPMGAGEALRRVLECLASGIRVMPDGSGIYDPCEKEATDAIGHLDRQQREDITQSAQHALRLAAFGQLHKVLGMDPLPSKMPKKPKNENPVDYTVQIPPSTTYAITPMKRPMEEDGEEKSPSKKKKKIQKKEEKAEPPQAMNALMRLNQLKPGLQYKLVSQTGPVHAPIFTMSVEVDGNSFEASGPSKKTAKLHVAVKVLQDMGLPTGAEGRDSTKGEDSAEETEAKPAVVAPAPVVEAVSTPSAAFPSDATAENVKQQGPILTKHGKNPVMELNEKRRGLKYELISETGGSHDKRFVMEVEVDGQKFQGSGSNKKVAKAYAALAALEKLFPDTPLLALDANKKKRAPVPVRGGPKFAAKPHNPGFGMGGPMHNELPPPPNLRGRGRGGSIRGRGRGRGFGGANHGGYMNAGAGYGSYGYGGNFATAGYSQFYSNGGHSWNASGGGGGGGGGSSGYGSYYQGDNYNSPVAPKNTLGKKQPHGGQQKPSYGSGYQSHQGQQQSYNQSPYSNYGPPQGKQKGYNHGQGSYSYSNSYNSPGGGGGSDYNYESKFNYSGSGGRSGGNSYGSGGASYNPGSHGGYGGGSGGRLLHTKGKQGGYSQSNYNSPGSGQNYSGPPSSLPSPHKAAYGRNADPQHXTYQYQIKPPRGGDFYLLKLTSPSEDRVLCITS

SEQ ID NO: 52593 - protein, 35 aa, Homo sapiens
SKCLLSFLDDCKNIANIMKTLAYRGFIFKQTSKPF

SEQ ID NO: 52594 - protein, 379 aa, Homo sapiens
  misc_feature (1)...(379): Xaa = X or * as defined in Table 2
NPNSQMPKMTRSTKQLTNKSGQIDGCPGCRVVPTWCRLGHLSHYWAVWASILRFWEVWKYWLGNMGRKSSEFPILKLNGRTMGDXVLPFHMYVQPVVHPQLYPHSVTELTGDYFKPWWDGQPSLQQVLERVDEWMAKEGLLDPNVQVQFLFTLWEDWGLKKSVLPGQCQXLGAWPVGGFTSKQWDXSXKKAYSFAMGCWPKNGLLDMNKGLSLQHIGRPHSGIDDCKNIANIMKTLAYGGFIFKQTSKPVLIGRGQDGAGQGSLVGPPQNPPLPHQRGKRESGHKLCCPKVVPSASLWGSMPLGRGLCCPLQGALATWPFLEARHFCAPPSPTPQSQPSISPSHCGPGLRGTPGTHRLLPWYNRLLWGHQDPRCAPSHP

SEQ ID NO: 52595 - protein, 136 aa, Homo sapiens
  misc_feature (1)...(136): Xaa = X or * as defined in Table 2
RKKNEKEGTKPPRNMGICEKTKPTFDWCTXKXRGEWNQVGKYTSGYYTGELPQSSKTGQHSNSGNTENTTKILLEKSNPKTHNWXIHQGXNEGKTVKGSQREKXGYPQREAHQTNSRSLCRNPTRQKRVGVNIKHS

SEQ ID NO: 52596 - protein, 96 aa, Homo sapiens; identical to SEQ ID NO: 31360

SEQ ID NO: 52597 - protein, 252 aa, Homo sapiens
  misc_feature (1)...(252): Xaa = X or * as defined in Table 2
GNSSPPGLPCKSSSSPPPPPSLTGAPARRAAAAPPRPASRPRPPLAGGGVPQLFATRPPPGPTRARRPTWRXGPRGSPEETPRRRREWTRRPEPGCRAQGSRRPARPPSGSSAVRSASPASSPAPAASAPLGPRSRWSXRPPSRPRRSPPPPPPGRSRSDRERGRRKEASPPLTLAEAPAYRQDQAPPPGSPHLGFQSAAGPSRTASSAPRSGIGGRGANTPAPAAIFPPSLRPPRAGPVGDLRASGVDAAA

SEQ ID NO: 52598 - protein, 598 aa, Homo sapiens
  DOMAIN (39)..(78): PROTEIN ZINC FINGER ZINC-FINGER METAL-BINDING NU domain identified by eMATRIX, accession number PD01066, p-value=6.769e-33, raw score of 19.43
  DOMAIN (235)..(480): Zinc finger, C2H2 type domain identified by PFam, accession name zf-C2H2, E-value=7.4e-57, PFam score of 202.3
  misc_feature (1)...(598): Xaa = X or * as defined in Table 2
LKTETSEEKARRYKDRPSQLNAVFQEQKKMIQAQESITLEDVAVDFTWEEWQLLGAAQKDLYRDVMLENYSNLVAVGYQASKPDALFKLEQGEQLWTIEDGIHSGACSDIWKVDHVLERLQSESLVNRRKPCHEHDAFENIVHCSKSQFLLGQNHDIFDLRGKSLKSNLTLVNQSKGYEIKNSVEFTGNGDSFLHANHERLHTAIKFPASQKLISTKSQFISPKHQKTRKLEKHHVCSECGKAFIKKSWLTDHQVMHTGEKPHRCSLCEKAFSRKFMLTEHQRTHTGEKPYECPECGKAFLKKSRLNIHQKTHTGEKPYICSECGKGFIQKGNLIVHQRIHTGEKPYICNECGKGFIQKTCLIAHQRFHTGKTPFVCSECGKSCSQKSGLIKHQRIHTGEKPFECSECGKAFSTKQKLIVHQRTHTGERPYGCNECGKAFAYMSCLVKHKRIHTREKQECSQGGKSSCREAQLITHQXCHAGEKLCXRGDYTSAFCGPSDIIKHQRPHSQNRNCSPCGTASGQMCSLRRXQWICTGQKPCECSECGCAFRDQLCLILCYRKPIGRKPDLCGKGLSKNLXFIMWPKSIHCENMYKAEIA

SEQ ID NO: 52599 - protein, 85 aa, Homo sapiens
  misc_feature (1)...(85): Xaa = X or * as defined in Table 2
MASEEVXKNRAXKKAKRRNVXVEVLLLQMALPPWXIKFQIPKLXGTVSSPPPLGLLXVKLXLGMPITSSLXPXTAXCRXWXXKHG

SEQ ID NO: 52600 - protein, 180 aa, Homo sapiens
ENMAKRNAEKELTDRNWDQEDEAEEVGTFSMASEEVLKNRAIKKAKRRNVGFESDTGGAFKGFKGLVVPSGGGRFSGFGSGAGGKPLEGLSNGNNITSAPPFASAKAAADPKVAFGGDEEENDEPPKVVVTEVKEEDAFYSKKCKLFYKKDNEFKEKGIGTLHLKPTANQKTQLLVRADT

SEQ ID NO: 52601 - protein, 39 aa, Homo sapiens
IQSANWFIYNPLARHKGSPSPHQTQEPSWLSPSGSCTGA

SEQ ID NO: 52602 - protein, 94 aa, Homo sapiens
  misc_feature (1)...(94): Xaa = X or * as defined in Table 2
GAPPGIWCLSLWACRALSPLSSAAQHRKRPSALSPATPAGSRPLRRCAPGFAATKTQRVQRRPPRRXGAAAGAGGSXRPLCGVVIHSVLHNTPE

SEQ ID NO: 52603 - protein, 520 aa, Homo sapiens
  DOMAIN (411)..(520): RanBP1 domain identified by PFam, accession name Ran_BP1, E- value=3.3e-05, PFam score of -13.8
  misc_feature (1)...(520): Xaa = X or * as defined in Table 2
VPQRSTGSGRARSARRPLRAPDPCAAAPRVSPQPRPSECSGGRRGGSKTWAKRNAGKELTDRNWDQEDEAEEVGTFSMASEEVLKNRAIKKAKRRNVGFESDTGGAFKGFKRFGGYPSEEERFSGFGSGAGGKPLEGLSNGNNITSAPPFASAKAAADPKVAFGKXLPSPSRLLVDKNVSNPKTNGDSQQPSSSGLASSKACVGNAYHKQLAALDCSVRDWMVKHANTNSLCDLTPIFKDYEKYLANIETANTGNSGRNSESESNKVAAETQSPSLFGSTKLQQESTFLFHGNKTEDTPDKKMEVASEKKTDPSSLGATSASFNFGKKVDSSVLGSLSSVPLTGFSFSPGNSSLFGKDTTQSKPVSSPFPTKPLEGQAEGDSGECKGGDEEENDEPPKVVVTEVKEEDAFYSKKCKLFYKKDNEFKEKGIGTLHLKPTANQKTQLLVRADTNLGNILLNVLIPPNMPCTRTGKNNVLIVCVPNPPIDEKNATMPVTMLIRVKTSEDADELHKILLEKKDA

SEQ ID NO: 52604 - protein, 72 aa, Homo sapiens
  misc_feature (1)...(72): Xaa = X or * as defined in Table 2
MGVXTLCTGKQGLAGXXLLAAAVELEEVLQHPRPLAGRCHRLPLGLPTADQLSKGLHGGPGSGRXARGGFGT

SEQ ID NO: 52605 - protein, 139 aa, Homo sapiens
VLIPKEDSLLYAGSVRTLQPPDIYSIVIEGERGNRQRIYSLEQLLQEAVLDVRPQSSRYLPPGTRVCAYWSQKSRCLYPGNVVRGASGDEDEDLDSVVVEFDDGDTGHIAVSNVRLLPPDFKIQCTEPSPALLVSSSCR

SEQ ID NO: 52606 - protein, 170 aa, Homo sapiens
CGRPPWKTGQRSQPSCPPGSSGSGRGIPPAAWHEGEGPEAVLQGHRAGRGDPACRGLCCLPSQLGGPTSPTSAASRACGSRGAATLVVKVKWFYHPCRRPSWARGSATARMRCTSPATRMRTTCRPSPTSARSWRASSMSRWPGAASARTGRTSTTGGHLRPHHRAPGDG

SEQ ID NO: 52607 - protein, 981 aa, Homo sapiens
  DOMAIN (666)..(686): FUNGAL LIGNIN PEROXIDASE FAMILY SIGNATURE domain identified by eMATRIX, accession number PR00462N, p-value=7.900e-09, raw score of 11.80
  DOMAIN (792)..(976): BAH domain identified by PFam, accession name BAH, E-value= 3.1e-08, PFam score of 40.8
  misc_feature (1)...(981): Xaa = X or * as defined in Table 2
MRRRRKVAAIHAGPRPRSAAASSEQRGRGPGAARRAGGAEAAASGVTGGGGGGAGQHAGGLGFSAGGRAPSQRPLCGSMPARLFSKQEVDYCGLPAPPASSLRSRGHRQRIYSLNQLLQEALRTGRARPGEGPGWLVTDKGGLGWGSSHSQAQGPDSQAAWGRAPPAHGSSPAFLQVLDVRPQSSRYLPPGTRVCAYWSQKSRCLYPGNVVRAPPPCFGRLLGVPAASSGVPSTGASGDEDEDLDSVVVEFDDGDTGHIAVSRRTEPSPALLVSSSCRRTKKVSSEAPPPSEAATPSLSPKAQDGPEALKTPGKKSISKDKAGILPDFPESGSGKAPSGGWGNQEARGVGRVRGGAGGGSFVGPAGADSAGLLPSGKPNSXPQVPNPPRGPPTTSWAAVAAPCXAGPRWRTPSGRRWQRPARGRGCCRTSSSSTAAARNCGPARPCSPCTAWPHPYLATAFAPTPSAAWPAPTRPSSGGPGRASPGEPTSCCGLIRPRGWRPRRVGERRAGGEFLVKLDHEGVTSPKNKTCKALLMGDKDFSPKLWAAPAQPQLCAPGPCGQGQEGAGTHPPAAHGAGAAQVRGPWQSSRCPTTATATAPSRTRTRTGRGWRPASPSRFLARLSVSSSSSGSSTSSSSGSVSTSSLCSSDNEDSSYSSDDEDPALLLQTCLTHPVPTLLAQPEALRSKGSGPHAHAQRCFLSRATVAGTGAGSGPSSSSKSKLKRKEALSFSKAKELSRRQRPPSVENRPKISAFLPARQLWKWSGNPTQRRGMKGKARKLFYKAIVRGEETLRVGDCAVFLSAGRPNLPYIGRIESMWESWGSNMVVKVKWFYHPEETKLGKRQCDGKGGDTTAASTVPQHGAPGPTTQPPLSRYHGPAGSRTAHGHALEQGSQVPPHSGGLWPTAVLSIRQNALYQSCHEDENDVQTISHKCQVVAREQYEQMARSRKCQDRQDLYYLAGTYDPTTGRLVTADGVPILC

SEQ ID NO: 52608 - protein, 48 aa, Homo sapiens
  misc_feature (1)...(48): Xaa = X or * as defined in Table 2
XPTAAGGGGGDSEGEGPILLVADARNRRPGKSEFVAKLLELRLALDHT

SEQ ID NO: 52609 - protein, 72 aa, Homo sapiens
  DOMAIN (19)..(46): Protamine P1 proteins domain identified by eMATRIX, accession number BL00048, p-value=7.750e-10, raw score of 6.39
  misc_feature (1)...(72): Xaa = X or * as defined in Table 2
YLLHCLPSDPPSFTNSPDGRGRRRRRQRRRRSDPPGRGRTKSSTRVPGSNRFVXFHQRXGRLKEWMANQDTN

SEQ ID NO: 52610 - protein, 171 aa, Homo sapiens
  misc_feature (1)...(171): Xaa = X or * as defined in Table 2
ACQASSHSGPVWGPGERTTPGAXASARREPSRNQHPNLWVTEQIXIASPRTVANPLVPARTPTGPRTNKPKHLIKQGRGQPRQPLSGSTGGAGESPASGCAGGQPAHRVWIAPAARGCGQHTPWKAPAGNGQSPRPASATRMIGPSPSLSPPAPPAVVGVAALGSRNRCIL

SEQ ID NO: 52611 - protein, 147 aa, Homo sapiens
  DOMAIN (73)..(132): NAC domain identified by PFam, accession name NAC, E-value= 1.6e-26, PFam score of 101.5
PQGLSAPEQQEDEDSLKEDSPRAWGSGQHSDSHGESSAELDDKDILAPQTVQCPAQAPAGGSEETIAKAKQSRSEKKARKAMSKLGLRQIQGVTRITIQKSKNILFVIAKPDVFKSPASDTYVVFGEAKIEDLSQQVHKAAAERQPQ

SEQ ID NO: 52612 - protein, 405 aa, Homo sapiens
  misc_feature (1)...(405): Xaa = X or * as defined in Table 2
LRQLERGLAKGQPSTPVDRPLGPDPSAPGTLAGAALPPLEPPAPCLCQDPQEDSVEDEEPPGSLGLPPPQAGVQPAAAAVSGTTQPLGTGPRVSLSPHSPLLSPKVASMDAKDLALQILPPCQVPPPSGPQSPAGPQGLSAPEQQEDEDSLEEDSPRALGSGQHSDSHGESSAELDEQDILAPQTVQCPAQAPAGGSEETXLRQLERGLAKGQPSTPVDRPLGPDPSAPGTLAGAALPPLEPPAPCLCQDPQEDSVEDEEPPGSLGLPPPQAGVQPAAAAVSGTTQPLGTGPRVSLSPHSPLLSPKVASMDAKDLALQILPPCQVPPPSGPQSPAGPQGLSAPEQQEDEDSLEEDSPRALGSGQHSDSHGESSAELDEQDILAPQTVQCPAQAPAGGSEETIAKA

SEQ ID NO: 52613 - protein, 754 aa, Homo sapiens
  misc_feature (1)...(754): Xaa = X or * as defined in Table 2
MPGELLAPSCCCRGGPTRDRTDLSCDAAAATTILGGDRREPCALTPGPSHLALTFLPSKPGARPQPEGASWDAGPGLSTEAPLPATLEPRIVMGEETCQALLSPRAARTALRDQEGWGLSPQGSMVDERELHPAGTPEPPSSESSLSADSSSSWGQEGHFFDLDFLANDPMIPAALLPFQGSLIFQVEAVEVTPLSPEEEEEEAVADPDPDSASYAEADDERLYSGEPHAQATLLQDSVQKTEEESGGLRYDTASAPTRHRSLVSPKACSCSHDCAPAGXRGPHLTPGLRYDTASAPTRHRSLISPKACGCSHDCVPAGXRGPHLTPGLRYDTASAPTRHRSLVSPKACSCSHACVPAGXRGPHLTPGLRYDSTSASARHRPHLRSRASGCGHPSNLAGRSRLCPRDRACGHHGSAGSSAWTGSMSGSARHRXWGXAXLTPKGDPGGXEPAGRRPEGTGTGTWTQPQGGLHGCQRPGLADLAALPSASSLWAPEPSWPSSALSPRAARGXGQPGGRLASGPGLGPAFGXPRGVISRAGRAGHLGSSDRAVSSPGAQSREEGPSRRQXGDHRQSQAESQXEEGPKGNVKAGLAADSGSHQDHHPEVQEHPLCHRQAXCLQGDPASAHLCGFWRGQTXGPCPASAQSRSXEVXGALRDLSLGPXVSTQGPGXAXVQGKGKGGGGKGGPGGAGTAXHLAGDGAGQCVQGQGRAGSXEQPQXHRQRHHGTDHVATDRKLEPSYAFPQLCYSINRCPFK

SEQ ID NO: 52614 - protein, 69 aa, Homo sapiens
FVTHAGGSRPFALPAASACYGPGKHLGIPFLHRDPSQLKLIHSCGSTMQLTQILSKQSSQVGDPQESLH

SEQ ID NO: 52615 - protein, 66 aa, Homo sapiens
IFRNRDSPKNWVMSLALFSCSSRILHLDNNHDSIHFSSLVCCYHQLLSTSSIHALQAFSFLITLVC

SEQ ID NO: 52616 - protein, 49 aa, Homo sapiens
LRPPKPSLAGFGDRGALLKLIHSCGSTMQLTQILSKQSSQVGDPQESLH

SEQ ID NO: 52617 - protein, 207 aa, Homo sapiens
  DOMAIN (66)..(107): CBF-A/NF-YB subunit proteins domain identified by eMATRIX, accession number BL00685B, p-value=5.806e-12, raw score of 14.41
  DOMAIN (23)..(95): Histone-like transcription factor domain identified by PFam, accession name CBFD_NFYB_HMF, E-value=1.4e-07, PFam score of 38.6
  misc_feature (1)...(207): Xaa = X or * as defined in Table 2
KAGARGNQEGTMASSSGTQKVLTIPRGCYQXKXSKETLPXCSGWPNDAREAVVNCCTEFIHLISSEANEICNKSEKKTISPEHVIQALESLGFGSYISEVKEVLQECKTVALKRRKASSRFGKPLGIPEEELFGDQANKELFGKSLDQQQAELAQQEWLQMQQAAHQAQLAAASAKCIXSRRGSFSGMEEDGGWISEIPPAEFLFLL

SEQ ID NO: 52618 - protein, 379 aa, Homo sapiens
MAPQVWRRRTLERCLTEVGKATGRPECFLTIQEGLASKFTSLTKVLYDFNKILENGRIHGSPLQKLVIENFDDEQIWQQLELQNEPILQYFQNAVSETINDEDISLLPESEEQEREEDGSEIEADDKEDLEDLEEEEVSDMGNDDPEMEERKDDNDDEEEEDIDFFEDIDSDEDEGGLFGSKKLKSVESDEDITNVHDDELDSNKEDDEIAEEEALLTNISETDEDDDLQENEDNKQHKESLKRVTFALPDDAETEDTGVLNRKPPFNWKDIIKQRIRDQAWDDVVRKEKPKEDAYEYKKRLTLDHEKSKLSLAEIYEQEYIKLNQQKTAEEENPEHVEIQKMMDSLFFKIGCPLQTSTLSLKPAWYQRLKLCPNLASH

SEQ ID NO: 52619 - protein, 49 aa, Homo sapiens; identical to SEQ ID NO: 40904

SEQ ID NO: 52620 - protein, 160 aa, Homo sapiens
  misc_feature (1)...(160): Xaa = X or * as defined in Table 2
IRHEGRGQRGKMELVQVLKRGLQQITGHGGLFRGYLRVFFRTNDAKVGTLVGEDKYGNKYYEDNKQFFGRHRWVVYTTEMNGKNTFWDVDGSMVPPEWHRWLHSMTDDPPTTKPLTARKFHLGRNHXISTWTGAPQEQYVPYSTTRKKIQEWIPPSTPYK

SEQ ID NO: 52621 - protein, 85 aa, Homo sapiens
  DOMAIN (54)..(77): TYROSINE KINASE CATALYTIC DOMAIN SIGNATURE domain identified by eMATRIX, accession number PR00109D, p-value=8.579e-23, raw score of 17.04
  DOMAIN (1)..(84): Eukaryotic protein kinase domain identified by PFam, accession name pkinase, E-value=1.3e-20, PFam score of 78.3
DMAAQIAEGMAFIEERNYIHRDLRAANILVSDTLSCKIADFGLARLIEDFTIKSDVWSFGILLTEIVTHGRIPYPGMTNPEVIQN

SEQ ID NO: 52622 - protein, 246 aa, Homo sapiens
  DOMAIN (183)..(228): Receptor tyrosine kinase class II proteins domain identified by eMATRIX, accession number BL00239F, p-value=7.840e-23, raw score of 28.15
  DOMAIN (10)..(227): Eukaryotic protein kinase domain identified by PFam, accession name pkinase, E-value=3.6e-14, PFam score of 55.0
MEDFLLSNGYQLGKTIGEGTYSKVKEAFSKKHQRKVAIKVIDKMGGPEERSFDHSLLPLAWNQASPMAALEWRPHKANAEEMTKYHSDDYIKFLRSIRPDNMSEYSKQMQRSAANPDNAPIVLRLREPVCNCVYLFLSVCDFSCWLLPRALSCCCPPMQCSCHPGISWASDARLGCRYPLIGNNQRPRFPGRGYRMVRPDNCPEELYQLMRLCWKERPEDRPTFDYLRSVLEDFFTATEGQYQPQP

SEQ ID NO: 52623 - protein, 551 aa, Homo sapiens
  DOMAIN (468)..(513): Receptor tyrosine kinase class II proteins domain identified by eMATRIX, accession number BL00239F, p-value=6.774e-21, raw score of 28.15
  DOMAIN (146)..(224): Src homology domain 2 domain identified by PFam, accession name SH2, E-value=5.4e-45, PFam score of 133.3
  misc_feature (1)...(551): Xaa = X or * as defined in Table 2
GAGPTGYLRRLPGWAGTMGCGCSSHPEDDWMENIDVCENCHYPIVPLDGKGTLLIRNGSEVRDPLVTYEGSNPPASPLQDNLVIALHSYEPSHDGDLGFEKGEQLRILEQSVEWWKAQSLTTGQEGFIPFNFVAKANSLEPEPWFFKNLSRKDAERQLLAPGNTHGSFLIRESESTAGSFSLSVRDFDQNQGEVVKHYKIRNLDNGGFYISPRITFPGLHELASAITPIASDGLCTRLSRPCQTQKPQKPQKPWWEDEWEVPRETLKLVERLGAGQFGRCGWGTTTGTTKVAVKSLKQGSMSAGRLPAEANLMKQLQHQRLVRLYAVVTQEPIYIITEYMENGSLVDFLKTPSGIKLTINKLLDMAAQIAEGMAFIEERNYIHRDLRAANILVSDTLSCKIADFGLARLIEDNEYTAREGAKFPIKWTAPEAIXSRGNSPPRSDVWSFGDLLPEIFTHGRIPYPQGIPNPELIQKLERGYRMVRPSNCPEKLYQLMRLCWKERPEDRPTFDYLRSVLEDFFKRHRRASNQPQALREPLRKPLCFSPFPLQP

SEQ ID NO: 52624 - protein, 66 aa, Homo sapiens
  DOMAIN (42)..(59): IMP dehydrogenase / GMP reductase proteins domain identified by eMATRIX, accession number BL00487H, p-value=1.000e-16, raw score of 15.21
DKGSIQKFVPYLIAGIQHGCQDIGARSLSVLRSMMYSGELKFEKRTMSAQIEGGVHGLHSYEKRLY

SEQ ID NO: 52625 - protein, 155 aa, Homo sapiens
  DOMAIN (41)..(79): IMP dehydrogenase / GMP reductase proteins domain identified by eMATRIX, accession number BL00487B, p-value=1.383e-29, raw score of 16.59
  DOMAIN (15)..(90): IMP dehydrogenase / GMP reductase N terminus domain identified by PFam, accession name IMPDH_N, E-value=5.3e-38, PFam score of 139.7
HSNNLISLSFPHTVQQLFASDQGLTYNDFLILPGFIDFIADETPLISSPMDTVTEADLAIVMALMGGTGFIHHNCTPEFQASEVQKVKKFEPGFITHPVVLSPLHTVGDVLEAKMRHGFSGIPITETGTMGSKLVGIVTSRDIDFLAEKDHTTLL

SEQ ID NO: 52626 - protein, 156 aa, Homo sapiens
  DOMAIN (4)..(42): IMP dehydrogenase / GMP reductase proteins domain identified by eMATRIX, accession number BL00487B, p-value=2.946e-34, raw score of 16.59
  DOMAIN (1)..(53): IMP dehydrogenase / GMP reductase N terminus domain identified by PFam, accession name IMPDH_N, E-value=1e-16, PFam score of 69.0
MVTLKTPLISSPMDTVTEADLAIVMALMGGTGFIHHNCTPEFQASEVQKVKKFEPGFITHPVVLSPLHTVGDVLEAKMRHGFSGIPITETGTMGSKLVGIVTSRDIDFLAEKDHTTLLSENRDYPVASKDSHEQLLGGAAVGTHEDDKYHLDLLTQ

SEQ ID NO: 52627 - protein, 215 aa, Homo sapiens
  DOMAIN (93)..(146): IMP dehydrogenase / GMP reductase proteins domain identified by eMATRIX, accession number BL00487D, p-value=6.700e-37, raw score of 26.53
  DOMAIN (113)..(215): IMP dehydrogenase / GMP reductase C terminus domain identified by PFam, accession name IMPDH_C, E-value=4.2e-09, PFam score of 34.5
ADIAIAMALMGGIGFIHHNCTPEFQAKEVRKVKKFEQGFITDPVVLTPSHTVGDVLEAKMRHGFSGIPITETGTIGSKLKNRDYPLASKDSHKQLLRGAAVGTPEDDKYRLDLLTQAGVDVVVLDLSQGNSVYQIATVHYIKQKYPHLQVIGMTAAQAKNLIDAAVDGLRIGMGCGSICITQEVMACGGPQGTALYKVAEYALCFGVSIIADGGI

SEQ ID NO: 52628 - protein, 604 aa, Homo sapiens
  DOMAIN (450)..(492): FMN-dependent alpha-hydroxy acid dehydrogenases proteins domain identified by eMATRIX, accession number BL00557D, p-value= 2.841e-13, raw score of 17.76
  DOMAIN (353)..(578): IMP dehydrogenase / GMP reductase C terminus domain identified by PFam, accession name IMPDH_C, E-value=1.7e-137, PFam score of 470.2
  misc_feature (1)...(604): Xaa = X or * as defined in Table 2
AAASAWRATHSTTAAGRRTALFRSPEPGNTRDTRRRRRATAPDCCRPATSPRALDWTSLHTRRHPVQNYLQWSYWQVLVSRWIAFAGLAMADYLISGGTGYVPEDGLTAQQLFASADDLTYNDFLILPGFIDFIADEVDLTSALTRKITLKTPLISSPMDTVTEADMAIAMALMGGIGFIHHNCTPEFQANEVRKVKNFEQGFITDPVVLSPSHTVGDVLEGKMRHGFSGIPITETGTMGSKLVGIVTSRDIDFLAEKDHTTLLSEVMTPRIELVVAPAGVTLKEANEILQRSKKGKLPIVNDCDELVAIIARTDLKKSRDYPLASKDSQPQLLCGAAVDTREEDKYRLDLLTQAGVDVIVLDSSQGNSVYQYARVLYFKQKYPHLQVLGGNVVTAAQAKNLIDAGVDGLRVGMGCGSICITQEVMACGRPQGTCCVTRXAEYARRFGVPIIADGGIQTVGHVVKALALGASTVMMGSLLAATTEAPGEYFFSDGVRLKKYRGMGSLDAMEKSSSSQKRYFSEGDKVKIAQGVSGSIQDKGSIQKFVPYLIAGIQHGCQDIGARSLSVLRSMMYSGELKFEKRTMSPQIEGGVHGLHSYEKRLY

SEQ ID NO: 52629 - protein, 110 aa, Homo sapiens
  DOMAIN (12)..(66): Vinculin family talin-binding region proteins domain identified by eMATRIX, accession number BL00663I, p-value=1.000e- 40, raw score of 27.27
HLMTSGLSQNHILEDVNKCVIALQEKDVDGLDRQAGAIRGRAARVIHVVTSEMDNYEPGVYTEKVLEATKLLSNTVMPRFTEQVEAAVEALSSDPAQPMDENISHCSSLK

SEQ ID NO: 52630 - protein, 202 aa, Homo sapiens
  DOMAIN (95)..(136): Vinculin family talin-binding region proteins domain identified by eMATRIX, accession number BL00663F, p-value=9.471e- 22, raw score of 20.78
  misc_feature (1)...(202): Xaa = X or * as defined in Table 2
MTAVHAGHLNLKWDPKSLEIRTLAAERLVTQVTTLVNTNSKGPSDKKRGHSKKVHVLAASVEQAAENFLEKEDKIVKESQFLXEXLLAAVEYVRKQGKECLRPSLEEHLEGIISGAALMGDSSCKHDDHRERIAAECNTVLQACRTCFSEYMGNAGCKERSNSLNSAIDKMTKKTRDLRRQLHKAVMDHVSDSFLETNVPLL

SEQ ID NO: 52631 - protein, 954 aa, Homo sapiens
  DOMAIN (799)..(824): ALPHA-CATENIN SIGNATURE domain identified by eMATRIX, accession number PR00805I, p-value=1.188e-32, raw score of 12.05
  DOMAIN (38)..(915): Vinculin family domain identified by PFam, accession name Vinculin, E-value=0, PFam score of 1641.7
LSRQQRPSASGLWNLALSQLAAEMTAVHAGNINFKWDPKSLEIRTLAVERLLEPLVTQVTTLVNTNSKGPSNKKRGRSKKAHVLAASVEQATENFLEKGDKIAKESQFLKEELVAAVEDVRKQGDLMKAAAREFAKEPCSFVKRSNMVRAAPALLSAVTRLLILADMADVYKLLVQLKVVEDGILKLRNAGNEQDLGNQYKALKPEVDKLNIMAAKRQQELKDVGHRDQMAAARGILQSNVPILYTASQACLQHPDVAAYKANRDLIYKQLQQAVTGISNAAQATASDDASQHQGGGGGELAYALNNFDKQIIVDPLSFSEERFRPSLEERLESIISGAALMADSSCTRDDRRERIVAECNAVRQACRTCVSEYMGNAGRKERSDALNSAIDKMTKKTRDLRRQLRKAVMDHVSDSFLETNVPLLVLIEAAKNGNEKEVKEYAQVFREHANKLIEVANLACSISNNEEGVKLVRMSASQLEAGCPQVINAATWALAPKPQSKLAQENMDLFKEQWEKQVRVLTDAVDDITSIDDFLAVSENHILEDVNKCVIALQEKDVDGLDRTAGAIRGRAARVIHVVTSEMDNYEPGVYTEKVLEATKLLSNTVMPRFTEQVEAAVEALSSDPAQPMDENEFIDASRLVYDGIRDIRKAVLMIRTPEELDDSDFETEDFDVRSETSVQTEDDQLIAGQSARAIMAQLPQEQKAKIREQVASFQEEKSKLDAEVSKWDDSGNDIIVLAKQMCMIMMEMTDFTRGKGPLKNTSDVISAAKKIAEAGSRMDKLGRTIRDHCPDSACKQDLLAYLQRIALYCHQLNICSKVKAEVQNLGGELVVSGNCDTCGALQGLKGWPPPLCLATHWVDSAMSLIQAAKNLMNAVVQTVKASYVASTKYQKSQGMASLNLPAVSMKMKAPEKKPLVKREKQDETQTKIKRASQKKHVNPVQALSEFKAMDSI

SEQ ID NO: 52632 - protein, 950 aa, Homo sapiens
  DOMAIN (635)..(660): ALPHA-CATENIN SIGNATURE domain identified by eMATRIX, accession number PR00805G, p-value=1.000e-31, raw score of 11.78
  DOMAIN (41)..(939): Vinculin family domain identified by PFam, accession name Vinculin, E-value=0, PFam score of 1235.9
  misc_feature (1)...(950): Xaa = X or * as defined in Table 2
PDWRETKQRPSASGLWNLALAQLAAEMTAVHAGHLNLKWDPKSLEIRTLAVERLLEPLVTQVTTLVNTNSKGPSDKKRGHSKKVHVLAASVEQAAENFLEKEDKIVKESQFLXEXLLAAVEDVRKQGDLMKAAARRRSHDDPCSSVEQGNMVQAAXTLLSAVTCLLILADMGNVYKLLVQLKVVEDGILKLRNAGNEQDLGIQYKALKPEVDKLNIMAAKRQQELKDVGHRDQMAAARGILQKNVPILYTASQACLQHPDVAAYKANRDLIYKQLQQAVTGISNAAQATASDDASQHQGGGGGELAYALNNFDKQIIADPLSFQTRRRCRPSLEERLESIISGAALMADSSCTRDDRRERIVAECNAVRQACRTCVSEYMGNAARTERCDALNFAIYKTTTKTTDLRTQLRKAVMDHVSDSFLETNVPLLVLIEAAKNGNEKEVKEYAQVFREHANKLIEVANLACSISNNEEGVKLVRMSASQLEAGCPQVINAATWALAAKPQSKLAQENMDLLKEQWEKQVRVLTDAVDDITSIDDFLAVSENHILEDVNKCVIALQEKDVDGLDRTAGAIRGRAARVIHVVTSEMDTMRPGVYTEKVLEATKLLSNTVMPRFTEQVEAAVEALSSDPAQPMDENEFIDASRLVYDGIRDIRKAVLMIRTPEELDDSDFETEDFDVRSRTSVQTEDDQLIAGQSCPGVHGFSFPRGQKAKIAEQVASFQEEKSKLDAEVSKWDDSGNDIIVLAKQMCMIMMEMTDFTRGKGPLKNTSDVISARQRKLLEAGSRMDKLGCTITDHCPDSACKQARPARLSLPXLGLLAYLQRIALYCHQLNICSKVKAEVQNLGGELVVSGVDSAMSLIWATKNLMNAVVQTVKASYVASTKYQKSQGMASLNLPAVSWKMKPPGNKPIVEERENGMRQQTKIIRAFFGRGHVNPVQALSEFKAMTGF

SEQ ID NO: 52633 - protein, 528 aa, Homo sapiens
  DOMAIN (146)..(165): FIBRONECTIN TYPE III REPEAT SIGNATURE domain identified by eMATRIX, accession number PR00014C, p-value=2.800e-12, raw score of 15.44
  DOMAIN (7)..(406): Fibronectin type III domain identified by PFam, accession name fn3, E-value=6e-50, PFam score of 179.3
MTISTAIPAPTDLKFTQVTPTSLSAQWTPPNVQLTGYRVRVTPKEKTGPMKEINLAPDSSSVVVSGLMVATKYEVSVYALKDTLTSRPAQGVVTTLENVSPPRRARVTDATETTITISWRTKTETITGFQVDAVPANGQTPIQRTIKPDVRSYTITGLQPGTDYKIYLYTLNDNARSSPVVIDASTGLEPGTEYTIYVIALKNNQKSEPLIGRKKTDELPQLVTLPHPNLHGPEILDVPSTVQKTPFVTHPGYDTGNGIQLPGTSGQQPSVGQQMIFEEHGFRRTTPPTTATPIRHRPRPYPPNVGEEIQIGHIPREDVDYHLYPHGPGLNPNASTGQEALSQTTISWAPFQDTSEYIISCHPVGTDEEPLQFRVPGTSTSATLTGLTRGATYNVIVEALKDQQRHKVREEVVTVGNSVNEGLNQPTDDSCFDPYTVSHYAVGDEWERMSESGFKLLCQCLGFGSGHFRCDSSRWCHDNGVNYKIGEKWDRQGENGQMMSCTCLGNGKGEFEFTRNSGLGSSIWESLI

SEQ ID NO: 52634 - protein, 1173 aa, Homo sapiens
  DOMAIN (367)..(404): Type II fibronectin collagen-binding domain proteins domain identified by eMATRIX, accession number BL00023, p-value=8.920e-33, raw score of 24.31
  DOMAIN (52)..(553): Fibronectin type I domain identified by PFam, accession name fn1, E-value=1.7e-144, PFam score of 493.4
MLRGPGPGLLLLAVQCLGTAVPSTGASKSKRQAQQMVQPQSPVAVSQSKPGCYDNGKHYQINQQWERTYLGNALVCTCYGGSRGFNCESKPEAEETCFDKYTGNTYRVGDTYERPKDSMIWDCTCIGAGRGRISCTIANRCHEGGQSYKIGDTWRRPHETGGYMLECVCLGNGKGEWTCKPIDRCNDQDTRTSYRIGDTWSKKDNRGNLLQCICTGNGRGEWKCERHTSVQTTSSGSGPFTDVRAAVYQPQPHPQPPPYGHCVTDSGVVYSVGMQWLKTQGNKQMLCTCLGNGVSCQETAVTQTYGGNSNGEPCVLPFTYNGRTFYSCTTEGRQDGHLWCSTTSNYEQDQKYSFCTDHTVLVQTRGGNSNGALCHFPFLYNNHNYTDCTSEGRRDNMKWCGTTQNYDADQKFGFCPMAAHEEICTTNEGVMYRIGDQWDKQHDMGHMMRCTCVGNGRGEWTCIAYSQLRDQCIVDDITYNVNDTFHKRHEEGHMLNCTCFGQGRGRWKCDPVDQCQDSETGTFYQIGDSWEKYVHGVRYQCYCYGRGIGEWHCQPLQTYPSSSGPVEVFITETPSQPNSHPIQWNAPQPSHISKYILRWRPKNSVGRWKEATIPGHLNSYTIKGLKPGVVYEGQLISIQQYGHQEVTRFDFTTTSTSTPVTSNTVTGETTPFSPLVATSESVTEITASSFVVSWVSASDTVSGFRVEYELSEEGDEPQYLDLPSTATSVNIPDLLPGRKYIVNVYQISEDGEQSLILSTSQTTAPDAPPDTTVDQVDDTSIVVRWSRPQAPITGYRIVYSPSVEGSSTELNLPETANSVTLSDLQPGVQYNITIYAVEENQESTPVVIQQETTGTPRSDTVPSPRDLQFVEVTDVKVTIMWTPPESAVTGYRVDVIPVNLPGEHGQRLPISRNTFAEVTGLSPGVTYYFKVFAVSHGRESKPLTAQQTTKLDAPTNLQFVNETDSTVLVRWTPPRAQITGYRLTVGLTRRGQPRQYNVGPSVSKYPLRNLQPASEYTVSLVAIKGNQESPKATGVFTTRHHSPRKMSGMNTPWRTLHMHRCSLSHPGFITHSERLCVPKIHCEWLYVLITHYECTCPLPTMSGCACPSPAVGGCASVTCRGWLCMYVTRRGWLCVSVTCRGWLCVSVACHGWLCMFCPHHHLGLQHFALGHGG

SEQ ID NO: 52635 - protein, 223 aa, Homo sapiens
  DOMAIN (15)..(25): FIBRONECTIN TYPE III REPEAT SIGNATURE domain identified by eMATRIX, accession number PR00014A, p-value=9.591e-09, raw score of 8.22
  DOMAIN (1)..(79): Fibronectin type III domain identified by PFam, accession name fn3, E-value=8.7e-21, PFam score of 82.5
LDAPTNLQFVNETDSTVLVRWTPPRAQITGYRLTVGLTRRGQPRQYNVGPSVSKYPLRNLQPASEYTVSLVAIKGNQESPKATGVFTTRHHSPRKMSGMNTPWRTLHMHRCSLSHPGFITHSERLCVPKIHCEWLYVLITHYECTCPLPTMSGCACPSPAVGGCASVTCRGWLCMYVTRRGWLCVSVTCRGWLCVSVACHGWLCMFCPHHHLGLQHFALGHGG

SEQ ID NO: 52636 - protein, 523 aa, Homo sapiens
  DOMAIN (413)..(432): FIBRONECTIN TYPE III REPEAT SIGNATURE domain identified by eMATRIX, accession number PR00014C, p-value=4.857e-13, raw score of 15.44
  DOMAIN (1)..(447): Fibronectin type III domain identified by PFam, accession name fn3, E-value=1.1e-116, PFam score of 401.0
DVPRDLEVVAATPTSLLISWDAPAVTVRYYRITYGETGGNSPVQEFTVPGSKSTATISGLKPGVDYTITVYAVTGRGDSPASSKPISINYRTEIDKPSQMQVTDVQDNSISVKWLPSSSPVTGYRVTTTPKNGPGPTKTKTAGPDQTEMTIEGLQPTVEYVVSVYAQNPSGESQPLVQVAVPTIPAPTDLKFTQVTPTSLSAQWALPNVQLTGYRVRVTPKERTGPMKEINLAPDSSSVVVSGLMVATKYEVSVYALKDTLTSGPAQGVVTTLENVSPPRRARVTDATETTITISWRTKTETITGFQVDAVPANGQTPIQRTIKPDVRSYTITGLQPGTDYKIYLYTLNDNARSSPVVIDASTAIDAPSNLRFLATTPNSLLVSWQPPRARITGYIIKYEKPGSPPREVVPRPRPGVTEATITGLEPGTEYTIYVIALKNNQKSEPLIGRKKTVQKTPFVTHPGYDTGNGIQLPGTSGQQPSVGQQMIFEEHGFRRTTPPTTATPIRHRPRPYPPNVGQEALS

SEQ ID NO: 52637 - protein, 793 aa, Homo sapiens
  DOMAIN (706)..(718): FIBRONECTIN TYPE I REPEAT SIGNATURE domain identified by eMATRIX, accession number PR00012A, p-value=3.250e-14, raw score of 9.68
  DOMAIN (39)..(589): Fibronectin type III domain identified by PFam, accession name fn3, E-value=5.7e-94, PFam score of 325.6
QTEMTIEGLQPTVEYVVSVYAQNPSGESQPLVQTAVTNIDRPKGLAFTDVDVDSIKIAWESPQGQVSRYRVTYSSPEDGIHELFPAPDGEEDTAELQGLRPGSEYTVSVVALHDDMESQPLIGTQSTAIPAPTDLKFTQVTPTSLSAQWTPPNVQLTGYRVRVTPKEKTGPMKEINLAPDSSSVVVSGLMVATKYEVSVYALKDTLTSRPAQGVVTTLENVSPPRRARVTDATETTITISWRTKTETITGFQVDAVPANGQTPIQRTIKPDVRSYTITGLQPGTDYKIYLYTLNDNARSSPVVIDASTAIDAPSNLRFLATTPNSLLVSWQPPRARITGYIIKYEKPGSPPREVVPRPRPGVTEATITGLEPGTEYTIYVIALKNNQKSEPLIGRKKTDELPQLVTLPHPNLHGPEILDVPSTVQKTPFVTHPGYDTGNGIQLPGTSGQQPSVGQQMIFEEHGFRRTTPPTTATPIRHRPRPYPPNVGEEIQIGHIPREDVDYHLYPHGPGLNPNASTGQEALSQTTISWAPFQDTSEYIISCHPVGTDEEPLQFRVPGTSTSATLTGLTRGATYNIIVEALKDQQRHKVREEVVTVGNSVNEGLNQPTDDSCFDPYTVSHYAVGDEWERMSESGFKLLCQCLGFGSGHFRCDSSRWCHDNGVNYKIGEKWDRQGENGQMMSCTCLGNGKGEFKCDPHEATCYDDGKTYHVGEQWQKEYLGAICSCTCFGGQRGWRCDNCRRPGGEPSPEGTTGQSYNQYSQRYHQRTNTNVNCPIECFMPLDVQADREDSRE

SEQ ID NO: 52638 - protein, 2474 aa, Homo sapiens
  DOMAIN (504)..(541): Type II fibronectin collagen-binding domain proteins domain identified by eMATRIX, accession number BL00023, p-value=8.920e-33, raw score of 24.31
  DOMAIN (701)..(2267): Fibronectin type III domain identified by PFam, accession name fn3, E-value=3.1e-275, PFam score of 927.8
  misc_feature (1)...(2474): Xaa = X or * as defined in Table 2
GATMACCAAQGEERVTPCASGKRGPAATTSLVLWIPSVPPPVPFPTLWPPPSWRRQPPGGIRRDFSRRLRREANLVATCLPVRASLPHRLNMLKGPGPGLLLLAVLCLGTAVPSTGASKSKRQAQQMVQPQSPVAVSQSKPGCYDNGKHYQINQQWERTYLGNVLVCTCYGGSRGFNCESKPEAEETCFDKYTGNTYRVGDTYERPKDSMIWDCTCIGAGRGRISCTIANRCHEGGQSYKIGDTWRRPHETGGYMLECVCLGNGKGEWTCKPIAEKCFDHAAGTSYVVGETWEKPYQGWMMVDCTCLGEGSGRITCTSRNRCNDQDPRASYRIGDPWSNKVHRGNLLQCICTGNARGEWKCERHTSVQTTSSGSGPFTDVRAAVYQPQPHPQPPPYGHCVTDSGVVYSVGMQWLKTQGNKQMLCTCLGNGVSCQETAVNQNYRGNSNGEPCVLPFTYNGRTFYSCTTEGRQDGHLWCSTTSNYEQDQKYSFCTDHTVLVQTQGGNSNGALCHFPFLYNNHNYTDCTSEGRRDNMKWCGTTQNYDADQKFGFCPMAAHEEICTTNEGVMYRIGDQWDKQHDMGHMMRCTCVGNGRGEWTCIAYSQLRDQCIVDDITYNVNDTFHKRHEEGHMLNCTCFGQGRGRWKCDPVDQCQDSETGTFYQIGDSWEKYVHGVRYQCYCYGRGIGEWHCQPLQTYPSSSGPVEVFITETPSQPNFPPIQWNAPQPSHISKYILRWRPKNSVGRWKEATIPGHLNSYTIKGLKPGVWVYEGQLISIQQYGHQELTRFDFTTTSTSTPVTSNTVTGETTPFSPLVATSESVTEITASSFVVSWVSASDTVSGFRVEYELSEEGDEPQYLDLPSTATSVNIPDLLPGRKYIVNVYQISEDGEQSLILSTSQTTAPDAPPDPTVDQVDDTSIVVRWSRPQAPITGYRIVYSPSVEGSSTELNLPETANSVTLSDLQPGVQYNITIYAVEENQESTPVVIQQETTGTPRSDTVPSPRDLQFVEVTDVKVTIMWTPPESAVTGYRVDVIPVNLPGEHGQRLPLSRNTFAEVTGLSPGVTYYFKVFGQXATGRESKPLTAQQTTKLDAPTNLQFVNGTDSTVLVLRWTPLRAQITGYRLTVGLTRRGQPRQYNVGPSVSKYPLRNLQPASEYTVSLVAIKGNQENPKATGVFTTLQPGSSIPPYNTEVTETTIVITWTHAPRIGFKLGVRPSNPGEAPREVTSDSGSIVVSGLTPGVEYVYTIQVLRDGQDRDAPIVNKVVTPLSPPTNLHLEANPDTGVLTVSWERSTTPDITGYRITTTPTNGQQGNSLEEVVHADQSSCTFDNLEVPGLEYNVSVYTVKDDKESVPISDTIIPAVPPPTDLRFTNIGPDTMRVTWAPPPSIDLTNFLVRYSPVKNEEDVAELSISPSDNAVVLTNLLPGTEYVVSVSSVYEQHESTPLRGRQKTGLDSPTGIDFSDITANSFTVHWIAPRATITGYRIRHHPEHFSGRPREDRVPHSRNSITLTNLTPGTEYVVSIVALNGREESPLLIGQQSTVSDVPRDLEVVAATPTSLLISWDAPAVTVRYYRITYGETGGNSPVQEFTVPGSKSTATISGLKPGVDYTITVYAVTGRGDSPASSKPISINYRTEIDKPSQMQVTDVQDNSISVKWLPSSSPVTGYRVTTTPKNGPGPTKTKTAGPDQTEMTIEGLQPTVEYVVSVYAQNPSGESQPLVQTAVTNIDRPKGLAFTDVDVDSIKIAWESPQGQVSRYRVTYSSPEDGIHELFPAPDGEEDTAELQGLRPGSEYTVSVVALHDDMESQPLIGTQSTAIPAPTDLKFTQVTPTSLSAQWTPPNVQLTGYRVRVTPKEKTGPMKEINLAPDSSSVVVSGLMVATKYEVSVYALKDTLTSRPAQGVVTTLENVSPPRRARVTDATETTITISWRTKTXTITLGFQVDAVPANGQTPSQRAIKPDVRSYTITGLQQGTDYKIYLCTLNDNARSSPVVIDASTAIDAPSNLRFLATTPNSLLVSWQPPRARITGYIIKYEKPGSPPREVVPRPRPGVTEATITGLEPGTEYTIYVIALKNNQKSEPLIGRKKTDELPQLVTLPHPNLHGPEILDVPSTVQKTPFVTHPGYDTGNGIQLPGTSGQQPSVGQQMIFEEHGFRRTTPPTTATPIRHRPRPYPPNVGQEALSQTTISWAPFQDTSEYIISCHPVGTDEEPLQFRVPGTSTSATLTGLTRGATYNMIMEALKDQHRHKVREEVVTVGNSVNEGLNQPTDDSCFDPYTVSHYAVGDEWERMSESGFKLLCQCLGFGSGHFRCDSSRWCHDNGVNYKIGEKWDRQGENGQMMSCTCLGNGKGEFKCDPHEATCYDDGKTYHVGEQWQKEYLGAICSCTCFGGQRGWRCDNCRRPGGEPSPEGTTGQSYNQYSQRYHQRTTHNLNCPIEVLMPLDVQADRRRFPESKSSFPIQRNQACLSAKIHLKLE

SEQ ID NO: 52639 - protein, 133 aa, Homo sapiens
  DOMAIN (60)..(95): Prion protein domain identified by eMATRIX, accession number BL00291A, p-value=4.621e-09, raw score of 4.49
NSTNKRRGFCFITFKEEMEKKYHNVGLSKCEIKVAMSKEQYQQQQQWGSRGGFAGRARGRGGGPSQNWNQGYSNYWNQGYGNYGYNSQGYGGYGGYDYTGYNNYYGYGDYSNQQSGYGKVSRRGGHQNSYKPY

SEQ ID NO: 52640 - protein, 59 aa, Homo sapiens
  misc_feature (1)...(59): Xaa = X or * as defined in Table 2
MAPSCSPAEPPTAAVALPXAPALPREAHKTGKARAWLQRLLRLSLACPLRLPLWRRTLP

SEQ ID NO: 52641 - protein, 59 aa, Homo sapiens
HWNQGYGNYGYNSQGYGCYGGYDYTGYNNYYGYGDYSNQQSGYGKVSRRGGHQNSYKPY

SEQ ID NO: 52642 - protein, 76 aa, Homo sapiens
  misc_feature (1)...(76): Xaa = X or * as defined in Table 2
LESMTIFPYSDDKRAQYIFIQKDLLKKPVRHYYIMTLSHWAFNTRLALQYWGKGHKTQIDSEAXQLRNKTMKANFF

SEQ ID NO: 52643 - protein, 343 aa, Homo sapiens
  DOMAIN (99)..(118): Eukaryotic  RNA-binding region RNP-1 proteins domain identified by eMATRIX, accession number BL00030A, p-value=8.071e- 13, raw score of 14.39
  DOMAIN (99)..(254): RNA recognition motif. domain identified by PFam, accession name rrm, E-value=9.3e-48, PFam score of 172.1
MSEEQFGGDGAAAAATAAVGGSAGEQEGAMVAATQGAAAAAGSGAGTGGGTASGGTEGGSAESEGAKIDASKNEEDEGHSNSSPRHSEAATAQREEWKMFIGGLSWDTTKKDLKDYFSKFGEVVDCTLKLDPITGRSRGFGFVLFKESESVDKVMDQKEHKLNGKVIDPKRAKAMKTKEPVKKIFVGGLSPDTPEEKIREYFGGFGEVESIELPMDNKTNKRRGFCFITFKEEEPVKKIMEKKYHNVGLSKCELKVAMSKEQYQQQQQWDSRGGCAGRARGRGGDQAEGYGKGIQARWAIKNSYKPYLNYSICQPYPPTAGTSLQALCRADFRFSQARSMRTG

SEQ ID NO: 52644 - protein, 395 aa, Homo sapiens
  DOMAIN (188)..(207): Eukaryotic  RNA-binding region RNP-1 proteins domain identified by eMATRIX, accession number BL00030A, p-value=5.500e- 12, raw score of 14.39
  DOMAIN (109)..(278): RNA recognition motif. domain identified by PFam, accession name rrm, E-value=4.3e-15, PFam score of 63.6
  misc_feature (1)...(395): Xaa = X or * as defined in Table 2
HYVGGSSSGGDGAAARATARAVGGSAGEQEGAMVAATHGARGGVWEADAATGGGTASGGTEGGSAESEGAKIYASKNEEDEGHSNSSPRHSEAATAQRGRMKMVIGGLSWDTTKKDLKDYFSKFGEVVDCTLKLDPITGQSRGFGFVLFKESESVDKVMDQKEHKLNGKVNDPKRAKAMKTKEPVKKIFVGGLSPDTPEEKIREYFGGFGEVESIELPMDNKTNXRGRGFCFITFKEEEPVKKIMEKKYHNVGLSKCEIKVVLLNEQYQQQQQWXSIGGFAGIALVIGGGPSQNWNQGYSNYWNQGYGNYGYSSQGYGGYGGYDYTGYNNYYGYGDYSNQQSGYGKVSRRGGHQNSYKPHTKFIPICNLFPNRWLKQYFPNLKIQFERGSCHLLN

SEQ ID NO: 52645 - protein, 60 aa, Homo sapiens
EESEPERKRARTDEVLPEEAAPRRKMRTTRTTCPVSRYAAPQLLLQKLLQRRRKGSCSRG

SEQ ID NO: 52646 - protein, 451 aa, Homo sapiens
  DOMAIN (262)..(286): DEAD-box subfamily ATP-dependent helicases proteins domain identified by eMATRIX, accession number BL00039C, p-value=4.600e- 11, raw score of 15.63
  DOMAIN (260)..(279): DEAD/DEAH box helicase domain identified by PFam, accession name DEAD, E-value=0.00056, PFam score of 15.4
MLWERLGTWQAAPTPISCLRCYLRNKFVPRAIRNSEVVPTRRRSPLTSDWVSRKDEAGFRRGRMRAAKNGGVGTRTEAGSHRRGPAGGSRSEAEDEDDEDSCPMCRYGSAGSYCAQRVCQGEALKEEEKILESVAEGRALMSVKEMVRALRMMTPSKPGVVPVLQAWGSEKVPVSHEDDVGWFHSHPERPEEERHSPPNPIQIQGIPTIGSWPGRPWHPGVLLPPAAGGQLTILRCALCIGGMSVKEQMRPSDKEDGQPRHLSHLALDEADRMIDMGFEGTSVPSSPTSRPFLGHQPLAARGFWSPLVQMTGHGRAVAGGRICEEEAKMVYLLECLQKTPRLTPDWPHRALGNTGIATTFINKACGERGWPSAGAWVIGSLTAPNSGYADQAGPPGESEDGVCTLCVYKAMWGPALRRQWQNHEACLCTLAKQFLALHRLFPADPNELKPF

SEQ ID NO: 52647 - protein, 41 aa, Homo sapiens
MWGPALRRQWQNHEACLCTLAKQFLALHRLFPADPNELKPF

SEQ ID NO: 52648 - protein, 580 aa, Homo sapiens
  DOMAIN (75)..(88): Thioredoxin family proteins domain identified by eMATRIX, accession number BL00194, p-value=1.000e-10, raw score of 12.16
MKGYLGKYQDMGVTIYLTPDGKHAISGYMYNEKGENLSNTLIEKEIYAPAGREMWQRMEQSHWLLDGKKDAPVIVYVFADPFCPYCKQFWQQARPWVDSGKVQLRTLLVGVIKPESPATAAAILASKDPAKTWQQYEASGGKLKLNVPANVSTEQMKVLSDNEKLMDDLGANVTPAIYYMSKENTLQQAVGLPDLTEDRKEQSNKCWGAWCREGSWLLLVWSEWALMEKTAFEQKLEGGEGEAVRSTQNLDVPWGWAPLDFLVDLSLLLAPFEAAAQEAAEAAEQDDETPDEPEAGEAREERVGALGHHHGGGTGGGSSDASLDTGLRCVAPGPRHTLRCRQRHSGTRGRGLPVAGQPLQGPLTTVLPGAVGHLFLLEAFLDHSTLSESSKALTVYTHAGHPVHMGPTALNGPNHLCAHCGPSSPKLRPPQTPHPLRSHRHFNSEKPRLWKEQEEEVARKWQSQDNTPRPDLQKFLCFSIPSDNHLPTIEAVRQQARPYESVLMDLKALLLEAKQKVPPVLQVLHCGDESMLDIGGERGCAFCGGLGHRITDCPKLEAMQTKQVSNIGRKDYLAHSSMDF

SEQ ID NO: 52649 - protein, 98 aa, Homo sapiens
  DOMAIN (76)..(95): DEAD/DEAH box helicase domain identified by PFam, accession name DEAD, E-value=0.00056, PFam score of 15.4
  misc_feature (1)...(98): Xaa = X or * as defined in Table 2
XHPERPEEERHSPPNPIQIQGIPTIGSWPGRPWHPGVLLPPAAGGQLTILRCALCIGGMSVKEQMRPSDKEDGQPRHLSHLALDEADRMIDMGFEGTS

SEQ ID NO: 52650 - protein, 314 aa, Homo sapiens
  DOMAIN (144)..(168): DEAD-box subfamily ATP-dependent helicases proteins domain identified by eMATRIX, accession number BL00039C, p-value=4.000e- 18, raw score of 15.63
  DOMAIN (48)..(168): DEAD/DEAH box helicase domain identified by PFam, accession name DEAD, E-value=1.1e-13, PFam score of 46.1
ISWCCMEQKKRLPFSKREGPYEFIICPSEDSSPLLRCAFCIGGMSVKEQMETIRHPLQTTRGPGPGPLFTDGPDPIPEAFLHGLLSIREMVSTEKVKPVGQESEPRVKPLELDDSASGGVHMMVATPGRLMDLLQKKMVSLNICRYLALDEADRMIDMGFEGDIRTIFSYFKHTSAAAIGLQLALDGGTGSGQKGKCEEFPSSMSAVSTGLEASACCLSVTMDPLETLSRMASSTSSMSSLARAWLSPEPGDSPGMVGGLPRELPGMAPLECGEFQRPESLCADRNELGSQSPEFPGQEEEDEDEDDEEEDEDE

SEQ ID NO: 52651 - protein, 648 aa, Homo sapiens
  DOMAIN (507)..(553): DEAD-box subfamily ATP-dependent helicases proteins domain identified by eMATRIX, accession number BL00039D, p-value=7.000e- 33, raw score of 21.67
  DOMAIN (221)..(443): DEAD/DEAH box helicase domain identified by PFam, accession name DEAD, E-value=1.7e-51, PFam score of 165.8
  misc_feature (1)...(648): Xaa = X or * as defined in Table 2
GGVSPWRACVQQRMEESEPERKRARTDEVLPEEAAPRRKMRTTRTTCPMCRYGSAGSLLLQKLLQRRRKGAAEEEQQDSGSEPRGDEDDIPLGPQSNVSLLDQHQHLKEKAESAAKESCQGRKQLEGKKEKILGRIVCRRAELDVKXKADWLKGITVLIDPIKTQLGLPPRYMFLSMSEERHERVRKKYHILVEGDGIPPPIKSFKEMKFPAAILRGLKKKGIHHPTPIQIQGIPTILSCRDMIGIAFTGSGKTLVFTLPVIMFCLEQEKRLPFSKREGPYGLIICPSRELARQTHGILEYYCRLLQEDSSPLLRCALCIGGMSVKEQMETIRQGVHMMVATPGRALMDLLQKKMVSLDICRYLALDEADRMIDMGFEGDIRTIFSYFKGQRQTLLFSATMPKKIQNFAKSALVKPVTINVGRAGAASLDVIQEVEYVKEEAKMVYLLECLQKTPPPVLIFAEKKADVDAIHEYLLLKGVEAVAIHGGKDQEERTKAIEAFREGKKDVLVATDVASKGLVFPAIQHVINYDMPEEIENYVHRIGRTGRSGNTGIATTFINKACDESFLIDLKALLVRKPKQKVPPVLQVLHCGGWSPMLDIGRSSRGCAFCGGLGHRITDCPKLEAMQTKQVSNIGRKDYLAHSSMDF

SEQ ID NO: 52652 - protein, 331 aa, Homo sapiens; identical to SEQ ID NO: 36089
  DOMAIN (197)..(211): ACONITASE FAMILY SIGNATURE domain identified by eMATRIX, accession number PR00415I, p-value=2.946e-13, raw score of 13.62
  DOMAIN (6)..(260): Aconitase family (aconitate hydratase) domain identified by PFam, accession name aconitase, E-value=1.7e-103, PFam score of 340.7

SEQ ID NO: 52653 - protein, 199 aa, Homo sapiens
  DOMAIN (164)..(179): ACONITASE FAMILY SIGNATURE domain identified by eMATRIX, accession number PR00415G, p-value=7.750e-14, raw score of 14.24
  DOMAIN (66)..(198): Aconitase family (aconitate hydratase) domain identified by PFam, accession name aconitase, E-value=2e-43, PFam score of 144.3
HKMAPYSPLVTRLQKALGVRQYHVASVLCQRAKMAMSHFEPNEYIHYDLLEKNINIVCKRLNWPLTLLEKIVYGHLDDPASQEIEQGKSYLWLWPDHVAMLQFISKIGATTSVFPYNHRMRRYLSKTGRTDIANLADEFQDHLVPDPGCHYDQLIEINLSELKPHINGPFTPDQAHPVAEVGKVAEKEGWPLDIRVGLT

SEQ ID NO: 52654 - protein, 161 aa, Homo sapiens
  DOMAIN (72)..(86): ACONITASE FAMILY SIGNATURE domain identified by eMATRIX, accession number PR00415E, p-value=1.000e-12, raw score of 10.04
  DOMAIN (6)..(159): Aconitase family (aconitate hydratase) domain identified by PFam, accession name aconitase, E-value=4.6e-60, PFam score of 198.7
LNRPLTLSEKIVYRHPDDPTSQEIERGGTYLQQWPDSVTMQVIGVKLMGSLSGWTSPKDVILKVAGILTMKGGTGAIVEYHGPVVDSISCTGMVTVCNMGLEIGTTTSVFHYNLRMKKYMSKTCQADIANLADEFKDHLVPDPGCHYDQLIEVNPSELKLH

SEQ ID NO: 52655 - protein, 181 aa, Homo sapiens
  DOMAIN (146)..(161): Aconitase family proteins domain identified by eMATRIX, accession number BL00450E, p-value=5.333e-14, raw score of 16.34
  DOMAIN (134)..(172): Aconitase family (aconitate hydratase) domain identified by PFam, accession name aconitase, E-value=1.4e-17, PFam score of 59.8
MAPYSLLVTRLQVKASPAQSAFLTLSLPRKKGFYRAVARVFQRSGYRVLSQSAYLERVWLLDSFRNAPLSQEPGNSYDHDYEFELGTQLNDSIAEELNKKLANKMRSRPLIRSPKSHTMWLLPFSYMLFQPHLQSKDIKKGEKNTIVTSYNRNFTGRNDANPETHAFVTSPEVRLPSCAQA

SEQ ID NO: 52656 - protein, 78 aa, Homo sapiens; identical to SEQ ID NO: 49586
  DOMAIN (61)..(75): ACONITASE FAMILY SIGNATURE domain identified by eMATRIX, accession number PR00415I, p-value=2.946e-13, raw score of 13.62
  DOMAIN (2)..(77): Aconitase family (aconitate hydratase) domain identified by PFam, accession name aconitase, E-value=4.6e-42, PFam score of 139.8
  misc_feature (1)...(78): Xaa = X or * as defined in Table 2

SEQ ID NO: 52657 - protein, 802 aa, Homo sapiens
  DOMAIN (278)..(292): ACONITASE FAMILY SIGNATURE domain identified by eMATRIX, accession number PR00415F, p-value=1.000e-14, raw score of 11.66
  DOMAIN (69)..(526): Aconitase family (aconitate hydratase) domain identified by PFam, accession name aconitase, E-value=1.2e-202, PFam score of 664.9
  misc_feature (1)...(802): Xaa = X or * as defined in Table 2
SVHKMAPYSLLVTRLXKALGVRQYHVGSVLCQRARVAMSHFEPNEYIHYDLLEKSINIVRKRLNRPLTLSEKIVYGHLDDPASQEIERGKSYLRLRPDRVAMQDATAQMAMLQFISSGLSKVAVPSTIHCDHLIEAQVGGEEDLRRAKDINQEVYNFLATAGAKYGVGFWKPGSGIIHQIILENYCVPWLSFXLGPDFHTPNGGGLGGICIGSCGWPNAWEWNGLGIPWELKCPKVIGVKLTGSLSGWPSPKDVILKVAGILTVKGGTGAIVEYQGPGVDSISCTGMATICNMGAEIGATTSVFPYNHRMKKYLSKTGREDIANLADEFKDHLVPDPGCHYDQLIEINLSELKPHINGPFTPDLAHPVAEVGKVAEKEGWPLDIRVGLIGSCTNFKLWKIWGRSAAVAKQALAHGLKCKSQFTITPGFPRQIRATFERDGYAQILRDLGGIVLANACGPCIGQWDRKDIKKGEKNTIVTSYNRNFTGRNDANPETHAFVTSPEIVTALAIAGTLKFNPETDYLTGHGWARSFRLGGSRIADXVFPKGEFXPRGRDTYQHPPKDSSGAACWDLSPTSQRLQLLEPFDKWDGKDLEDLQILIKVKGKCTTDHISAAGPWLKFRGHLDNISNNLLIGAINIENGKANSVGNPVTQEFGPAPDLARYYKKHGIRWVVIGDENYGEGSSREHAALEPRHLGGGAIITKSFAQIHETNPEENRGLLPLTFADPADYQPRFPPVDKLTIQGPERDFTPGKAPXKCIIKPPHRGPQENHPSLNHTLQRDARLKWFRAGSALNRNEGNCKQ

SEQ ID NO: 52658 - protein, 83 aa, Homo sapiens
  DOMAIN (14)..(32): INHIBIN BETA C CHAIN SIGNATURE domain identified by eMATRIX, accession number PR00672B, p-value=4.162e-09, raw score of 11.03
  misc_feature (1)...(83): Xaa = X or * as defined in Table 2
RLCIGDAGVSPVCGPCSAGGGPRXLNLEGGEESSSVPRGGCCSPVTATTAPGPCFPKXSDGSGCAEAPDSGECSXALGPHCGD

SEQ ID NO: 52659 - protein, 100 aa, Homo sapiens
  misc_feature (1)...(100): Xaa = X or * as defined in Table 2
RLCIGDAGVSPVCGPLSAGGGPRXLNLXGGEESSSVPRGGCCSPVTATTAPGPCFPKXSDGSGCAEAPDSGNCGAFCALRSPHRHPGPKPARERLLLTGL

SEQ ID NO: 52660 - protein, 125 aa, Homo sapiens
  DOMAIN (37)..(83): DEAD-box subfamily ATP-dependent helicases proteins domain identified by eMATRIX, accession number BL00039D, p-value=1.000e- 28, raw score of 21.67
  DOMAIN (4)..(79): Helicases conserved C-terminal domain identified by PFam, accession name helicase_C, E-value=4.7e-16, PFam score of 66.8
SLGCAEQNFPAIAIQPGMAQEERLSRYQQFKDFQRRILVATNLFGRGMDIERVNIVFNYDMPEDSDTYLHRVARAGRFGTKGLAITFVSDENDAKILNDVQDRFEVNVAELPEEIDISTYIEQSR

SEQ ID NO: 52661 - protein, 197 aa, Homo sapiens
  DOMAIN (109)..(155): DEAD-box subfamily ATP-dependent helicases proteins domain identified by eMATRIX, accession number BL00039D, p-value=1.000e- 28, raw score of 21.67
  DOMAIN (65)..(151): Helicases conserved C-terminal domain identified by PFam, accession name helicase_C, E-value=6.8e-14, PFam score of 59.6
RFSKYMPSVKVSVFSRGLSIKKDEEVLKKNCPHVVVRTRARILALVRNRSFSLQNVKHFVLDECDKMLEQLDMRRDVQEIFRLTPHEKQCMMFERLSRYQQFKDFQRRILVATNLFGRGMDIERVNIVFNYDMPEDSDTYLHRVARAGRFGTKGLAITFVSDENDAKILNDVQDRFEVNVAELPEEIDISTYIEQSR

SEQ ID NO: 52662 - protein, 191 aa, Homo sapiens
  DOMAIN (53)..(92): DEAD-box subfamily ATP-dependent helicases proteins domain identified by eMATRIX, accession number BL00039A, p-value=6.114e- 17, raw score of 18.44
  DOMAIN (47)..(181): DEAD/DEAH box helicase domain identified by PFam, accession name DEAD, E-value=3.1e-42, PFam score of 136.5
ARGDEEEEPQAPQESTPAPPKKDIKGSYVSIHSSGFRDFLLKPELLRAIVDCGFEHPSEVQHECIPQAILGMDVLCQAKSGMGKTAVFVLATLQQIEPVNGQVTVLVMCHTRELAFQISKEYERFSKYMPSVKDEEVLKKNCPHVVVGTPGRILALVRNRSFSLKNVKHFVLDECDKMLEQLDMRRDVQEI

SEQ ID NO: 52663 - protein, 104 aa, Homo sapiens
  DOMAIN (15)..(99): DEAD/DEAH box helicase domain identified by PFam, accession name DEAD, E-value=1.3e-15, PFam score of 52.3
  misc_feature (1)...(104): Xaa = X or * as defined in Table 2
XSGFRDFLLKPELLRAIVDCGFEHPSEVQHECIPQASVKVSVFFGGLSIKKDEEVLKKNCPHVVVGTPGRILALVRNRSFSLKNVKHFVLDECDKMLEQLGSPP

SEQ ID NO: 52664 - protein, 146 aa, Homo sapiens
  DOMAIN (79)..(128): DEAD/DEAH box helicase domain identified by PFam, accession name DEAD, E-value=0.008, PFam score of 11.8
AHGHGCSAPACKWIAAPPAPALAGHPPARQAPGLATPAAHSALVTVPLAPWHRLGGVWVWSGVGVLHGRRSCPPMSCPPHLDMRRDVQEIFRLTPHEKQCMMFSATLSKDIRPVCRKFMQDVSRARVAALAFPRGLEPGAPGHPHG

SEQ ID NO: 52665 - protein, 117 aa, Homo sapiens
ILRNAVEIFSGQQSLGAAIAVGLDHVLRPLLHLQLNGQLLLQARHAAQVGGRAGGATRTRGLGAIFVSDENDAKILNDVQDRFEVNVAELPEEIDISTYSKCPGLIVASARRGGGEF

SEQ ID NO: 52666 - protein, 437 aa, Homo sapiens
  DOMAIN (381)..(427): DEAD-box subfamily ATP-dependent helicases proteins domain identified by eMATRIX, accession number BL00039D, p-value=1.000e- 28, raw score of 21.67
  DOMAIN (57)..(295): DEAD/DEAH box helicase domain identified by PFam, accession name DEAD, E-value=6.9e-46, PFam score of 148.0
MAEQDVENDLLDYDEEEEPQAPQESTPAPPKKDIKGSYVSIHSSGFRDFLLKPELLRAIVDCGFEHPSEVQHECIPQAILGMDVLCQAKSGMGKTAVFVLATLQQIEPVNGQSGQVHIFGLHIGARALVISEHILKDEGAVEGCGVVQCLMARVTVLVMCHTRELAFQISKEYERFSKYMPSVKVSVFFGGLSIKKDEEVLKKNCPHVVVGTPGRILALVRNRSFSLKNVKHFVLDECDKMLEQLDMRRDVQEIFRLDTTPRKQCMMFSATLSKDIRPVCRKFMQDPMEVFVDDETKLTLHGLQQYYVKLKTSEKNRSLFDLLDVLEFNQVIIFVKSVQRCMALAQLLVEQNFPAIAIHRGMAQEERLSRYQQFKDFQRRILVATNLFGRGMDIERVNIVFNYDMPEDSDTYLHRVARAGRFGTKGLAITFVSDEND

SEQ ID NO: 52667 - protein, 502 aa, Homo sapiens
  DOMAIN (139)..(165): DEAD-box subfamily ATP-dependent helicases proteins domain identified by eMATRIX, accession number BL00039B, p-value=8.953e- 12, raw score of 19.19
  DOMAIN (129)..(292): DEAD/DEAH box helicase domain identified by PFam, accession name DEAD, E-value=7.2e-29, PFam score of 94.2
  misc_feature (1)...(502): Xaa = X or * as defined in Table 2
EAQQLVSERPAENRSWKCLLAARGEERGASIMAEQDVENDLLDYDEEEEPQAPQESTPAPPKKDIKGSYVSIHSSGFRDFLCLKPELLRAIGGLVAFEHPSEVQHECIPQGHPGAWDVLLPGQSPGMGKTAVFRCWPPLQQIEPVNGQVTVLVMCHTRELAFQISKEYERFSKYMPSVKVSVFFGGLSIKKDEEVMKKNCPHVVVGTPGRILALVRNRSFSLKNVKHFVLDECDKMLEQLDMRRDVQEIFRLTPHEKQCMMFSATLSKDIRPVCRKFMQDPMEVFVDDETKLTLHGLQQYYVKLKDSEKTRKVFDLWDVLEFNQVDILRQGQCKRCMALAQLLVEQNFPAQWPIHRGNGPQKERPVNAYQASSKDFPSGRDPLVATQILFGRGMDIEAKSNIVFNYDMPXGLGTPYLHRVARRGRFGTKRPXPFTFVSDGNDAKILNDVQDRFXSXMWAELPEEIDISTYIEQSRLNHQLARAGPPGAAPHAASPPLSRRHC

SEQ ID NO: 52668 - protein, 95 aa, Homo sapiens
AAPTSEWPTVSVKRDLLFQALGRTYTDEEFDELCFEFGLELDEITSEKEIISKEQGNVKAAGASDVVLYKIDVPFSSPSVLKSSSTGNIYLGFDV

SEQ ID NO: 52669 - protein, 229 aa, Homo sapiens
  DOMAIN (99)..(126): SYNTHETASE BETA CHAIN LIGASE PHENYLALANYL-TRNA domain identified by eMATRIX, accession number PD02410D, p-value=5.846e- 10, raw score of 19.06
MNQTSEKEIISKEQGNVKAAGASDVVLYKIDVPANRYDLLCLEGLVRGLQVFKERNFFLTVLEVEKSKTKVEQIQCLCSQEDIADKLGVDISATKAVHISNPKTAEFQVARTTLLPGLLKTIAANRKMPLPLKLFEISDIVIKDSNTDVGAKNYRHLCAVYYNKNPGFEIIHGLLDRIMQLLDVPPGEDKGGYVIQSVGKLGVLHPDVITKFELTMPCSSLEINIGPFL

SEQ ID NO: 52670 - protein, 604 aa, Homo sapiens
  misc_feature (1)...(604): Xaa = X or * as defined in Table 2
GTRPTVSVKRDLLFQALGRTYTDEEFDELCFEFGLELDEITSEKEIISKEQGNVKAAGASDVVLYKIDVLATRYDLLCLEGLVRGLQVFKERIKAPVYKRVMPDGKIQKLIITEETAKIRPFAGAAVLRNIKFTKDRYDSFIELQEKLHQNICRKRALVAIGTHDLDTLSGPFTYTAKRPSDIKFKPLNKTKEYTACELMNIYKTDNHLKHYLHIIENKPLYPVIYDSNGVVLSMPPIINGDHSRITVNTRNIFIECTGTDFTKAKIVLDIIVTMFSEYCENQFTVEAAEVVFPNGKSHTFPELAYRKEMVRADLINKKVGIRETPENLAKLLTRMYLKSEVIGDGNQIEIEIPPTRADIIHACDIVEDAAIAYGYNNIQMHSPENFTPXANQFPLNKLTELLRHDMAAAGFHXSTLPLALCSQGRYWLDKLGVGYLWQQRAVHISNPKTAEFQVARTTLLPGPPXRPXAANRKVPLPLKLFEISDIVIKDSNTDVGAKKTTRQSLVAGLLPTKNPGFEINSWGCWDRIMAVCSDVPPGGRQGGDMXFKASEGPAFFPGAMCRDSFARGQSLGKLGVLHPDVIHQIWSXPLPCSSLEINIGPFL

SEQ ID NO: 52671 - protein, 101 aa, Homo sapiens
FSIFLNVYYFKSELFFKDDKTHFYSSRKGSQVCPRVQERPEGRAPRPLHLSLGTYNLRDPVRGWGQLGGTACGHFGQRVGGDPRAAAQGILCSLHCFPRPV

SEQ ID NO: 52672 - protein, 214 aa, Homo sapiens
  DOMAIN (19)..(73): CD36 family domain identified by eMATRIX, accession number PF01130D, p-value=5.865e-19, raw score of 26.65
MAMAHYVNHHPNQVFWGRGAPLFLSHPHFLNADPVLAEAVTGLHPNQEAHSLFLDIHPAEPGHDKIRDAVRAWSSSLDNQDVVSALIINEYREQGGTAISFPEDISRARQKLFRFLDNRFDSDQYRENVRELTPAIMAVLPVEFRTRLAPQNDTMSLIASAMKECSEAKQAVLLNAPEHQKMKEVSEGIASLFRLMPEQVGPLMTMVTSMLGVI

SEQ ID NO: 52673 - protein, 140 aa, Homo sapiens
MTLRLIMTLAFTTLGDVPFMNRTVGEIMWGYKDPLVNLINKYFPGMFPFKDKFGLFAEVRVAWDFADFGTTIKQDFRLLGQTSVDRLLQLSQGQAVKGNQLLPVSLEAGQYGHTQAYAYSIQGDGPEDDDERMLDFIHGA

SEQ ID NO: 52674 - protein, 175 aa, Homo sapiens
  misc_feature (1)...(175): Xaa = X or * as defined in Table 2
LHEHPVTESPMNCSVTLQLSLYMKSVAGIGQTGKIEPVVLPLLWFAESGAMEGETLHTFYTQLVLMPKVMHYAQYVLLALGCVLLLVPVICQIRSQDRCWPEGSPGXQPFAFPPAXTDIILWTEPATLMAEVSACCAPELPPPPHRVPQIIGAQAEVNEPGGPAFRALLDPGANL

SEQ ID NO: 52675 - protein, 160 aa, Homo sapiens
VRGSGNSHGEVSKGRMCLAGALPLPGACAALVLLLVILPEPLRCPLHTLYGGRDPVDSIRLWRQAGEFRHKSNITFNNNDTVSFLEYRTFQFQPSKSHGSESDYIVMPNILVLNKPRSTWISVCFVHGCIPASRTGPRTESMHSKSLWKAWLAAPGLPLL

SEQ ID NO: 52676 - protein, 537 aa, Homo sapiens
  DOMAIN (362)..(416): CD36 family domain identified by eMATRIX, accession number PF01130D, p-value=7.221e-22, raw score of 26.65
  DOMAIN (28)..(478): CD36 family domain identified by PFam, accession name CD36, E -value=1.5e-200, PFam score of 679.6
  misc_feature (1)...(537): Xaa = X or * as defined in Table 2
RRRPRLLPGAEPCEPRVGPRRADMGCSAKARWAAGALGVAGLLCAVLGAVMIVMVPSLIKQQVLKNVRIDPSSLSFNMWKEIPIPFYLSVYFFDVMNPSEILKGEKPQVRERGPYVYKESSRHKSNITFNNNDTVSFLEYRTFQFQPSKSHGSESDYIVMPNILVLGVAVMMENKPMTLKLIMTLAFTTLGERAFHGTALWGEVMWGYKDPLVNLINKYFPGMFPFKGGFGVFAELNNSDSGLFTVFTGVQNISRIHLVDKWNGLSKVDFWHSDQCNMINGTSGQMWPPFMTPESSLEFYSPEACRSMKLMYKESGVFEGIPTYRFVAPKTLFANGSIYPPNEGFCPCLESGIQNVSTCRFSAPLFLSHPHFLNADPVLAEAVTGLHPNQEAHSLFLDIHPVTIIPMNCSVKLQLSLYMKSVAGIGQTGKIEPVVLPLLWFAESGAMEGETLHTFYTQLVLMPKVMHYAQYVPSWALGCVLLLVPVLSCQIRSQEKCYLFWSSSKKGSKDKEAIQAGSEXSLMTSAPKGSVLQEAKL

SEQ ID NO: 52677 - protein, 284 aa, Homo sapiens
  DOMAIN (79)..(91): PROLYL AMINOPEPTIDASE (S33) FAMILY SIGNATURE domain identified by eMATRIX, accession number PR00793B, p-value=8.500e- 09, raw score of 11.34
  DOMAIN (79)..(284): alpha/beta hydrolase fold domain identified by PFam, accession name abhydrolase, E-value=1.6e-05, PFam score of 31.7
  misc_feature (1)...(284): Xaa = X or * as defined in Table 2
STCVEMPRNLLYSLLSSHLSPHFSTSVTSAKVAVNGVQLHYQHFGEGDHAVLLLPGMLGSGETDFGPQLKNLNKKLFTVVAWDPRGYGHSRPPDRDFPADFFERDAKDAVDLMKALKFKKVSLLGWSDGGITALIAAAKYPSYIHKMVIWGANAYVTDERPAGXYEGHPRMVSQMGVEGKKESLXEALYGYDYFARTCEKWVDGIRQFKHLPDGNICRHLLPRVQCPPPLIVHGEKDPLVPRFHADFIHKHVKGSRLHLMPEGKHNLHLRFADEFNKLAEDFLQ

SEQ ID NO: 52678 - protein, 22 aa, Homo sapiens
  misc_feature (1)...(22): Xaa = X or * as defined in Table 2
AQASPPLLPPXXERSNVPCPIS

SEQ ID NO: 52679 - protein, 330 aa, Homo sapiens
  misc_feature (1)...(330): Xaa = X or * as defined in Table 2
FILEDITGYVMAPIDGLLCREPRRGLYLEGTKPMTLFQIQFLNSVGDLLDLIPSLSPTKNGSLKVFKRWDMGHCSALIKVLPGFENILFAHSSWYTYAAMLRIYKHWDFNIIDKDTSSSRLSFSSYPGFLESLDDFYILSSGLILLQTTNSVFNKTLLKQVIPETLLSWQRVRVANMMADSGKRWADIFSKYNSGTYNNQYMVLGPEESKAEPQSLTKGTPVTLWEQIPTYVRNISGTNLMFLRGKGFWASYNVPFHEKIYNWSGLSHCXFRKLGLGPTPYDFRPHEPKIFRRDPRDKXLIRHPMKYIMRYNNYKEDPYSRGDPPVNTHP

SEQ ID NO: 52680 - protein, 102 aa, Homo sapiens
  DOMAIN (48)..(102): Serine carboxypeptidase domain identified by PFam, accession name serine_carbpept, E-value=0.024, PFam score of 11.6
IIGGYAEFLYQIGLLDEKQKKYFQKQCHECIEHIRKQNWFEAFEEPEDQLYYVKFLSLPEVRQAIHVGNQTFNDGTIVEKYLREDTVQSVKPWLTEIMNNYK

SEQ ID NO: 52681 - protein, 299 aa, Homo sapiens
  DOMAIN (3)..(29): CARBOXYPEPTIDASE C SERINE PROTEASE (S10) FAMILY SIGNATURE domain identified by eMATRIX, accession number PR00724C, p-value= 6.400e-26, raw score of 15.19
  DOMAIN (2)..(299): Serine carboxypeptidase domain identified by PFam, accession name serine_carbpept, E-value=7.6e-32, PFam score of 119.2
  misc_feature (1)...(299): Xaa = X or * as defined in Table 2
FQFFQIFPEYKNNDFYVTGESYAGKYVPAIAHLIHSLNPVREVKINLNGIAIGDGYSDPESIIGGYAEFLYQIGLLDEKQKKYFQKQCHECIEHIRKQNWFEAFEILDKLLDGDLTSDPFLTSQNVTGCSNYYNFLRCTEPEDQLYYVKFLSLPEVRPAHPTLGNQTFNDGPIVXKVPCGEDTSTSPVKPWLTEIMNNYRVLIYNGQLGHPSVAAAPDQSAPLMGMDWKGSPEYKKAEKKVWKIFKSDSEVAGYIRQVGDFHQVIIRGGGHILPYDQPLRAFDMINRFIYGKGWDPYVG

SEQ ID NO: 52682 - protein, 86 aa, Homo sapiens
SVALNTRKLWSMHLHVQAKLLQEIVRSFSGTTCQPIQHMLRRICVQLCDLASPTALLIMRTVLDLIVEDLQRYFHFALKIFSSNYF

SEQ ID NO: 52683 - protein, 160 aa, Homo sapiens
RSGSSRWNTSTKTATQSITEDFFPCGKSEYIEPAKRAHVVPPPRGRGRGGFGQGIRPHDIFRQRKQNTSRPPSMHVDDFVAAESKEVVPQDGIPPPKRPLKVSQKISSRGGFSGNRGGRGAFHSQNRFFTPPASKGFAELSAVYRHTACASHRNGGTYVV

SEQ ID NO: 52684 - protein, 195 aa, Homo sapiens
  misc_feature (1)...(195): Xaa = X or * as defined in Table 2
ECLCVSTAVRIRHELKTMLTELLRGGSFEFKDMRVPSALVTLHMLLCSIPLSGRLDSDEQKIQNDIIDILLTFTQGVNEKLTISEETLANNTWSLMLKEVLSSILKVPEGFFSGLILLSELLPLPLPMQTTQVSLPYNMHLINDCSNTFXKASDSVKKQKPSSPFLPKRHKITGXGGDKTETSWSLRKYGGKNFK

SEQ ID NO: 52685 - protein, 686 aa, Homo sapiens
  misc_feature (1)...(686): Xaa = X or * as defined in Table 2
YIRGHSTPRKLWSMHLHVQAKLLQEIVRSFSGTTCQPIQHMLRRICVQLCDLASPTALLIMRTVLDLIVEDLQSTSEDKEKQYTSQTTRLLALLDALASHKACKLAILHLINGTIKGDERYAEIFQDLLALVRSPGDSVIRQQCVEYVTSILQSLCDQDIALILPSSSEGSISELEQLSNSLPNKELMTSICDCLLATLANSESSYNCLLTCVRTMMFLAEHDYGLFHLKSSLRKNSSALHKLLKRVVSTFSKDTGELASSFLEFMRQILNSDTIGCCGDDNGLMGSRRGAHTSRTMSINAAELNQLLQSTEESPEDLFLELEKLDLEHSKDDDNLYSLLDXXRGLKQMLESSGDPLPLSDQDVEPVLSAPESLQNLFNNRTAYVLADVMDDQLKSMWFTPFQAEEIGTDLDLVKVDLIELSEKCCSDFDLHSELERSFLSEPSSPGRTKTTKGFKLGKHKHETFITSSGKSEYIEPAKKEFMLCPPPRGRGRGGFGQGIRPHDIFRQRKQNTSRPPSMHVDDFVAAESKEVVPQDGIPSHPNRPLKVSQRISSRVGFSGNRGGRGAFHSQNRFFTPPASKGNYSRREGTRGSSWSAQNTPRGNYNESRGGQSNFNRGPLPQLRPLKFPTGXPAPKSLGTRASXMVRGGLGTFPGLSAKLAASGGSRGKFVSGGSGRGRHVRSFTR

SEQ ID NO: 52686 - protein, 224 aa, Homo sapiens
  DOMAIN (85)..(112): G-protein coupled receptors proteins domain identified by eMATRIX, accession number BL00237C, p-value=6.571e-16, raw score of 13.19
  DOMAIN (89)..(146): 7 transmembrane receptor (rhodopsin family) domain identified by PFam, accession name 7tm_1, E-value=2e-06, PFam score of 22.6
  misc_feature (1)...(224): Xaa = X or * as defined in Table 2
TWWLHISIIIPGGKKSYSPRLGRGKRFATFVLLVGGELCLTSYAPPSIHPILRSEAECLNYSIFSKFLAPAGEFALPRSFDNCPRVRLRALRLALLILLTFILCWTPYYLLGMWYWFSPHMLTEVPPSLSHILFLLGLLNAPLDPSPSYGAFTLGCRRGHQELSIDSSKEGSGRMLQEEIHAFRQLEVQKTVTSRRAGETKGISITSIXSXQSMXEQNSKSLVP

SEQ ID NO: 52687 - protein, 35 aa, Homo sapiens
LGFHCSVIKEKRDAYVSRLNAIYQNNLTKVCMLGF

SEQ ID NO: 52688 - protein, 483 aa, Homo sapiens
  DOMAIN (66)..(89): FAD-DEPENDENT PYRIDINE NUCLEOTIDE REDUCTASE SIGNATURE domain identified by eMATRIX, accession number PR00368A, p-value=1.900e- 19, raw score of 17.76
  DOMAIN (67)..(392): Pyridine nucleotide-disulphide oxidoreducta domain identified by PFam, accession name pyr_redox, E-value=8.6e-40, PFam score of 137.4
MALLPRALSAGAGPSWRRAARAFRGFLLLLPEPAALTRALSRAMACRQEPQPQGPPPAAGAVASYDYLVIGGGSGGLASARRAAELGARAAVVESHKLGGTCGLGNLRSWVPAECTDSVIRITRFLWFWRVVLTNESWVVRVDHVTKVHDCQVTVNYAAQQQLERPRGERGQLEQQSPAFLAPGTSFVEDNFSTDQQWGTWRSGSPELEKGERRLSAVAHACNSNFWEANVNVGCVPKKVMWNTAVHSEFMHDHADYGFPSCEGKFNWRVIKEKRDAYVSRLNAIYQNNLTKSHIEIIRGHAAFTSDPKPTIEVSGKKYTAPHILIATGGMPSTPHESQIPGASLGITSDGFFQLEELPGVIVGAGYIAVEMAGILSALGSKTSLMIRHDKINHGTVGTDDGTRSEYRERGIVEVCLGGWLPLCSLSPKNPQSSHMMSTVSTVIPMSSSDWPPSTARGRLGKEVERLYRDMWYPILVIQSNKT

SEQ ID NO: 52689 - protein, 668 aa, Homo sapiens
  DOMAIN (68)..(100): Bacterial-type phytoene dehydrogenase proteins domain identified by eMATRIX, accession number BL00982A, p-value=2.169e- 12, raw score of 18.41
  DOMAIN (67)..(522): Pyridine nucleotide-disulphide oxidoreducta domain identified by PFam, accession name pyr_redox, E-value=5.6e-76, PFam score of 259.8
MALLPRALSAGAGPSWRRAARAFRGFLLLLPEPAALTRALSRAMACRQEPQPQGPPPAAGAVASYDYLVIGGGSGGLASARRAAELGARAAVVESHKLGGTCGLGNLRSWVPAECTDSVIRITRFLWFWRVVLTNESWVVRVDHVTKVHDCQVTVNYAAQQQLERPRGERGQLEQQSPAFLAPGTSFVEDNFSTDQQWVRGAEVMSCCWHVNRPLKAVEIPGGLFTGAGKIGQWYFRVIGFLSTSAPGPKVNVGCVPKKVMWNTAVHSEFMHDHADYGFPSCEGKFNWRVIKEKRDAYVSRLNAIYQNNLTKSHIEIIRGHAAFTSDPKPTIEVSGKKYTAPHILIATGGMPSTPHESQIPGASLGITSDGFFQLEELPGVIVGAGYIAVEMAGILSALGSKTSLMIRHDKVLRSFDSMISTNCTEELENAGVEVLKFSQVKEVKKTLSGLEVSMVTAVPGRLPVMTMIPDVDCLLWAIGRVPNTKDLSLNKLGIQTDDKGHIIVDEFQNTNVKGIYAVGDVCGKALLTPVAIAAGRKLAHRLFEYKEDSKLDYNNIPTVVFSHPPIGTVGLTEDEAIHKYGIENVKTYSTSFTPMYHAVTKRKTKCVMKMVCANKEEKVVGIHMQGLGCDEMLQGFAVAVKMGATKADFDNTVAIHPTSSEELVTLR

SEQ ID NO: 52690 - protein, 517 aa, Homo sapiens
  DOMAIN (56)..(86): Pyridine nucleotide-disulphide oxidoreductases class-I domain identified by eMATRIX, accession number BL00076A, p-value=9.526e- 24, raw score of 18.83
  DOMAIN (58)..(375): Pyridine nucleotide-disulphide oxidoreducta domain identified by PFam, accession name pyr_redox, E-value=1.6e-52, PFam score of 180.5
  misc_feature (1)...(517): Xaa = X or * as defined in Table 2
APARDRAGGGRRALPRLPAASARARGLTRALSRAMACRQEPQPQGPPPAAGAVASYDYLVIGGGSGGLASARRAAELGARAAVVESHKLGGTCVNVGCVPKKVMWNTAVHSEFMHDHADYGFPSCEGKFNWRVIKEKRDAYVSRLNAIYQNNLTKSHIEIIRGHAFFTSDPKPTIEVSGKKYTAPHILIATGGMVPSTPHXEPRSRGASLXITSDGFFQLEEIVPAAASLVGARLPLSVEMAGILSALGSKTSLMIRHDKVLRSFDSMISTNCTEELENAGVEVLKFSQVKEVKKALSGLEASMVTAVPGRLPVMPMIPDVDCLLWAIGGVPNTKDLSLNKLGIQTDDKGHIIVDEFQNTNVKGIYAVGDVCGKALLTPVAIAAGRKLAHRLFEYKEDSKLDYNNIPTVVFSHPPIGTVGLTEDEAIHKYGIENVKTYSTSFTPMYHAVTKRKTKCVMKMVCANKEEKVVGIHMQGLGCDEMLQGFAVAVKMGATKADFDNTVAIHPTSSEELVTLR

SEQ ID NO: 52691 - protein, 138 aa, Homo sapiens
  DOMAIN (30)..(60): Flocculin repeat proteins domain identified by eMATRIX, accession number PF00624I, p-value=8.670e-11, raw score of 9.10
LRARARKDVLLLSCLLKPIHWPTHYTRDSSSSSSSSSSSSSSSSSSSSSSSSSSSSQTEFQKRLSDFKLYESELTLFSSPFSTKIDSVHEELQMEVIDLQCNTVLKTKYDKVGIPEFYKYLWGSYPKYKHHCAKILSM

SEQ ID NO: 52692 - protein, 360 aa, Homo sapiens
  DOMAIN (101)..(148): kw TRANSCRIPTASE REVERSE II ORF2 domain identified by eMATRIX, accession number DM01354V, p-value=1.000e-40, raw score of 12.97
  misc_feature (1)...(360): Xaa = X or * as defined in Table 2
XGVEDLNIVQVTVPDNEKERLSSIEKIKQLREQVNDLFSRKFGEAIGVDFPVKVPYRKITFNPGCVVIDGMPPGVVFKAPGYLEISSMRRILEAAEFIKFTVIRSSLKYLGIQLTRDVKDLFKENYKPLLKEIKEDTNKWKNIPCSWVGRINIVKMAILPKVIYRFNAIPIKLPMTFFTELEKTTLKFIWNQKRARIAKSILSQKNKAGGITLPDFKLYYKATVTKTAWYWYQNRDIDQWNRTEPSEIMPHIYNYLIFDKPEKNKQWGKDSLFNKWCWENWLAICRKLKLDPFLTPYTKINSRWIKDLNVKPKTIKTLEENLGITIQDIGVGKDFMSKTPKAMATKDKIDKWDLIKHIIK

SEQ ID NO: 52693 - protein, 32 aa, Homo sapiens
KKKGGDTSAECAGLFPRHMCATMACCTYWPIL

SEQ ID NO: 52694 - protein, 1094 aa, Homo sapiens
  DOMAIN (873)..(912): DNA mismatch repair proteins mutL / hexB / PMS1 proteins domain identified by eMATRIX, accession number BL00058B, p-value= 1.257e-33, raw score of 16.83
  DOMAIN (802)..(1069): DNA mismatch repair protein domain identified by PFam, accession name DNA_mis_repair, E-value=1.5e-40, PFam score of 148.1
MVWGMSPNKTPYQALSLHSAVPTTYSQADDDYSPPSKRPKANELPQPPVPEPANAGKRKVREFNFEKWNARITDLRKQVEELFERKYAEALGSTEAKAVPYQKFEAHPNDLYVEGLPENIPFRSPSWYGIPRLEKIIQVGNRIKFVIKRPELLTHSTTEVTQPRTNTPVKEDWNVRITKLRKQVEEIFNLKFAQALGLTEAVKVPYPVFESNPEFLYVEGLPEGIPFRSPTWFGIPRLERIVHGSNKIKFVVKKPELVISYLPPGMASKINTKALQSPKRPRSPGSNSKVPEIEVTVEGPNNNNPQTSAVRTPTQTNGSNVPFKPRGREFSFEAWNAKITDLKQKVENLFNEKCGEALGLKQAVKVPFALFESFPEDFYVEGLPEGVPFRRPSTFGIPRLEKILRNKAKIKFIIKKPEMFETAIKESTSSKSPPRKINSSPNVNTTASGVEDLNIIQVTIPDDDNERLSKVEKARQLREQVNDLFSRKFGEAIGMGFPVKVPYRKITINPGCVVVDGMPPGVSFKAPSYLEISSMRRILDSAEFIKFTVIRVFLKHSYTRIIHGCFPVTAQRLRQELQMLMTECLTWARNGSSKHPLSLAQKPEFLFHQLQSRDNAICPIAEQKAGKALGTTVMVSVPYEKMLRDQSAVVVQGLPEGVAFQHPENYDLATLKWILENKAGISFIINRPFLGPESQLGGPGMVTDAERSIVSPSESCGPINVKTEPMEDSGSHPSSTSNEVIEMELPMEDSTPLVPSEEPNEDPEAEVKIEGNTNSSSVTNSAAGVEDLNIVQVTVPEPAKAIKPIDRKSVHQICSGPVVLSLSTAVKKIVGNSLDAGATNIDLKLKDYGMDLIEVSGNGCGVEEENFEGLTLKHHTSKIQEFADLTRVETFGFRGKALSSLCALSDVTISTCHVSAKVGTRLVFDHDGKIIQKTPYPHPRGTTVSVKQLFSTLPVRHKEFQRNIKKVIARRIIDYRYDMPYVRETYQDSGLTFTIEQHEDLNCATLPLYFSKASVFTALQNMAKSTVALITTAARDRSSAGAGAAARAGRQKGGARQLQGERGRGSSAAEQQPRGERRSSRRAGAGAGSSWCSL

SEQ ID NO: 52695 - protein, 97 aa, Homo sapiens
RRDPPSETRMVVTFLVSALESMCKELAKSKAEVACIAVYETDVFVVGTERGCAFVNARTDFQKDFAKYCRCFNFILCIPNLKRIAGKTSTVFSSKLS

SEQ ID NO: 52696 - protein, 1205 aa, Homo sapiens
  misc_feature (1)...(1205): Xaa = X or * as defined in Table 2
MPGYRAGPFEEAFDREDERQIECQGRGVDRKITGEHTTFSGRSGPDHELTLDSGKGCTRSMVPASAASEDRRKLPIIVEDEGGPTRSRACSSPARGSRPPPSAIGCSPVAQASDSAAGPARRTALQSLSSWLGYQIDRHSVPVYVFKSPLFSVIMAPKHKSSDAGNLDRPKRSRKVLPLSEKVKVLDLIRKDKKSYAEVAKIYGKNESSIREIVKKEKEIRASFAVSPPTAKVTATVRDKCLVKMEQALHLWVEEMNRKRVPIDSNMLRQKALSLYQDFCKGCSETDTKPFTASKGWLHRFRHRFSHHYKKKKKGIMAQVAVSTLPVEEESSSETRMVVTFLVSALESMCKELAKSKAEVACIAVYETDVFVVGTERGCAFDNARTDFQKDFAKYCKALGTTVMVPVPYEKMLRDQSAVVVQGLPEGVAFQHPENYDLATLKWILENKAGISFIINRPFLGPESQLGGPGMVTDAERSIVSPSESCGPINVKTEPMEDSGSHPSSTSNEVIEMELPMEDSTPLVPSEEPNEDPEAEVKIEGNTNSSSVTNSAAGVEDLNIVQVTVPDNEKERLSSIEKIKQLREQVNDLFSRKFGEAIGVDFPVKVPYRKITFNPGCVVIDGMPPGVVFKAPGYLEISSMRRILEAAEFIKFTVIRPLPGLELSNGEYSTVGKRKIDQEGRVFQEKWERAYFFVEVQNIPTCLICKQSMSVSKEYNLRRHYQTNHSKHYDQYMERMRDEKLHELKKGLRKYLLGLSDTECPEQKQVFANPSPTQKSPVQPVEDLAGNLWEKLREKIRSFVAYSIAIDEITGINNTTQLAIFIRGADENFDVPEELLDTVPMTGTKSGNEIFSRVEKSLKNFCIDWPKLFSVASTGTPAMVDANNGLVTILKSRVATFCKGAELKSICCIIHPESPLCSRSXRLGNVMDVVVKSVNWICSRGLNHSEFRTLLYELDSQYGSLLYYTEIKWLSRGLVLKRFFESLEEIDSFMSSRGKPLPQLSSIDWIRDLAFLVDMTMHLNALNISLQGHSQIVTQMYDLIRAFLAKLCLWETHLTRNNLAHFPTLRLASRNESDGLNYIPKIAELKTEFQKRLSDFKLYESELTLFSSPFSTKIDSVHEELQMEVIDLQCNTVLKTKYDKVGIPEFYKYLWGSYPKYKHHCAXILSMFGSTYICEQLFSIMKLSKTKYCSQLKDSQWDSVLHIAT

SEQ ID NO: 52697 - protein, 140 aa, Homo sapiens
  DOMAIN (5)..(27): GLYCOPROTEIN ANTIGEN PRECURSOR IMMUNOGLO domain identified by eMATRIX, accession number PD02327B, p-value=4.541e-10, raw score of 19.84
  DOMAIN (2)..(67): Immunoglobulin domain identified by PFam, accession name ig, E-value=3.1e-06, PFam score of 25.1
VVELRCQDKEGNPAPEYTWFKDGIRLLENPRLGSQSTNSSYTMNTKTGTLQFNTVSKLDTGEYSCEARNSVGYPQVPGKRMQVDDLNISGIIAAVCGLGVCYAQRKGYFSKETSFQKSNSSSKATTMSENDFKHTKSFII

SEQ ID NO: 52698 - protein, 69 aa, Homo sapiens
QFNTVSKLDTGEYSCEARNSVGYRRCPGKRMQVDDLNISGIIAAVVVVALVISVCGLGVCYAQRKGYFS

SEQ ID NO: 52699 - protein, 66 aa, Homo sapiens
  DOMAIN (20)..(39): Immunoglobulin domain identified by PFam, accession name ig, E-value=0.0011, PFam score of 16.9
HQCLLFLKGDFKNRAEMIDFNIRIKNVTRSDAGKYRCEVSAPSEQGQNLEEDTVTLEVLGDVHVCV

SEQ ID NO: 52700 - protein, 388 aa, Homo sapiens
  DOMAIN (240)..(262): GLYCOPROTEIN ANTIGEN PRECURSOR IMMUNOGLO domain identified by eMATRIX, accession number PD02327B, p-value=4.541e-10, raw score of 19.84
  DOMAIN (173)..(303): Immunoglobulin domain identified by PFam, accession name ig, E-value=1.7e-13, PFam score of 48.5
  misc_feature (1)...(388): Xaa = X or * as defined in Table 2
HTPKTEQTPIPGLEDPPLGSQLRRRPGEGETDIPSRAVPPLPPLPTLCSFPAPEVQGPPASCAPAAGTLDLLRAAGCRPGKMARRSRHRLLLLLLRYLVVALGYHKAYGFSAPKDQQVVTAVEYQEAILACKTPKKTVSSRLEWKKLGRSVSFVYYQQTLQGDFKNRAEMIDFNIRIKNVTRSDAGKYRCEVSAPSEQGQKPGEDTVTLEVLGDVHVLAPAVPSCEVPSSALSGTVVELRCQDKEGNPAPEYTWFKDGIRLLENPRLGSQSTNSSYTMNTKTGTLQFNTVSKLDTGEYSCEARNSVGXSEGPCETNASRXSQHKVGIIGSRSXLWALVDFPFVGLVYSYGSEGKATFSKETSFQKSNSSSKATTMSENDFKHTKSFII

SEQ ID NO: 52701 - protein, 38 aa, Homo sapiens
  misc_feature (1)...(38): Xaa = X or * as defined in Table 2
XKQIYPYNNSQRLLNVIDMAIFDFLIASEVAEVPEDRS

SEQ ID NO: 52702 - protein, 227 aa, Homo sapiens
MPGLRRDRLLTLLLLGALLSADLYFHLWPQVQRQLRPRERPRGCPCTGRASSLARDSAAAASDPGTIVHNFSRTEPRTEPAGGSHSGSSSKLQALFAHPLYNVPEEPPLLGAEDSLLASQEALRYYRRKVARWNRRLMQTCSYSGNRVAKEGRSLHSLLKYRPEPVKCHFCHTMLANINQRLSGEIQESWPLKRKWSTQLSSLLLSKSSREIPSAGELSSSGQTADS

SEQ ID NO: 52703 - protein, 352 aa, Homo sapiens
  misc_feature (1)...(352): Xaa = X or * as defined in Table 2
GTFPPSGLITGKKRKALLGACDCTQIVKPSGVHLKLVLRFSDFGKAMFKPMRQQRDEETPVDFFYFIDFQRHNAEIAAFHLDRILDFRRVPPTVGRIVNVTKEILEVTKNEILQSVFFVSPASNVCFFAKCPYMCKTEYAVCGKPHLLEGSLSAFLPSLNLAPRLSVPNPWIRSYTLAGKEEWEVNPLYCDTVKQIYPYNNSQRLLNVIDMAIFDFLIGNMDRHHYEMFTKFGDDGFLIHLDNARGFGRHSHDEIPILSLLSQCGMIKKNTLLHLQLLAQADYRLSDVMRESLLEDQLSPVLTEPHLLALDRRLQTILRTVEGCIVAHGQQSVHXFDGPSGNSSGPRLLGQG

SEQ ID NO: 52704 - protein, 141 aa, Homo sapiens
GRVGVSAVIVRAWITHKYSGRDWNVKWEENLLHAVAKNYTLLQTIPPFERPFKDHQVCLEWNMGYIWNLRANRIPQCPLENDFREDFHYNDTAGYFIIGGSRYVAGIEGFFGPLKYYRLRSLHPAQIFNPLLEKQLAEQIS

SEQ ID NO: 52705 - protein, 100 aa, Homo sapiens
PAGTRHEKNPEAAIEWYAKGALETEDPALIYDYAIVLFKGQGVKKNRRLALELMKKAASKGLHQASPDTATSTASPAVTPAADASDQDQPTVTNNPEPRG

SEQ ID NO: 52706 - protein, 94 aa, Homo sapiens
LSVQMYAQAALDGDSQGFFNLALLIEEGTYERCWSHSNEESFSPCSLAWLYLHLRLLWGAILHSALIYFLGTFLLSILIAWTVQYFQSVSGKDL

SEQ ID NO: 52707 - protein, 116 aa, Homo sapiens
MIATYDGCESPGVCNLGFFNLALLIEEGTIIPHHILDFLEIDSTLHSNNISILQELYERGALISVAQAGGQNPVLAILPSPPFGGQRHSSVPTLLTSLLISDSVLPDADQLAVSLR

SEQ ID NO: 52708 - protein, 246 aa, Homo sapiens
MVLLHSSLVDRAYVETIRLKDDEILKVQTKEDGDVFMWLKHEATRGNAAAQQRLAQMLFWGQQGVAKNPEAAIEWYAKGALETEDPALIYDYAIVLFKGLHQAVNGLGWYYHKFKKNYAKAAKYWLKAEEMGNPDASYNLGVLHLDGIFPGVPGRNQLEAASELETASELETVSELETASELEIVSELETASELEIVSELEIVSELETASELEIASELETASELEIASELETASELETASVRTGSH

SEQ ID NO: 52709 - protein, 169 aa, Homo sapiens
MPTSSGPLDLAGTRFVSLKHSSGVEILTLAGEYFHKAAQGGHMEGTLWCSLYYITGNLETFPRDPEKAVVWAKHVAEKNGYLGHVIRKGLNAYLEVHAYLKMGDLYYYGHQNQSQDLELSVQMYAQAALDGDSQHADLLLGKHPSATRSPYILDGGTTALNFREPLSLT

SEQ ID NO: 52710 - protein, 1158 aa, Homo sapiens
  misc_feature (1)...(1158): Xaa = X or * as defined in Table 2
SILCLLSPCVVQFGKPVVSILSSRSRHSPCTKKGWEGMRKHLHTRQGHKXVHVKFPSIMGLQGMDYFHPDISIFCNLAVIVRAWITHKYRGRDWNVKWEENLLHAVAKNYTLLQTIPPFERPFKDHQVCLEWNMGYIWNLRANRIPQCPLENDVVALLGFPYASSGENTGIVKKFPRFRNRELEATRRQRMDYPVFTVSLWLYLLHYCKANLCGILYFVDSNEMYGTPSVFLTEEGYLHIQMHLVKGEDLAVKTKFIIPLKEWFRLDISFNGGQIVVTTSIGQDLKSYHNQTISFREDFHYNDTAGYFIIGGSRYVAGIEGFFGPLKYYRLRSLHPAQIFNPLLEKQLAEQIKLYYERCAEVQEIVSVYASAAKHGGERQEACHLHNSYLDLQRRYGRPSMCRAFPWEKELKDKHPSLFQALLEMDLLTVPRNQNESVSEIGGKIFEKAVKRLSSIDGLHQISSIVPFLTDSSCCGYHKASYYLAVFYETGLNVPRDQLQGMLYSLVGGQGSERLSSMNLGYKHYQGIDNYPLAWNLWYAYYSTIATKTPLDQHTLQGDQAYVETIRLKDDEILKVQTKEDGDVFMWLKHEATRGNAAAQQRLAQMLFWGQQGVAKNPEAAIEWYAKGALETEDPALIYDYAIVLFKGQGVKKNRRLALELMKKAASKGLHQAVNGLGWYYHKFKKNYRPKQPKYWVKSRKKLGNPDASYNLGVLHLDGIFPGVPGRNQTLAGEYFHKAAQGGHMEGTLWCSLYYITGNLETFPIDPEKAVVWAKHVAEKNGYLGHVIRKGLNAYLEGSWHEALLYYVLAAETGIEVSQTNLAHICEERPDLARRYLGVNCVWRYYNFSVFQIHAPSFAYLKMGDLYYYGHQNQSQDLELSVHMYAQAALDGDSQGFFNLALLIEEGTIIPHHILDFLEIDSTLHSNNISILQELYERCWSHSNEESFSPCSLAWLYLHLRLLWGAILHSALIYFLGTFLLSILIAXTVQYFQSVSASDPPPRPSQASPDTATSTASPAVTPAADASDQDQPTVTNNPGAPVGELCTPSSLQMRENLFNSWVLGKLGAKGMILINTLKCLCQLDANFAIGVIFFKVKLQGSTQIKAVGNTKGHQTHTRNILIIGHVGKFTGPSQTFVLVIVCIRSHSMPLRQIWILIH

SEQ ID NO: 52711 - protein, 50 aa, Homo sapiens
  DOMAIN (9)..(32): Immunoglobulins and major histocompatibility complex proteins domain identified by eMATRIX, accession number BL00290A, p-value= 4.600e-16, raw score of 20.89
  DOMAIN (1)..(50): Class I Histocompatibility antigen, domains domain identified by PFam, accession name MHC_I, E-value=8.2e-25, PFam score of 93.9
SHSMRYFFTSVSRPGRGEPRFIAVGYVDDTQFTDRANLGTLRGYYNQSED

SEQ ID NO: 52712 - protein, 135 aa, Homo sapiens
  DOMAIN (47)..(70): Immunoglobulins and major histocompatibility complex proteins domain identified by eMATRIX, accession number BL00290A, p-value= 4.600e-16, raw score of 20.89
  DOMAIN (39)..(133): Class I Histocompatibility antigen, domains domain identified by PFam, accession name MHC_I, E-value=1.5e-69, PFam score of 244.5
TEPEFPGRRFRPRMAVMAPRTLVLLLSGALALTQTWAGSHSMRYFSTSVSRPGRGEPRFIAVGYVDDTQFVRFDSDAASQRMEPRAPWIEQEGPEYWDEETGKVKAHSQTDRENLRIALRYYNQSEAGSHTLFPR

SEQ ID NO: 52713 - protein, 274 aa, Homo sapiens
  DOMAIN (190)..(208): Immunoglobulins and major histocompatibility complex proteins domain identified by eMATRIX, accession number BL00290B, p-value= 4.000e-21, raw score of 13.17
  DOMAIN (25)..(115): Class I Histocompatibility antigen, domains domain identified by PFam, accession name MHC_I, E-value=2.4e-62, PFam score of 220.6
MAVVAPRTLLLLLSGALALTQTWAGSHSMRYFSTSVSRPGSGEPRFSAVGYVDDTQFVRFDSDAASQRMEPRAPWMEQEEPEYWDRQTEISKTNAQIDLESLRIALRYYNQSEDGPPPKTHMTHHPISDHEATLRCWALSFYPAEITLTWQRDGEDQTQDTELVETRPAGDGTFQKWASVVVPSGQEQRYTCHVQHEGLPKPLTLRWEPSSQPTIPIVGILAGLVLFGAVIAGAVVAAVMWRRKSSDRKGGSYSQAASSDSAQGSDVSLTACKV

SEQ ID NO: 52714 - protein, 382 aa, Homo sapiens
  DOMAIN (33)..(229): Class I Histocompatibility antigen, domains domain identified by PFam, accession name MHC_I, E-value=1.9e-73, PFam score of 257.4
  misc_feature (1)...(382): Xaa = X or * as defined in Table 2
NSRVDDFVAVMAPRTLLLLLSGALALTQTWAGSHSMRDFFTSVSRPGRXEPRFIAVGYVDDTQFVRFDSDAASQRMEPRAPWIEQEGPEYWDQETRNMKAHSQTDRENLRIALPLTYNQSEAGSHTLQMMFGCERGGSDGALSFRGLPPVTAYDGKGFTFALNEDLRSWTAADMAAQITQRKWETPPMWRSEQEEAYLEGQCVDGLRRYLENGKEDAAAQRTPPKTHMTHHPISXPXRPLXRCWALAFYPCGDHTXPWQRDGEDQTQDTELVETRPAGDGTFHKWAAVVVPSGEESEITPANVQQXRVLPKPLTLKMWEPSSPAHPSPIVGHHLLALVLLLGAFDHLKLWVAAVMLKEGTAQVGKGXKIEKGGSYSSRLPSQ

SEQ ID NO: 52715 - protein, 102 aa, Homo sapiens
  DOMAIN (66)..(98): Caveolins proteins domain identified by eMATRIX, accession number BL01210C, p-value=1.878e-22, raw score of 17.86
  DOMAIN (17)..(102): Caveolin domain identified by PFam, accession name Caveolin, E-value=1.1e-12, PFam score of 55.5
IPAMGLETEKADVQLFMDDDSYSHHSGLEYADPEKFADSDQDRDPHRLNSHLKILMPFVKTCLMVLPSVQTIWKSVTDVIIAPLCTSVGRCFSSVSLQLSQD

SEQ ID NO: 52716 - protein, 198 aa, Homo sapiens
  DOMAIN (36)..(75): Caveolins proteins domain identified by eMATRIX, accession number BL01210A, p-value=5.500e-30, raw score of 17.61
  DOMAIN (21)..(184): Caveolin domain identified by PFam, accession name Caveolin, E-value=2e-28, PFam score of 107.9
  misc_feature (1)...(198): Xaa = X or * as defined in Table 2
RPRTKAAMGLETEKADVQLFMDDDSYSHHSGLEYADPEKFADSDQDRDPHRLNSHLKLGFEDVIAEPVTTHSFDKVWICSHALFEISKYRMYRSLTVFLGHSPWAFICGEFSFATLSCLAHLGFXWPFVKTCLMVFLPSVQTIWEECXQMVISLAPLCTSVGRCFLFLFSLATEPRNGILGPQVWRLGYCNTSFVIIT

SEQ ID NO: 52717 - protein, 111 aa, Homo sapiens
  misc_feature (1)...(111): Xaa = X or * as defined in Table 2
ATRDQLKAKPENLLGSISRDSGRTQEGIPARVPYPPPPPTREPPQSTXPGRNGLLGCLGGGAPRPGWLDSEAGGAPAFHCPGXCPRRHRRGGTRLKQLPPPPTTVHDQPLR

SEQ ID NO: 52718 - protein, 138 aa, Homo sapiens
  DOMAIN (43)..(58): WILM'S TUMOUR PROTEIN SIGNATURE domain identified by eMATRIX, accession number PR00049D, p-value=8.500e-10, raw score of 0.00
  misc_feature (1)...(138): Xaa = X or * as defined in Table 2
VKVDEVTVKHLGCQRCQWSRCPPSCSGTCLCCGAEAPCAAQPAWPPPPAAPPPTPPAPPSDNSSCTQXPTPRCGTXDKDKGIFTLPKGHPXVXSLEHGFLKLGSCPPPPPHALVRPPQVRFNTPHGAEPQRDQLPQST

SEQ ID NO: 52719 - protein, 344 aa, Homo sapiens
  DOMAIN (25)..(48): MITOCHONDRIAL CARRIER PROTEIN SIGNATURE domain identified by eMATRIX, accession number PR00926F, p-value=4.130e-09, raw score of 17.75
  DOMAIN (17)..(326): Mitochondrial carrier proteins domain identified by PFam, accession name mito_carr, E-value=1.7e-36, PFam score of 128.0
  misc_feature (1)...(344): Xaa = X or * as defined in Table 2
GSNCPLRQADPGPPRHTLFMDFVAGAIGGVCGVAVGYPLDTVKVRIQTEPKYTGIWHCVRDTYHRERVWGFYRGLSLPVCTVSLVSSVSFGTYRHCLAHICRLRYGNPDAKPTKADITLLGCGLRTRPRVPDVAHXGGQSPLADADTGFLSSSGGFRLSALLAAPPMCPVPPACPEPKYRGPLHCLATVAQEEGLCGLYKGSLALVLRDGHSFATYFLSYAVLCEWLSPAGHFRPDVPGVLVAGGCAGVLAWAVATPMDGIKSRLEANGQGQNGYRGLLHCMVTSVREEGPRVLFKGLVLNCCRAFPVNMVVFVAYEAVLRLRPGSAHHSRSPTPRGATHQQLV

SEQ ID NO: 52720 - protein, 138 aa, Homo sapiens
RFHLSKKNMMSPSLALLLFLNVCIFVCGEAVQGNCVHHSTDSSVVNIVEDGSNAKDESKSNDTVCKEDCEESCDVKTKITREEKHFMCRNLQNSIVSYTRSTKKLLRNMMDEQQASLDYLSNQVMCDMDYRGGGWTVI

SEQ ID NO: 52721 - protein, 42 aa, Homo sapiens
  DOMAIN (1)..(42): Fibrinogen beta and gamma chains, C-term domain identified by PFam, accession name fibrinogen_C, E-value=0.0012, PFam score of 15.5
  misc_feature (1)...(42): Xaa = X or * as defined in Table 2
DMDYRRGGWTVIHRKIGGRIDFQRVRXDYLHGYADLLREFWL

SEQ ID NO: 52722 - protein, 161 aa, Homo sapiens
  misc_feature (1)...(161): Xaa = X or * as defined in Table 2
MPKLLKWNYEGGACWGNLWKLPNVERLCFSEATVFRSAAQCLVVGLGLLLVSRACSHEDAIEWRGDSSVVNIVEDGSNAKDESKSNDTVCKEDCEESCDVKTKITREEKHFMCIFHNVQSLGTVCGEKGIDVNXNYTRRKTFHVYLPQCSVTGNSLRGERH

SEQ ID NO: 52723 - protein, 116 aa, Homo sapiens
  DOMAIN (33)..(70): Fibrinogen beta and gamma chains C-terminal domain proteins domain identified by eMATRIX, accession number BL00514C, p-value= 8.855e-25, raw score of 17.41
  DOMAIN (17)..(115): Fibrinogen beta and gamma chains, C-term domain identified by PFam, accession name fibrinogen_C, E-value=1.7e-33, PFam score of 118.4
IALILRIPLALYTKTPSGLYIIHPEGSSYPFEVMCDMDYRGGGWTVIQKRIDGIIDFQRLWSDYLDGFGDLVGEFWLGLKKIFYIVNQKNTTFMLYVGLESEDDPPAYALYDNFSG

SEQ ID NO: 52724 - protein, 141 aa, Homo sapiens
  DOMAIN (12)..(49): Fibrinogen beta and gamma chains C-terminal domain proteins domain identified by eMATRIX, accession number BL00514C, p-value= 2.579e-24, raw score of 17.41
  DOMAIN (9)..(132): Fibrinogen beta and gamma chains, C-term domain identified by PFam, accession name fibrinogen_C, E-value=1.9e-21, PFam score of 76.9
  misc_feature (1)...(141): Xaa = X or * as defined in Table 2
FTQKDLFIPFEVMCDMDYRGGGWTVIQKRIDGIIDFQRLWCDYLDGFGDLLGDAFLFLXKEDNQNAMPFSTSDVDNDGCRPACLVNGQSVKSCSHLHNKTGWWFNKCGLANLNGIHHFSGKLLATGIQWGTGNQKQLTWQE

SEQ ID NO: 52725 - protein, 1037 aa, Homo sapiens
  DOMAIN (516)..(555): Domain present in ZO-1 and Unc5-like netrin receptors domain identified by eMATRIX, accession number PF00791C, p-value=1.222e- 14, raw score of 20.98
  DOMAIN (123)..(574): PDZ domain (Also known as DHR or GLGF) domain identified by PFam, accession name PDZ, E-value=3.4e-50, PFam score of 180.2
  misc_feature (1)...(1037): Xaa = X or * as defined in Table 2
MSHRARPCPAPFLFWMLGVKTEPAGQDRRKKARSRCCIFRVHASGLWGLRFPSVEWGKPSRDKAQLSESPPQSVYLFAETALSAIVPGDGVAGGGGTGDGGPGAPYPGAVADMEELTIWEQHTATLSKDPRRGFGIAISGGRDRPGGSMVVSDVVPGGPAEGRLQTGDHIVMVNGVSMENATSAFAIQILKTCTKMANITVKRPRRIHLPATKASPSSPGRQDSDEDDGPQRVEEVDQGRGYDGDSSSGSGRSWDERSRRPRPGRRGRAGSHGRRSPGGGSEANGLALVSGFKRLPRQDVQMKPVKSVLVKRRDSEEFGVKLGSQIFIKHITDSGLAARHRGLQEGDLILQINGVSSQNLSLNDTRRLIEKSEGKLSLLVLRDRGQFLVNIPPAVSDSDSSPLEDISDLASELSQAPPSHIPPPPRHAQRSPEASQTDSPVESPRLRRESSVDSRTISEPDEQRSELPRESSYDIYRVPSSQSMEDRGYSPDTRVVRFLKGKSIGLRLAGGNDVGIFVSGVQAGSPADGQGIQEGDQILQVNDVPFQNLTREEAVQFLLGLPPGEEMELVTQRKQDIFWKMVQSRVGDSFYIRTHFELEPSPPSGLGFTRGDVFHVLDTLHPGPGQSHARGGHWLAVRMGRDLREQERGIIPNQSRAEQLASLEAAQRAVGVGPGSSAGSNARAEFWRLRGLRRGAKKTTQRSREDLSALTRQGRYPPYERVVLREASFKRPVVILGPVADIAMQKLTAEMPDQFEIAETVSRTDSPSKIIKLDTVRVIAEKDKHALLDVTPSAIERLNYVQYYPIVVFFIPESRPALKALRQWLALASRRSTRRLYAQAQKLRKHSSHLFTATIPFXWARVDTWYQELKAIIREQQTRPIWTAKDQLDGSLEDNLDLPHHGLANSSAEPSACDSRVXQRLRRTDGEGRRVTRMGEGYTDGREGGPYTDVDDEPPAPALARSSEPVQADKSQSPRDRGKISAHQGAPQVDSRHPQGQWRQDSMRTYEREALKKKFTRVHDAESSDEDGYDWGPANDL

SEQ ID NO: 52726 - protein, 25 aa, Homo sapiens
AHPRMDEHMALGPTSTHSSRFIPLK

SEQ ID NO: 52727 - protein, 200 aa, Homo sapiens
  DOMAIN (163)..(179): RIBOSOMAL PROTEIN S19 FAMILY SIGNATURE domain identified by eMATRIX, accession number PR00975C, p-value=4.429e-18, raw score of 16.18
  DOMAIN (171)..(191): Ribosomal protein S19 domain identified by PFam, accession name Ribosomal_S19, E-value=4.4e-11, PFam score of 42.4
  misc_feature (1)...(200): Xaa = X or * as defined in Table 2
PPPRSSEDPAKMAEVEHEEGSGPFRKFTLPAAVDLDQRLDISYDQLEQPMQAVPVARPAAGGLNPGACGRKQHSPAXKRLLQGPSKGGAAPCHKPEAGEDATLRDMIILPEMWGSMVGVYHGKTFNQVEDQGVCGRPCRLGWAGVAXCRRDQLTPSFALGLPQPEMIGHYLGEFSITYKPVKHGRPGIGATHSSRFIPLK

SEQ ID NO: 52728 - protein, 271 aa, Homo sapiens
  DOMAIN (17)..(32): VWFC domain proteins domain identified by eMATRIX, accession number BL01208B, p-value=8.031e-10, raw score of 15.83
  misc_feature (1)...(271): Xaa = X or * as defined in Table 2
STISLYCGLKTCPKLTCAFPVSVPDSCCRVCRGDGELSWEHSDGDFFRQPATREASHSCHRSHYDPPPSRQAGGLSRFPGARSHRGALMDSQQASGTIVRFVLNNKHKHGQVCVSNGRTYSHGESWHPNLRAFGIVECVLCTPTPIDWPQGDXGKCRHGCPTLHYVDXLPLEKQVILATALTMILHQADRLEVCPAFLGPEVTGELLWIPSKHQEPLCDLSSITNTSMDKCVFPMEGPILMASPGTQTSGLLALWSVCYVLPPPSIVPQGD

SEQ ID NO: 52729 - protein, 279 aa, Homo sapiens
  DOMAIN (82)..(146): von Willebrand factor type C domain identified by PFam, accession name vwc, E-value=1.4e-06, PFam score of 35.3
  misc_feature (1)...(279): Xaa = X or * as defined in Table 2
TGDGELSWEHSDGDIFRQPANREARHSYHRSHYDPPPSRQAGGLSRFPGARSHRGALMDSQQASGTIVQIVINNKHKHGQVCVSNGKTYSHGESWHPNLRAFGIVECVLCTCNVTKQECKKIHCPNRYPCKYPQKIDGKCXQNSTCFLIPEELPGQSFDNKGYFCGEETMPVYESVFMEDGETTRKIALETERPPQVICSTFCLAQGILQHFHIEKISKRMFEELPHGHFAFVCLLGQWKIFTEGEAQISQMCSSRVCRTELEDLVKVLYLERSEKGHC

SEQ ID NO: 52730 - protein, 159 aa, Homo sapiens
MDPPAGAARRLLCPALLLLLLLLTPALLPPPAPPANARLAAAVDPPGRIHILYHPDTEYARPSFISGRPPIADRPAKSDTIDGFERFRRLPEPLFAIFDFKVHFKIGDFKEDFSSFSYSIHNSSSTGLKQARRRPGVNSSSGANKDGAPNQRQIVKSFE

SEQ ID NO: 52731 - protein, 98 aa, Homo sapiens
MKDQGEHTTKAGQGVGKVNEIYHDESLGAHINVVLVRIILLSYGKEHERSRMAETAAEPKQGRDILQRNMNGQAWLRQLRNPSKEETSSKATWTVKNG

SEQ ID NO: 52732 - protein, 1328 aa, Homo sapiens
  DOMAIN (414)..(425): Neutral zinc metallopeptidases zinc-binding region proteins. domain identified by eMATRIX, accession number BL00142, p-value= 6.625e-10, raw score of 8.38
  DOMAIN (134)..(247): Reprolysin family propeptide domain identified by PFam, accession name Pep_M12B_propep, E-value=1.1e-24, PFam score of 95.4
  misc_feature (1)...(1328): Xaa = X or * as defined in Table 2
VFFTSMGEHLQKLIPASPACLAXIPQACQPXPPTPPAWQCRNLRLAASRHQEPRGEVGGPLGHGAERILAVPVRTDAQGRLVSHVVSAATSRAGVRARRAAPVRTPSFPGGNEEEPGSHLFYNVTVFGRDLHLRLRPNARLVAPGATMEWQGEKGTTRVEPLLGSCLYVGDVAGLAEASSVALSNCDGLAGLIRMEEEEFFIEPLEKGLAAQEAEQGRVHVVYRRPPTSPPLGGPQALDTGASLDSLDSLSRALGVLEEHANSSRRRARRHAADDDYNIEVLLGVDDSVVQFHGKEHVQKYLLTLMNIVNEIYHDESLGAHINVVLVRIILLSYGKSMSLIEIGNPSQSLENVCRWAYLQQKPDTGHDEYHDHAIFLTRQDFGPSGMQGYAPVTGMCHPVRSCTLNHEDGFSSAFVVAHETGHVLGMEHDGQGNRCGDEVRLGSIMAPLVQAAFHRFHWSRCSQQELSRYLHSYDCLLDDPFAHDWPALPQLPGLHYSMNEQCRFDFGLGYMMCTAFRTFDPCKQLWCSHPDNPYFCKTKKGPPLDGTMCAPGKHCFKGHCIWLTPDILKRDGSWGAWSPFGSCSRTCGTGVKFRTRQCDNPHPANGGRTCSGLAYDFQLCSRQDCPDSLADFREEQCRQWDLYFEHGDAQHHWLPHEHRDAKERCHLYCESRETGEVVSMKRMVHDGTRCSYKDAFSLCVRGDCRKVGCDGVIGSSKQEDKCGVCGGDNSHCKVVKGTFTRSPKKHGYIKMFEIPAGARHLLIQEVDATSHHLAVKNLETGKFILNEENDVDASSKTFIAMGVEWEYRDEDGRETLQTMGPLHGTITVLVIPVGDTRVSLTYKYMIHEDSLNVDDNNVLEEDSVVYEWALKKWSPCSKPCGGGSQFTKYGCRRRLDHKMVHRGFCAALSKPKAIRRACNPQECSQPVWVTGEWEPCSQTCGRTGMQVRSVRCIQPLHDNTTRSVHAKHCNDARPESRRACSRELCPGRWRAGPWSQCSVTCGNGTQERPVPCRTADDSFGICQEERPETARTCRLGPCPRNISDPSKKSYVVQWLSRPDPDSPIRKISSKGHCQGDKSIFCRMEVLSRYCSIQGYKRLLQKSCNLYNNPTNVEGRIEPPPGKHNDIDVFMPTLPVPTVAMEVRPSPSTPLEVPLNASSTNATEDHPETNAVDEPYKIHGLEDEVQPPNLIPRRPSPYEKTRNQRIQELIDEMRKKEMLGKDIPWDSKSCVMEMKSKFLIPKGFEKTKRGNDSMSLIEIGNPSQSLENVCRWAYLQQKPDTGHDEYHDHAIFLTRQDFGPSGMQDSRLEKLTAVRLTENIRPNQIRSE

SEQ ID NO: 52733 - protein, 323 aa, Homo sapiens
  DOMAIN (196)..(232): Ribosomal protein S16 proteins domain identified by eMATRIX, accession number BL00732A, p-value=9.603e-15, raw score of 17.91
  misc_feature (1)...(323): Xaa = X or * as defined in Table 2
QALGLPSLLAVLALSTTDRASFSAVISRSPQRTVSSTRKEQRPLVFAFSALRLGTNACKMDGFCSTFLGAPGIRLKLLTPAGTHKSERDRTATPTRHHEKRLFCSSLSIGRQAEEAWRADHPLPESRLFGLVPLGGAAWCRLAGSFCVCSLRLPRPIELVRAASGALLGAVRRRNHGPPHCFSTATLLCKAYRGGHLTIRLALGGAPNRPFYRIVAAQNKCPRDGPFPXSKLGPPYDPLLPPNSHGEKTPCPLNLDRIRHWIGCGAPPLLSPMEKLLGLAGFFPLHPMMITNAERLRRKRAREVLLASQKTDAEATDTEATET

SEQ ID NO: 52734 - protein, 1661 aa, Homo sapiens
  DOMAIN (1443)..(1477): 3 RETROVIRAL PROTEINASE domain identified by eMATRIX, accession number DM00892C, p-value=7.207e-28, raw score of 23.55
  DOMAIN (1436)..(1480): G-patch domain identified by PFam, accession name G-patch, E- value=1e-19, PFam score of 78.9
AGATTALELPGQPSVTGVPELPGLPSATRALELSGQPVATGALELPGPLMAAGALEFSGQSGAAGALELLGQPLATGVLELPGQPGAPELPGQPVATVALEISVQSVVTTSELSTMTVSQSLEVPSTTALESYNDERSMMSSYERSMMSYERSMMSPMAERSMMSAYERSMMSAYERSMMSPMAERSMMSAYERSMMSAYERSMMSPMADRSMMSMGADRSMMSSYSAADRSMMSSYSAADRSMMSSYTADRSMMSMAADSYTDSYTDTYTEAYMVPPLPPEEPPTMPPLPPEEPPMTPPLPPEEPPEGPALPTEQSALTAENTWPTEVPSLPSEESVSQPEPPVSQSEISEPSAVPTDYSVSASDPSVLVSEAAVTVPEPPPEPESSITLTPVESAVVAEEHEVVPERPVTCMVSETPAMSAEPTVLASEPPVMSETAETFDSMRASGHVASEVSTSLLVPAVTTPVLAESILEPPAMAAPESSAMAVLESSAVTVLESSTVTVLESSTVTVLEPSVVTVPEPPVVAEPDSVTIPVPVVSALEPSVPVLEPAVSVLQPSMIVSEPSVSVQESTVTVSEPAVTVSEQTQVIPTEVAIESTPMILESSIMSSHVMKGINLSSGDQILAPEIGMQEIALHSGEEPHAEEHLKGDFYESEHGINIDLNINSHLIAKEMEHNTVCAAGTSPVGEIGEEKILPTSETKQRTVLDTYPGVSEADAGETLSSTGPFALEPDATGTSKGIEFTTASTLSLVNKYDVDLSLTTQDTEHDMVIISTSPSGGSEADIEGPLPAKDIHLDLPSNNNLVSKDTEEPLPVKESDQTIAALLSPKESSGGEKEVPPPPKETLPDSGFSANIEDINEADLVRPLLPKDMERLTSLRAGIEGPLLASDVGRDRSAASPVVSSMPERASESSSEEKDDYEIFVKVKDTHEKSKKNKNRDKGEKEKKRDPHLRSRSKRSKSSEHKSRKRTSESRSRARKRSSKSKSHRSQTRSRSRSRRRRRSSRSRSKSRGRRSVSKEKRKRSPKHRSKSRERKRKRSSSRDNRKTVRARSRTPSRRSRSHTPSRRRRSRSVGRRRSFSISPSRRSRTPSRRSRTPSRRSRTPSRRSRTPSRRSRTPSRRSRTPSRRRRSRSVVRRRSFSISPVRLRRSRTPLRRRFSRSPIRRKRSRSSERGRSPKRLTDLDKAQLLEIAKANAAAMCAKAGVPLPPNLKPAPPPTIVEKVAKKSGGATIEELTEKCKQIAQSKEDDDVIVNKPHVSDEEEEEPPFYHHPFKLSEFKPIFFNLNIAAAKPTPPKSQVTLTKEFPVSSGSQHRKKEADSVYGEWVPVEKNGEENKDDDNVFSSNLPSEPVDISTAMSERALAQKRLSENAFDLEAMSMLNRAQERIDAWAQLNSIPGQFTGSTGVQVLTQEQLANTGAQAWIKKDQFLRAAPVTGGMGAVLMRKMGWREGEGLGKNKEGNKEPILVDFKTDRKGLVAVGERAQKRSGNFSAAMKDLSGKHPVSALMEICNKRRWQPPEFLLVHDSGPDHRKHFLFRVLINGSAYQPSFASPNKKHAKATAATVVLQAMGLVPKDLMANALASGVPHVDRLRFYNNHFRILLCITMYFLFNVVNIWQFKTLCKKQSVKTSPGFDFCTMEIVFNHTGFWYVYIVYLSDVFV

SEQ ID NO: 52735 - protein, 51 aa, Homo sapiens
  misc_feature (1)...(51): Xaa = X or * as defined in Table 2
ALIKKHFIFXIAAAKPTPPKSQVTLTKEFPVSSGSQHRKKEADSVYGEWVL

SEQ ID NO: 52736 - protein, 196 aa, Homo sapiens
  misc_feature (1)...(196): Xaa = X or * as defined in Table 2
IKKHFIFXIAAAKPTPPKSQVTLTKEFPVSSGPQHRKKEADSVYGEWVPVEKNGEENKDDDNVFSSNLPSEVSRRNIMYFSFFIPESAHFIVMLCLIWDSVSLFLRAGVKRQGRVXDGQMKQPAASHLTVTRMCNSLCGTKATKWKRLRFAENSVITSLPNIGPSLHLWEGSPWYSIPFSFPSLLLLKVGEVEFKR

SEQ ID NO: 52737 - protein, 1870 aa, Homo sapiens
  DOMAIN (1420)..(1440): CORONAVIRUS NUCLEOCAPSID PROTEIN domain identified by eMATRIX, accession number DM01206B, p-value=2.139e-09, raw score of 10.69
  DOMAIN (152)..(211): Collagen triple helix repeat (20 copies) domain identified by PFam, accession name Collagen, E-value=0.068, PFam score of -26.3
SSELPGPSVTPVPQLSQELPGLPAPSMGLEPPQEVPEPPVMAQELPGLPLVTAAVELPEQPAVTVAMELTEQPVTTTELEQPVGMTTVEHPGHPEVTTATGLLGQPEATMVLELPGQPVATTALELPGQPSVTGVPELPGLPSATRALELSGQPVATGALELPGPLMAAGALEFSGQSGAAGALELLGQPLATGVLELPGQPGAPELPGQPVATVALEISVQSVVTTSELSTMTVSQSLEVPSTTALESYNTVAQELPTTLVGETSVTVGVDPLMAPESHILASNTMETHILASNTMDSQMLASNTMDSQMLASNTMDSQMLASSTMDSQMLATSSMDSQMLATSSMDSQMLATSTMDSQMLATSSMDSQMLATSSMDSQMLATSSMDSQMLATSSMDSQMLATSTMDSQMLATSTMDSQMLATSSMDSQMLASGTMDSQMLASGTMDAQMLASGTMDAQMLASSTQDSAMLGSKSPDPYRLAQDPYRLAQDPYRLGHDPYRLGHDAYRLGQDPYRLGHDPYRLTPDPYRMSPRPYRIAPRSYRIAPRPYRLAPRPLMLASRRSMMMSYAAERSMMSSYERSMMSYERSMMSPMAERSMMSAYERSMMSAYERSMMSPMAERSMMSAYERSMMSAYERSMMSPMADRSMMSMGADRSMMSSYSAADRSMMSSYSAADRSMMSSYTADRSMMSMAADSYTDSYTDTYTEAYMVPPLPPEEPPTMPPLPPEEPPMTPPLPPEEPPEGPALPTEQSALTAENTWPTEVPSLPSEESVSQPEPPVSQSEISEPSAVPTDYSVSASDPSVLVSEAAVTVPEPPPEPESSITLTPVESAVVAEEHEVVPERPVTCMVSETPAMSAEPTVLASEPPVMSETAETFDSMRASGHVASEVSTSLLVPAVTTPVLAESILEPPAMAAPESSAMAVLESSAVTVLESSTVTVLESSTVTVLEPSVVTVPEPPVVAEPDYVTIPVPVVSALEPSVPVLEPAVSVLQPSMIVSEPSVSVQESTVTVSEPAVTVSEQTQVIPTEVAIESTPMILESSIMSSHVMKGINLSSGDQNLAPEIGMQEIALHSGEEPHAEEHLKGDFYESEHGINIDLNINNHLIAKEMEHNTVCAAGTSPVGEIGEEKILPTSETKQCTVLDTYPGVSEADAGETLSSTGPFALEPDATGTSKGIEFTTASTLSLVNKYDVDLSLTTQDTEHDMVISTSPSGGSEADIEGPLPAKDIHLDLPSNNNLVSKDTEEPLPVKESDQTLAALLSPKESSGGEKEVPPPPKETLPDSGFSANIEDINEADLVRPLLPKDMERLTSLRAGIEGPLLASDVGRDRSAASPVVSSMPERASESSSEEKDDYEIFVKVKDTHEKSKKNKNRDKGEKEKKRDSSLRSRSKRSKSSEHKSRKRTSESRSRARKRSSKSKSHRSQTRSRSRSRRRRRSSRSRSKSRGRRSVSKEKRKRSPKHRSKSRERKRKRSSSRDNRKTVRARSRTPSRRSRSHTPSRRRRSRSVGRRRSFSISPSRRSRTPSRRSRTPSRRSRTPSRRSRTPSRRSRTPSRRSRTPSRRRRSRSVVRRRSFSISPVRLRRSRTPLRRRFSRSPIRRKRSRSSERGRSPKRLTDLDKAQLLEIAKANAAAMCAKAGVPLPPNLKPAPPPTIEEKVAKKSGGATIEELTEKCKQIAQSKEDDDVIVNKPHVSDEEEEEPPFYHHPFKLSEPKPIFFNLNIAAAKPTPPKSQVTLTKEFPVSSGSQHRKKEADSVYGEWVPVEKNGEENKDDDNVFSSNLPSEGRVKRQGRVRRQMKQPAASHLTVTRCNSLCGTKPQNEKHRNAENSVITSLPNIGPSLHLWEGSPRYNYFSFPILLSRLYSSRFWW

SEQ ID NO: 52738 - protein, 1561 aa, Homo sapiens
  DOMAIN (1187)..(1207): CORONAVIRUS NUCLEOCAPSID PROTEIN domain identified by eMATRIX, accession number DM01206B, p-value=2.139e-09, raw score of 10.69
MAPESHILASNTMETHILASNTMDSQMLASNTMDSQMLASNTMDSQMLASSTMDSQMLATSSMDSQMLASNTMDSQMLASNTMDSQMLASSTMDSQMLATSSMDSQMLATSSMDSQMLATSTMDSQMLATSSMDSQMLATSSMDSQMLATSSMDSQMLATSSMDSQMLATSTMDSQMLATSTMDSQMLATSSMDSQMLASGTMDSQMLASGTMDAQMLASGTMDAQMLASSTQDSAMLGSKSPDPYRLAQDPYRLAQDPYRLGHDPYRLGHDAYRLGQDPYRLGHDPYRLTPDPYRMSPRPYRIAPRSYRIAPRPYRLAPRPLMLASRRSMMMSYAAERSMMSSYERSMMSYERSMMSPMAERSMMSAYERSMMSAYERSMMSPMAERSMMSAYERSMMSAYERSMMSPMADRSMMSMGADRSMMSSYSAADRSMMSSYSAADRSMMSSYTADRSMMSMAADSYTDSYTDTYTEAYMVPPLPPEEPPTMPPLPPEEPPMTPPLPPEEPPEGPALPTEQSALTAENTWPTEVPSLPSEESVSQPEPPVSQSEISEPSAVPTDYSVSASDPSVLVSEAAVTVPEPPPEPESSITLTPVESAVVAEEHEVVPERPVTCMVSETPAMSAEPTVLASEPPVMSETAETFDSMRASGHVASEVSTSLLVPAVTTPVLAESILEPPAMAAPESSAMAVLESSAVTVLESSTVTVLESSTVTVLEPSVVTVPEPPVVAEPDSVTIPVPVVSALEPSVPVLEPAVSVLQPSMIVSEPSVSVQESTVTVSEPAVTVSEQTQVIPTEVAIESTPMILESSIMSSHVMKGINLSSGDQILAPEIGMQEIALHSGEEPHAEEHLKGDFYESEHGINIDLNINSHLIAKEMEHNTVCAAGTSPVGEIGEEKILPTSETKQRTVLDTYPGVSEADAGETLSSTGPFALEPDATGTSKGIEFTTASTLSLVNKYDVDLSLTTQDTEHDMVIISTSPSGGSEADIEGPLPAKDIHLDLPSNNNLVSKDTEEPLPVKESDQTIAALLSPKESSGGEKEVPPPPKETLPDSGFSANIEDINEADLVRPLLPKDMERLTSLRAGIEGPLLASDVGRDRSAASPVVSSMPERASESSSEEKDDYEIFVKVKDTHEKSKKNKNRDKGEKEKKRDSSLRSRSKRSKSSEHKSRKRTSESRSRARKRSSKSKSHRSQTRSRSRSRRRRRSSRSRSKSRGRRSVSKEKRKRSPKHRSKSRERKRKRSSSRDNRKTVRARSRTPSRRSRSHTPSRRRRSRSVGRRRSFSISPSRRSRTPSRRSRTPSRRSRTPSRRSRTPSRRSRTPSRRSRTPSRRRRSRSVVRRRSFSISPVRLRRSRTPLRRRFSRSPIRRKRSRSSERGRSPKRLTDLDKAQLLEIAKANAAAMCAKAGVPLPPNLKPAPPPTIEEKVAKKSGGATIEELTEKCKQIAQSKEDDDVIVNKPHVSDEEEEEPPFYHHPFKLSEPKPIFFNLNIAAAKPTPPKSQVTLTKEFPVSSGSQHRKKEADSVYGEWVPVEKNGEENKDDDNVFSSNLPSEPVGHLYSNE

SEQ ID NO: 52739 - protein, 2447 aa, Homo sapiens
  DOMAIN (2323)..(2357): 3 RETROVIRAL PROTEINASE domain identified by eMATRIX, accession number DM00892C, p-value=7.207e-28, raw score of 23.55
  DOMAIN (2385)..(2447): Double-stranded RNA binding motif domain identified by PFam, accession name dsrm, E-value=1.3e-18, PFam score of 75.2
  misc_feature (1)...(2447): Xaa = X or * as defined in Table 2
KRAPEKVDAYLYKQILLMKLPTKKSKKHKKHKNKKKKKKKEKEKKYKRQPEESESKTKSHDDGNIDLESDSFLKFDSEPSAVALELPTRAFGPSETNESPAVVLEPPVVSMEVSEPHILETLKPATKTAELSVVSTSVISEQSEQSVAVMPEPSMTKILDSFAAAPVPTTTLVLKSSEPVVTMSVEYQMKSVLKSVESTSPEPSKIMLVEPPVAKVLEPSETLVVSSETPTEVYPEPSTSTTMDFPESSAIEALRLPEQPVDVPSEIADSSMTRPQELPELPKTTALELQESSVASAMELPGPPATSMPELQGPPVTPVLELPGPSATPVPELPGPLSTPVPELPGPPATAVPELPGPSVTPVPQLSQELPGLPAPSMGLEPPQEVPEPSVMAQELPGLPLVTAAVELPEQPAVTVAMELTEQPVTTTELEQPVGMTTVEHPGHPEVTTATGLLGQPEATMVLELPGQPVATTALELPGQPSVTGVPELPGLPSATRALELSGQPVATGALELPGPLMAAGALEFSGQSGAAGALELLGQPLGNRGAWSLPGQPGAPESLPGQPVATVALEISVQSVVTTSELSTMTVSQSLEVPSTTALESYNTVAQELPTTLVGETSVTVGVDPLMAPESHILASNTMETHILASNTMDSQMLASNTMDSQMLASNTMDSQMLASSTMDSQMLATSSMDSQMLATSSMDSQMLATSTMDSQMLATSSMDSQMLATSSMDSQMLATSSMDSQMLATSSMDSQMLATSTMDSQMLATSTMDSQMLATSSMDSQMLASGTMDSQMLASGTMDAQMLASGTMDAQMLASSTQDSAMLGSKSPDPYRLAQDPYRLAQDPYRLGHDPYRLGHDAYRLGQDPYRLGHDPYRLTPDPYRMSPRPYRIAPRSYRIAPRPYRLAPRPLMLASRRSMMMSYAAERSMMSSYERSMMSYERSMMSPMAERSMMSAYERSMMSAHERSMMAPMAERSMMSAYERSMMSAYERSMMSPMADRSMMSMGADRSMMSSYSAADRSMMSSYSAADRSMMSSYTADRSMMSMAADSYTDSYTDTYTEAYMVPPLPPEEPPTMPPLPPEEPPMTPPLPPEEPPEGPALPTEQSALTAENTWPTEVPSSPSEESVSQPEPPVSQSEISEPSAVPTDYSVSASDPSVLVSEAAVTVPEPPPEPESSITLTPVESAVVAEEHEVVPERPVTCMVSETPAMSAEPTVLASEPPVMSETAETFDSMRASGHVASEVSTSLLVPAVTTPVLAESILEPPAMAAPESSAMAVLEVFGLVTVLESSTVTVLESSTVTVLEASVVTVPEPPVVAEPDYVTIPVPVVSALEPSVPVLEPAVSVLQPSMIVSEPSVSVQESTVTVSEPAVTVSEQTQVIPTEVAIESTPMILESSIMSSHVMKGINLSSGDQNLAPEIGMQEIALHSGEEPHAEEHLKGDFYESEHGINIDLNINNHLIAKEMEHNTVCAAGTSPVGEIGEEKILPTSETKQRTVLDTYPGVSEADAGETLSSTGPFALEPDATGTSKGIEFTTASTLSLVNKYDVDLSLTTQDTEHDMVISTSPSGGSEADIEGPLPAKDIHLDLPSNNNLVSKDTEEPLPVKRDDQTLAALLSPKESSGEKKEVPPPSXREHLPDSGFLPNIEDINEADLVRPVSSPRTWNVLPSPRAGLEGPLLASDFGPDRIFIPAPVVSSMPERASGSSSGEKGGYEIFVKVKDTHEKSKKNKNRDKGEKEKKRDSSLRSRSKRSKSSEHKSRKRTSESRSRARKRSSKSKSHRSQTRSRSRSRDRRRRSSRSRSKSRGRRSVSKEKRKRSPKHRSKSRERKRKRSSSRDNRKTVRARSRTPSRRSRSHTPSRRRRSRSVGRRRSFSISPSRRSRTPSRRSRTPSRRSRTPSRRSRTPSRRSRTPSRRSRTPSRRRRSRSVVRRRSFSISPVRLRRSRTPLRRRFSRSPIRRKRSRSSERGRSPKRLTDLDKAQLLEIAKANAAAMCAKAGVPLPPNLKPAPPPTIEEKVAKKSGGATIEELTEKCKQIAQSKEDDDVIVNKPHVSDEEEEEPPFYHHPFKLSEPKPIFFNLNIAAAKPTPPKSQVTLTKEFPVSSGSQHRKKEADSVYGEWVPVEKNGEENKDDDNVFSSNLPSEGRVKRQGRVRRQMKQPAASHLTVTRCNSLCGTKPQSEKHRIAENSVITSLPNIGPSLHLWEANLSGGGIDRRGQILRFNTRTGLEKVIPVDISTAMSERALAQKRLSENAFDLEAMSMLNRAQERIDAWAQLNSIPGQFTGSTGVQVLTQEQLANTGAQAWIKKDQFLRAAPVTGGMGAVLMRKMGWREGEGLGKNKEGNKEPILVDFKTDRKGKHPVSALMEICNKRRWQPPEFLLVHDSGPDHRKHFLFRVLINGSAYQPSFASPNKKHAKATAATVVLQAMGLVPKDLMANATCFRSASRR

SEQ ID NO: 52740 - protein, 692 aa, Homo sapiens
  DOMAIN (458)..(478): ENDOPEPTIDASE LA (LON) SERINE PROTEASE (S16) SIGNATURE domain identified by eMATRIX, accession number PR00830A, p-value=6.286e- 11, raw score of 8.41
  DOMAIN (453)..(638): ATPases associated with various cellular act domain identified by PFam, accession name AAA, E-value=8.6e-70, PFam score of 245.3
  misc_feature (1)...(692): Xaa = X or * as defined in Table 2
SQHFGRLRRVDYLRTSKMQTSSSRSVHLSEWQKNYFAITSGICTGPKADAYRAQILRIQYAWANSEISQVCATKLFKKYAEKYSAIIDSDNVESGLNNYAENILTLAGSQQTDSDKWQSGLSINNVFKMSSVQKMMQAGKKFKDSLLEPALASVVIHKEATVFDLPKFSVCGSSQESDSLPNSAHDRDRTQDFPESNRLKLLQNAQPPMVTNTARTCPTFSAPVGESATAKFHVTPLFGNVKKENHSSAKENIGLNVFLSNQSCFPAACENPQRKSFYGSGTIDALSNPILNKACSKTEDNGPKEDSSLPTFKTAKEQLWVDQQKKYHQPQRASGSSYGGVKKSLGASRSRGILGKFVPPIPKQDGGEQNGGMQCKPYGAGPTEPAHPVDERLKNLEPKMIELIMNEIMDHGPPVNWEDIAGVEFAKATIKEIVVWPMLRPDIFTGLRGPPKGILLFGPPGTGKTLIGKCIASQSGATFFSISASSLTSKWVGEGEKMVRALFAVARCQQPAVIFIDEIDSLLSQRGDGEHESSRRIKTEFLVQLDGATTSSEDRILVVGATNRPQEIDEAARRRLVKRLYIPLPEASARKQIVINLMSKEQCCLSEEEIEQIVQQSDAFSGADMTQLCREASLGPISAVSQTADIATITPDQVRPIAYIDFENAFITVRPIVSPKDLXLYENWNKTLCCGK

SEQ ID NO: 52741 - protein, 170 aa, Homo sapiens
  DOMAIN (113)..(149): Ribosomal protein L14 proteins domain identified by eMATRIX, accession number BL00049C, p-value=2.985e-14, raw score of 17.38
  misc_feature (1)...(170): Xaa = X or * as defined in Table 2
FFFFFPAFKMSKRGRGWVPSGCRKFPDFPLGLPVGTLXSNWCLTNTGAQKTLYIISREGGIKGTGLTRLPRLPGVGDMVMAHSSRKANPELQKKGYIPAVVIRQRKVITVGKRWRCFFIFEDNAGVIGDNKGEMKGFAITGPRAKECADLWPRDCIQMLGSIAWFSQYIL

SEQ ID NO: 52742 - protein, 314 aa, Homo sapiens
  DOMAIN (99)..(137): Synapsins proteins domain identified by eMATRIX, accession number BL00415O, p-value=8.907e-11, raw score of 3.44
  misc_feature (1)...(314): Xaa = X or * as defined in Table 2
GPSASVSFWLWSQQHSPRIRHPRPGERRRLLHGIPHPTAEKQPAPLRPERRGGRRRRPAGRRGCAXGGARPCSSRSSXPASTPAPRAAPPCRSPCSARPRTGPRTGAGRPRAPHDGPPCATPDPRDQASPLPPRGPRPRVAPGSPPEGHPRELPSEGSPGPRAPGQRHVRPPRAVLRPRGLRGGGCPGPAHPAPRLQRRRAPGEAAAPGPRWPGRPGRGRAQALVPAARSRCFWKLWEAVFCLPVAAAPTRRFGARQRPQLWLHGHKGGQVGEVSSHSAGEEHLVPHAAPKRAREPHGRSGSPGGIASSWQDGS

SEQ ID NO: 52743 - protein, 263 aa, Homo sapiens
  DOMAIN (160)..(180): TNF family proteins domain identified by eMATRIX, accession number BL00251B, p-value=8.800e-17, raw score of 11.40
  DOMAIN (121)..(263): TNF(Tumor Necrosis Factor) family domain identified by PFam, accession name TNF, E-value=1.4e-55, PFam score of 198.0
HSMIETYNQTSPRSAATGLPISMKIFMYLLTVFLITQMIGSALFAVYLHRRLDKIEDERNLHEDFVFMKTIQRCNTGERSLSLLNCEEIKSQFEGFVKDIMLNKEETKKENSFEMQKGDQNPQIAAHVISEASSKTTSVLQWAEKGYYTMSNNLVTLENGKQLTVKRQGLYYIYAQVTFCSNREASSQAPFIASLCLKSPGRFERILLRAANTHSSAKPCGQQSIHLGGVFELQPGASVFVNVTDPSQVSHGTGFTSFGLLKL

SEQ ID NO: 52744 - protein, 637 aa, Homo sapiens
  DOMAIN (598)..(609): Sigma-54 factors family proteins domain identified by eMATRIX, accession number BL00717B, p-value=3.538e-09, raw score of 10.07
  DOMAIN (90)..(522): MCM2/3/5 family domain identified by PFam, accession name MCM, E-value=2.5e-09, PFam score of -123.6
  misc_feature (1)...(637): Xaa = X or * as defined in Table 2
LLRGTLQSYAWTSVIPDIATELRDAPEKTLACMGLAIHQVTICLMHTFVXTFLMFAHTCTPCLTMVNVPHIHARXGIXCIKVLLRMGHXRPFKNENAHRGTVVRVSNIKPLCTKMAFLCAACGEIQSFPLPDGKYSLPTKVIRSLTASLFILVKKANQNTENISRQSIKXAIRLLHKRQALDVTLLRKSIILLHDLVDSCVPGDTVTITGIVKVSNAEEGRVQLFSLFVSQXXFINVHLFXDAPPHILVVGDPGLGKSQMLQVDNQSFSVCSFACKMRXXFTSEFSPLSKDSSSGDFALEAGALVLGDQGERPKGIISDSGTFXKAFSFSVNFLSISLAKAGVVCSLPARTSIIAAANPVGGHYNKAKTVSENLKXVSSNIYTFNVLNHFNSIRKRNSSHLLSEHVIAIRAGKQRTISSATVARMNSQDSNTSVLEVVSEKPLSERLKVXMFLLLIQFGSVXMSKFSVWLIVDVYPRLSTEAARVLQDFYLELRKQSQRLNSSPITTRQLESLIRLTEVCFFLWSCFFWLKGEGCALTSLLKYRXDKNFKLFXMKYQLSSHLKLGNRPNRSTAKRFISALNNVAERTYNNIFQFHQLRQIAKELNIQVADFENFIGSLNDQGYLLKKGPKVYQLQTM

SEQ ID NO: 52745 - protein, 47 aa, Homo sapiens
VSSWDRPTPASHFQTHPLPGRASSVASQGGRAGASKAYSGGRLPSTC

SEQ ID NO: 52746 - protein, 167 aa, Homo sapiens
GRLLERNGEDYICPNCTILQVQDETHSETADQQEAKWRPGDADGTDCTSIGTIEQKSSEDQGIKGRIEKAANPSGKKKLKIFQPVIEAPGASKCIGPGCCHVAQPDSVYCSNDCILKHAAATMKFLSSGKEQKPKPKEKMKMKPEKPSLPKCGAQAGIKISSVHKRP

SEQ ID NO: 52747 - protein, 330 aa, Homo sapiens
  DOMAIN (51)..(66): PHD-finger domain identified by eMATRIX, accession number PF00628, p-value=6.400e-13, raw score of 15.84
  DOMAIN (36)..(88): PHD-finger domain identified by PFam, accession name PHD, E- value=5.5e-16, PFam score of 66.5
ESKLEGKAAQDIKDEEPGDLGRPKPECEGYDPNALYCICRQPHNNRFMICCDRCEEWFHGDCVGISEARGRLLERNGEDYICPNCTILQVQDETHSETADQQEAKWRPGDADGTDCTSIGTIEQKSSEDQGIKGRIEKAANPSGKKKLKIFQPGPGPVPTQLPVLWQVLEIAVSRSISAFTLLHCISCKVIEAPGASKCIGPGCCHVAQPDSVYCSNDCILKHAAATMKFLSSGKEQKPKPKEKMKMKPEKPSLPKCGAQAGIKISSVHKRPAPEKKETTVKKAVVVPARSEALGKEAACESSTPSWASDHNYNAVKPEKTAAPSPVTVV

SEQ ID NO: 52748 - protein, 775 aa, Homo sapiens
  DOMAIN (415)..(430): PHD-finger domain identified by eMATRIX, accession number PF00628, p-value=6.400e-13, raw score of 15.84
  DOMAIN (401)..(453): PHD-finger domain identified by PFam, accession name PHD, E- value=5.5e-16, PFam score of 66.5
  misc_feature (1)...(775): Xaa = X or * as defined in Table 2
MAAAEGKERAGGRASGRGRSEPPRPGARASDAGPGGLREVEGTGEHSVVAAGTVPRVGVGAAARGEERRAGLGECGPGLGGCVAGLISGKSVQAFSVGAGRWPLLRVFGGNVTFCSVVSWSLCAYTLPLGMDDKGDPSNEEAPKAIKPTSKEFRKTWGFRRTTIAKREGAGDAEADPLEPPPPQQQLGLSLRRSGRQPKRTERVEQFLTIARRRGRRSMPVSLEDSGEPTSCPATDAETASEGSVESASETRSGPQSASTAVKERPASSEKVKGGDDHDDTSDSDSDGLTLKELQNRLRRKREQEPTERPLKGIQSRLRKKRREEGPAETVGSEASDTVEGVLPSKQEPENDQGVVSQAGKDDRESKLEGKAAQDIKDEEPGDLGRPKPECEGYDPNALYCICRQPHNNRFMICCDRCEEWFHGDCVGISEARGRLLERNGEDYICPNCTILQVQDETHSETADQQEAXMGDLGDADGTDFTSIGNIRSRSLSRRPKGLKGRIEKAANPSGKKELKIFQPVLEIAVSRSISAFTLLHCISCKVIEAPGASKCIGPGCCHVAQPDSVYCSNDCILKHAAATMKFLSSGKEQKPKPKEKMKMKPEKPSLPKCGAQPVQWLLLLSSWQLGTSSGLQVTLCQPPFTEHKWLKFSVLHGETAGPPRAHRIRKLNKYWGACHHCMPLRPLPCLPGWPRSSPSLVGAGSLPRHAVHLNEPCPLAICPLARRLSPARGPLGSDDLTWGYKVWLLFLWFRCMPAFHIFINGIASNGLQSGRTTK

SEQ ID NO: 52749 - protein, 617 aa, Homo sapiens
  DOMAIN (83)..(122): Stathmin family proteins domain identified by eMATRIX, accession number BL00563A, p-value=2.929e-28, raw score of 16.73
  DOMAIN (85)..(228): Stathmin family domain identified by PFam, accession name Stathmin, E-value=7.7e-21, PFam score of 82.7
IQPPDPRNMTLAAYKEKMKELPLVSLFCSCFLADPLNKSSYKYEAGVGDSVGGRMKASGKTVLTGRERRAQADTVDLNWCVISDMEVIELNKCTSGQSFEVILKPPSFDGVPEFNASLPRRRDPSLEEIQKKLEAAEERRKRGPDLVIYEIHSPASLPFHSSDASVLGDIPPTTYSNISNSNQELLLMGGSPAPEQPHYEANILERSETTSYDNGSDAAQSFKVDGRCVFYINIPIPSNEGKVLWKAPEIATAKEPTWSPLGSTGPRPCQILVVKSPVVHGKGPVLSGCGLDLLEQPTFALCFLVAGAVTITFLSCSGEEAREESAPKAMSERQARRGGAEKQGAEGRGLQAVTTPELPYRMGLGAAFLLKERSGVLPGSFICEDFTAALKQDEEIGTMKGKIREAYFKSFVPTPVAFSGGVMLPTGGTLEMCGNNFGGHKEQAGTVLPAFAIALRVTPSASLVLRPLNLDQAMLQGSLGLQLADGLFWDLASIMDWTASRIQPSVSSSMKICQAFPGRPLAILLAQCAYVYGTWMKLEAIILTKLTQEQKTKHHLFSLPCCMPADISYRQRCLGEPPHCTVWNRHLESLVMMSNSTTSPCSELLIFEVPPVAPEQK

SEQ ID NO: 52750 - protein, 205 aa, Homo sapiens
  DOMAIN (162)..(198): Stathmin family proteins domain identified by eMATRIX, accession number BL00563D, p-value=4.886e-36, raw score of 11.38
  DOMAIN (57)..(205): Stathmin family domain identified by PFam, accession name Stathmin, E-value=1.8e-41, PFam score of 151.2
  misc_feature (1)...(205): Xaa = X or * as defined in Table 2
IQPPDPRNMTLAAYKEKMKELPLVSLFCSCFLADPLNKSSYKYEADTVDLNWCVIFRHWKVIELNKCTSGANSFEVILKPPSFDGVPEFNASLPRRARPIPWEEIPVRKLGRRLRERREVTREADPXKQLAEKREHEERGDSKRAFRETTTFIKMAKEKNLAQKMESNRENREAHLAAMLERLQEKDKHAEEVRKNKELKEEASR

SEQ ID NO: 52751 - protein, 195 aa, Homo sapiens
  DOMAIN (55)..(97): Chloramphenicol acetyltransferase proteins domain identified by eMATRIX, accession number BL00100C, p-value=1.000e-39, raw score of 23.60
  DOMAIN (44)..(185): Chloramphenicol acetyltransferase domain identified by PFam, accession name CAT, E-value=5.1e-110, PFam score of 378.9
LCSPKVLGLNASCQKNFLKQKKSIKTLSTSQYSVSGYSLARSENAHPEFRMAMKDGELVIWDSVHPCYTVFHEQTETFSSLWSEYHDDFRQFLHIYSQDVACYGENLAYFPKGFIENMFFVSANPWVSFTSFDLNVANMDNFFAPVFTMGKYYTQGDKVLMPLAIQVHHAVCDGFHVGRMLNELQQYCDEWQGGA

SEQ ID NO: 52752 - protein, 471 aa, Homo sapiens
  DOMAIN (133)..(148): DNA TOPOISOMERASE II SIGNATURE domain identified by eMATRIX, accession number PR00418C, p-value=5.950e-14, raw score of 10.02
  DOMAIN (134)..(294): DNA topoisomerase II domain identified by PFam, accession name DNA_topoisoII, E-value=4.3e-62, PFam score of 219.7
MGIQPISQIRSQRLDPLRAQKGTYQDVQAGGLQQGNLVCDGQASETRQTFSKLHDLNNALGGQFTEFVPEAQVQSDSMLRQMESPGLLGLVMKAAVGSTSEAWIFSSISECAGRKTNREGEAESGVVRSDPCCGRNGYGAKLCNIFSTKFTVETACKEYKHSFKQTWMNNMMKTSEAKIKHFDGEDYTCITFQPDLSKFKMEKLDKDIVALMTRRAYDLAGSCRGVKVMFNGKKLPVNGFRSYVDLYVKDKLDETGVALKVIHELANERWDVCLTLSEKGFQQISFVNSIATTKVTFECGQPDGKTRNPRPFFPHEDKDSTITNNPTAFVISSSTPAERPKYTFDFSEEEDDDADDDDDDNNDLEELKVKASPITNDGEDEFVPSDGLDKDEYTFSPGKSKATPDTISLGAVNSSRRQTGYLVKTSRSLVKPHLQAREGLEPGGRAADPVDQSGNLCFFQACQWLPVDQLA

SEQ ID NO: 52753 - protein, 928 aa, Homo sapiens; identical to SEQ ID NO: 52180
  DOMAIN (821)..(850): kw REPLICATION REPB REPA INITIATION domain identified by eMATRIX, accession number DM00653A, p-value=7.207e-27, raw score of 20.40
  DOMAIN (457)..(663): DNA gyrase/topoisomerase IV, subunit A domain identified by PFam, accession name DNA_topoisoIV, E-value=3.8e-56, PFam score of 179.6

SEQ ID NO: 52754 - protein, 546 aa, Homo sapiens
  DOMAIN (225)..(251): DNA topoisomerase II proteins domain identified by eMATRIX, accession number BL00177I, p-value=2.200e-21, raw score of 21.82
  DOMAIN (146)..(321): DNA gyrase/topoisomerase IV, subunit A domain identified by PFam, accession name DNA_topoisoIV, E-value=2.4e-98, PFam score of 313.3
KTLDLLGLLPVKKAELSRCLGELCMTEAQLRGRSKDGHVLGFGPYFCQTLAIKEGGPGIGETLGSGGQKENGRQEVGQNYDSGAAFSKKKIDDRKEWLTNFMEDRRQRRLHGLPEQFLYGTATKHLTYNDFINKELILFSNSDNERSIPSLVDGFKPGQRKVLFTCFKRNDKREVKVAQLAGSVAEMSAYHHGEQALMMTIVNLAQNFVGSNNINLLQPIGQFGTRLHGGKDAASPRYIFTMLSTLARLLFPAVDDNLLKFLYDDNQRVEPEWYIPIIPMVLINGAEGIGTGWACKLPNYDAREIVNNVRRMLDGLDPHPMVTHPLLLMFFLAYSSSQLKCHLFRKAFSDQPPDSSLTLQILRICTRYTPEQDTMTFSDGLTLNRTQMHNAGFGPLTDLVFTFANQLLPLEMDDTETGLLSAICLICGDRQDLEEPTKVDKLQEPLLEALKIYIRKRRPSKPHMFPKILMKITDLRSISAKGAERVITLKMEIPGSMPPLIQEMLENSEGHEPLTPSSSGNTAEHSPSISPSSVENSGVSQSPLVQ

SEQ ID NO: 52755 - protein, 780 aa, Homo sapiens
  DOMAIN (565)..(580): DNA topoisomerase II proteins domain identified by eMATRIX, accession number BL00177A, p-value=5.667e-16, raw score of 13.66
  DOMAIN (568)..(590): DNA topoisomerase II domain identified by PFam, accession name DNA_topoisoII, E-value=9.4e-10, PFam score of 36.7
YTVCYFLQAAEEDETQNQHDDSSSDSGTPSGPDFNYILNMSLWSLTKEKVEELIKQRDAKGREVNDLKRKSPSDLWKEDLAGICWRDWDKVENSPRNEEDVLAGMSGKSNLKGKVGKPKVKKLQLEETMPSPYGRRIIPEITAMKADASKKLLKKKKGVDLDTAAVKVEFDEEFSGAPVEGAGEEGIDSHQFPINKGPKPRREKKEPGSRVRKTPTSSGKPSAKKVKKRNPWSDDESKSESDLEETEPVVIPRDSLLRRAADIHRLGGEGFDAGLTVFAPLFASPFPPRGAPYLKAACQTPRSGIGATAISGEALKGAVSSGVDPRWASHLRVKLLEKSFSLQEIQSTEKVLSQQAKTLSLLGEPKLSKQLTGTCIYRKTNLALCRGPAAAKSLFQGAVRNDRNKKKKETSKQECTESYEMTAELDDLTEKIRKAHQETFPSLCQLGKYTTSLQKGMQRCQILDLSSVRPIVDVRPPELQDSKLVLVQAAKCAPLADHCSKPVLLKEGPEDQKDQHDVGDCWNPECQTLFDQNNAAKKEESETANKNDSSKKLSVERVYHIKTQLEHILLRPDTYIGSVEPLSKVAEEGPAAVGGWKGWFGTESRKDPKPTGTEEVERGVWLSGREGRLLSPSVVTTMVLAENSAIRFVGGKPSSDTVPKPKRAPKQKKVVEAVNSDSDSEFGIPKKTTTPKGKGRGAKKRKASGSENEGDYNPGRKTSKTTSKKPKKTSFDQDSDVDIFPSDFPTEPPSLPRTGRARKEVKYFAESDEEEDDVDFRTVN

SEQ ID NO: 52756 - protein, 1139 aa, Homo sapiens
  DOMAIN (55)..(91): DNA topoisomerase II proteins domain identified by eMATRIX, accession number BL00177H, p-value=3.647e-39, raw score of 21.42
  DOMAIN (239)..(707): DNA gyrase/topoisomerase IV, subunit A domain identified by PFam, accession name DNA_topoisoIV, E-value=1.4e-186, PFam score of 592.7
  misc_feature (1)...(1139): Xaa = X or * as defined in Table 2
GRDRYGVFPLRGKILNVREASHKQIMENAEINNIIKIVGLQYKKSYDDAESLKTLRYGKIMIMTDQDQDGSHIKGLLINFIHHNWPSLLKHGFLEEFITPIVKASKNKQELSFYSIPEFDEWKKHIENQKAWKIKYYKGLGTSTAKEAKEYFADMERHRILFRYAGPEDDAAITLAFSKKKIDDRKEWLTNFMEDRRQRRLHGLPEQFLYGTATKHLTYNDFINKELILFSNSDNERSIPSLVDGFKPGQRKVLFTCFKRNDKREVKVAQLAGSVAEMSAYHHGEQALMMTIVNLAQNFGGSNNINLLQPIGQFGTRLHGGKDAASPRYIFTMLSTLARLLFPAVDDNLLKFLYDDNQRVEPEWYIPIIPMVLINGAEGIGTGWACKLPNYDAREIVNNVRRMLDGLDPHPMLPNYKNFKGTIQELGQNQYAVSGEIFVVDRNTVEITELPVRTWTQVYKEQVLEPMLNGTDKTPALISDYKEYHTDTTVKFVVKMTEEKLAQAEAAGLHKVFKLQTTLTCNSMVLFDHMGCLKKYETVQDILKEFFDLRLSYYGLRKEWLVGMLGAESTKLNNQARFILEKIQGKITIENRSKKDLIQMLVQRGYESDPVKAWKEAQEKAAEEDETQNQHDDSSSDSGTPSGPDFNYILNMSLWSLTKEKVEELIKQRDAKGREVNDLKRKSPSDLWKEDLAAFVEELDKVESQEREDVLAGMSGKAIKGKVGKPKVKKLQLEETMPSPYGRRIIPEITAMKADASKKLLKKKKGDLDTAAVKVELDEEFSVSPVEGAGEEALTRAVPINKGPKPKREKKEPGTRVRKTPTSSGKPSAKKVKKRNPWSDDESKSESDLEETEPVVIPRDSLLRRAAAERPRYTFDFSEEEDDDADDDDDDNNDLEELKVKASPITNDGEDEFGPSDGLDKDEYTFSPGKSKATPEKSLHDKKSLDFGNLFSFPSYSQKSEDDSAKFDSNEEDSASVFSPSFGLKQTDKVPSKTVAAKKGNHRPPYTVPXASRGLPNQQNVVEAVNSDSDSEFGIPKETTTPKWYRLRGKRKRKASGSENEGDYNPGMKTSKTNKQETRRKTSFDQDSDVGHLPPSDFPYLSHLSLPTEPGSGLGKEVKXFCQSLDEEEDDVEFCQCLN

SEQ ID NO: 52757 - protein, 68 aa, Homo sapiens
SLQGLGAAERRSTPHSPRALFLLCVLGVELSCIITDSQTSDPRIEWKKIQDEQTTYVFFDNKIQGMIL

SEQ ID NO: 52758 - protein, 301 aa, Homo sapiens
  DOMAIN (105)..(132): Mrp family proteins domain identified by eMATRIX, accession number BL01215A, p-value=4.964e-11, raw score of 9.75
  DOMAIN (226)..(245): Immunoglobulin domain identified by PFam, accession name ig, E-value=0.011, PFam score of 13.7
MKLMETLNQCINAGHEMTKAIAIAQFNDDSPEARKITRRWRIGEAADLVGVSSQAIRDAEKAGRLPHPDMEIRGRVEQRVGYTIEQINHMRDVFGTRLRRAEDVFPPVIGVAAHKGGVYKTSVSVHLAQDLALKGLRVLLVEGNDPQGTASMYHGWVPDLHIHAEDTLLPFYLGEKDDVTYAIKPTCWPGLDLIPSWLALPPIETELMGQFDEGDLAGRAEILGKTSLKIWNVTRRDSALYRCEVVARNDRKEIDEIVIELTVQACFADGILPLDLDASELLSDTFEVLSSKEIQLLAMRS

SEQ ID NO: 52759 - protein, 102 aa, Homo sapiens
AFSCLEEACGRPCNSPQTSGHCCCFSVPLVPSARPHVLEPQCNLEFCQETGGVKEQASKSELRSAAFHFKFWKPRKNVQSGPEDTKGRKRLHQPRKNGKGNR

SEQ ID NO: 52760 - protein, 361 aa, Homo sapiens
  DOMAIN (56)..(232): Immunoglobulin domain identified by PFam, accession name ig, E-value=9.6e-19, PFam score of 65.4
  misc_feature (1)...(361): Xaa = X or * as defined in Table 2
MPSAAWKRPVEGPATLRRPLGIAAASQCPSSPQPGCLIGAVNLKSSNRTPVVQEFESVELSCIITDSQTSDPRIEWKKIQDEQTTYVFFDNKIQGDLAGRAEILGKTSLKIWNVTRRDSALYRCEVVARNDRKEIDEIAIEVTVQVKPVTPVCRVPKAVPVGKMATLHCQGEXGPPPAHYSWYRNDVPLPTDSRANPRFRNSSFHLNSETGTLVFTAVHKDDSGQYYCIASNDAGSARCEEQEMEVCHTDKRGGFPWSWAAPHLWFLQDTALLPAALTGWCSVSVAFPGAQCKLSVDLSFWGLEDGGPLLTAPLGSTPVGTLCRGSDPTFPFCTALADDLYESPTPAANFCLDIQAFSYIL

SEQ ID NO: 52761 - protein, 162 aa, Homo sapiens
  misc_feature (1)...(162): Xaa = X or * as defined in Table 2
FFISVINGQVSSVQRLSGVGPACLSCGSANPGPPPGTSPGAGAQRRXPRADGSGSPQWPRGARVGGGRLGTGGRGRPGWRQVPRRLSPGFGRXGGTGPGPVGTSGKRGPSRRRAPANDKAACWPRFPGQPASXTGFRGERGVKGFSSWGSGWRAWEDGGTVH

SEQ ID NO: 52762 - protein, 79 aa, Homo sapiens
VSFSNPEGYIDSSDYPLLPLNNFLECTYNVTVYTGYGVELQTLLVEGQVIRSPTNTISVYFRTFQDDGLGTFQLHYQGR

SEQ ID NO: 52763 - protein, 920 aa, Homo sapiens; identical to SEQ ID NO: 36280
  DOMAIN (743)..(755): Sushi domain proteins (SCR repeat proteins domain identified by eMATRIX, accession number PF00084B, p-value=7.188e-10, raw score of 9.45
  DOMAIN (370)..(842): Sushi domain (SCR repeat) domain identified by PFam, accession name sushi, E-value=1.4e-44, PFam score of 161.5

SEQ ID NO: 52764 - protein, 990 aa, Homo sapiens; identical to SEQ ID NO: 36281
  DOMAIN (743)..(755): Sushi domain proteins (SCR repeat proteins domain identified by eMATRIX, accession number PF00084B, p-value=7.188e-10, raw score of 9.45
  DOMAIN (370)..(908): Sushi domain (SCR repeat) domain identified by PFam, accession name sushi, E-value=6.2e-55, PFam score of 195.9

SEQ ID NO: 52765 - protein, 684 aa, Homo sapiens
  DOMAIN (387)..(615): Sushi domain (SCR repeat) domain identified by PFam, accession name sushi, E-value=2.8e-09, PFam score of 44.3
  misc_feature (1)...(684): Xaa = X or * as defined in Table 2
SASPLGPYLLPSGAPERGSPGKEHPEERVVTAPPSSSQSAEVLGELVLDGTAPSAHHDIPALSPLLPEEARPKHALPPKKKLPSLKQVNSARKQLRPKATSAATVQRAGSQPASQGLDLLSSSTEKPGPPGDPDPIVASEEASEVPLWLDRKESAVPTTPAPLQISPFTSQPYVAHTLPQRPEPGEPGPDMAQEAPQEDTSPMALMDKGENELTGSASEESQETTTSTIITTTVITTEQAPGMQPPTPMGEGPPIVKHTWILDKCNVATLQSTXALGPNEGYIDSSDYPLLPLNNFLECTYNVTVYTGYGVELQVTPGEYPDGELLSIRGVDGPTLTVLANQTLLVEGQVIRSPTNTISVYFRTFQDDGLGTFQLHYQGRVRPRLFPRRPDSGDVTVMDLHSGGVAHFHCHLGYELQGAKMLTCINASKPHWSSQEPICSGMLQPQPHNATIGRVLSPSYPENTNGSQFCIWTIEAPEGQKLHLHFERLLLHDKDRXSSEGPQTNKSALLYDSLQTESVPFEGLLSEGNTIRIEFTSDQARAASTFNIRFEGEGPWELYEPYIQNGNFTTSDPTYNIGTIVEFTCDPGHSLEQGPAIIECINVRDPYWNDTEPLCRGERIHNASAVAGVVLSPNWPEPYVEGEDCIWKIHVGEEKRIFLDIQFVSVXNGSVFSQEKVRPTPEWW

SEQ ID NO: 52766 - protein, 997 aa, Homo sapiens
  DOMAIN (743)..(755): Sushi domain proteins (SCR repeat proteins domain identified by eMATRIX, accession number PF00084B, p-value=7.188e-10, raw score of 9.45
  DOMAIN (370)..(910): Sushi domain (SCR repeat) domain identified by PFam, accession name sushi, E-value=4.4e-52, PFam score of 186.4
  misc_feature (1)...(997): Xaa = X or * as defined in Table 2
LVSFLLFQDALPEGDASPLGPYLLPSGAPERGSPGKEHPEERVVTAPPSSSQSAEVLGELVLDGTAPSAHHDIPALSPLLPEEARPKHALPPKKKLPSLKQVNSARKQLRPKATSAATVQRAGSQPASQGLDLLSSSTEKPGPPGDPDPIVASEEASEVPLWLDRKESAVPTTPAPLQISPFTSQPYVAHTLPQRPEPGEPGPDMAQEAPQEDTSPMALMDKGENELTGSASEESQETTTSTIITTTVITTEQAPALCSVSFSNPEGYIDSSDYPLLPLNNFLECTYNVTVYTGYGVELQVKSVNLSDGELLSIRGVDGPTLTVLANQTLLVEGQVIRSPTNTISVYFRTFQDDGLGTFQLHYQAFMLSCNFPRRPDSGDVTVMDLHSGGVAHFHCHLGYELQGAKMLTCINASKPHWSSQEPICSAPCGGAVHNATIGRVLSPSYPENTNGSQFCIWTIEAPEGQKLHLHFERLLLHDKDRMTVHSGQTNKSALLYDSLQTESVPFEGLLSEGNTIRIEFTSDQARAASTFNIRFEAFEKGHCYEPYIQNGNFTTSDPTYNIGTIVEFTCDPGHSLEQGPAIIECINVRDPYWNDTEPLCRAMCGGELSAVAGVVLSPNWPEPYVEGEDCIWKIHVGEEKRIFLDIQFLNLSNSDILTIYDGDEVMPHILGQYLGNSGPQKLYSSTPDLTIQFHSDPAGLIFGKGQGFIMNYIEVSRNDSCSDLPEIQNGWKTTSHTELVRGARITYQCDPGYDIVGSDTLTCQWDLSWSSDPPFCEKIMYCTDPGEVDHSTRLISDPVLLVGTTIQYTCNPGFVLEGSSLLTCYSRETGTPIWTSRLPHCVSEESFXCDNPGLPENGYQILYKRLYRPGESLTFMCSIGFEIMGEVTIRSILGQPSQWNGPLPVCKVNQDSFEHALEVAEAAAETSLEGGNMALAIFIPVLIISLLLGGAYIYITRCRYYSNLRLPLMYSHPYSQITVETEFDNPIYETGGTQKV

SEQ ID NO: 52767 - protein, 64 aa, Homo sapiens
  DOMAIN (15)..(42): C1q domain proteins domain identified by eMATRIX, accession number BL01113A, p-value=1.865e-09, raw score of 17.99
MVPPFRVPLPGMPIPLPGVLPGMAPPIVPMIHPQVAIAASPATLAGATAVSEWTEYKTADGKTY

SEQ ID NO: 52768 - protein, 122 aa, Homo sapiens
  misc_feature (1)...(122): Xaa = X or * as defined in Table 2
LGSTHASVRINILSVDVLYFIFYRRDDNKDIDSEKEAAMEAEIKAARERAIVPLEARMKQFKDMLLERGVRKQSLGEIFLFCISNINMSCXKVKSKVSAFSTWEKELHKIVFDPRYLLLNLI

SEQ ID NO: 52769 - protein, 203 aa, Homo sapiens
  DOMAIN (30)..(180): FF domain identified by PFam, accession name FF, E-value=5.7e -29, PFam score of 109.7
  misc_feature (1)...(203): Xaa = X or * as defined in Table 2
KDHRWESGSLLEREEKEKLFNEHIEALTKKKREHFRQLLDETSAITLTSTWKEVKKIIKEDPRCIKFSSSDRKKQREFEEYIRDKYITAKADFRTLLKETKFITYSXFSERCESESLXKMLGLAAPQTEVLCSSTERSKKLIQESDQHLKDVEKILQNDKRYLVLDCVPEERRKLIVAYVDDLDRRGPPPPPTASEPTRRSTK

SEQ ID NO: 52770 - protein, 63 aa, Homo sapiens
  misc_feature (1)...(63): Xaa = X or * as defined in Table 2
XRDDNKDIDLRERSCPWKLKLKLPEKGPLSLWRPRMNQFQGHAARERGVCFFNVGEGVAQDSF

SEQ ID NO: 52771 - protein, 429 aa, Homo sapiens
MSDGPGHRAKSRLTWQRPVEESILKIKHDTKVNQCFDIPCKLITTFPTSSRNSKETKKPSKFSVAELEIEGNCQVHPNQRLLWWHGNPTVDKNKLNSRKLRIPFFQKFCFTQIQLGIPERSVPFSLAIHGRLSVKQLSASWYPGPCLDPGRIRSHMDLQDECGSLLNGEGSGLLWVKPPWERTKAGNGEFLPWGVEGERITAPQAHKRACHGLRSHSDGEGTRLSFQAVFCFGEDMTGGSAVLAEAKWLRTLSERPSYETCQQASVPWPRASSRNASCDCSGTPALPPTEEIWVENKIQMGRGVKLKEFWQIEVSDTSFKNEPWPHLCKPFPSRTLNVTSCCSSFSTSANNSKPAFPPVMVPPFRVPLPACQFHFQPPSHQSTGVFIPLSKSAGALPNSKDISPPFRRLMESLTNRIQTSAVSASLVGD

SEQ ID NO: 52772 - protein, 1112 aa, Homo sapiens
  DOMAIN (268)..(307): w SPAC8A404C RESISTANCE SPAC8A4.05C DAUNORUBICIN. domain identified by eMATRIX, accession number DM00191D, p-value=3.500e- 10, raw score of 13.94
  DOMAIN (672)..(1112): FF domain identified by PFam, accession name FF, E-value=5.4e -58, PFam score of 206.1
  misc_feature (1)...(1112): Xaa = X or * as defined in Table 2
SSSVMAERGGVGGESERFNPGELRMAQQQALRFRGPAPPPNAAMRGPPPLMRPPPPFGMMRGPPPPPRPPFGRPPFDPNMPPMPPPGGIPPPMGPPHLQRPPFMPPPMSSMPPPPGMMFPPGMPPVTAPGTPALPPTEEIWVENKTPDGKVYYYNARTRESAWTKPDGVKVIQQSELTPMLAAQAQVQAQAQAQAQAQAQAQAQAQAQAQAQAQAQAQAQAQAQAQAQAQAQAQAQAQAQAQAQAQVQAQVQAQVQAQAVGANTPTTSSPAPAVSTSTSSSTPSSTTSTTTTATSVAQTVSTPTTQDQTPSSAVSVATPTVSVSTPARTATPVQTVPQPHPQTLPPAVPHSVPQPTTAIPAFPPVMVPPFRVPLPGMPIPLPGVAMMQIVSCPYVKTVATTKTGVLPGMAPPIVPMIHPQVAIAASPATLAGATAVSEWTEYKTADGKTYYYNNRTLESTWEKPQELKEKEKLEEKIKEPIKEPSEEPLPMETEEEDPKEEPIKEIKEEPKEEEMTEEEKAAQKAKPVATAPIPGTPWCVVWTGDERVFFYNPTTRLSMWDRPDDLIGRADVDKIIQEPPHKKGMEELKKLRHPTPTMLSIQKWQFSMSAIKEEQELMEEINEDEPVKAKKRKRDDNKDIDSEKEAAMEAEIKAARERAIVPLEARMKQFKDMLLERGVSAFSTWEKEVHKIVFDPRYYFFNPNRENTRCLLQYVKTRAAEERRETKNNIMHATEDFKKMMEEAKFNPRATFSEFAAKHAKDSRFKAIEKMKDREALFNEFVAAARKKGKEDSKTREGEKIKSDFFELLSNHHLDSQSRWSKVKDKVESDPRYKAVDSSSMREDLFKQYIGKKAPEFXTPGKEKELERQARIXGKPSENREREVPKARSEQTKEIDREREQHKREEAIQNFKALLSDMVRSSDVSWSDTRRTLRKDHRWESGSLLEREEKEKLFNEHIEALTKKKREHFRQLLDETSAITLTSTWKEVKKIIKEDPRCIKFSSSDREKTKRNLKEYIRGDKYIHRPKAXLSGTLLKETKFITYRSKKLIQESDQHLKDVEKILQNDKRYLVLDCVPEERALNLIVAYVDDLDRRGPPPPPHSIRSPRRRSTK

SEQ ID NO: 52773 - protein, 101 aa, Homo sapiens
DWKWRRRQAAEGSPRLCVSMTRQNGIQTNKPALRAVRQRSEFTLMAKRIGKDLSNTFAKLEKLTILAKRKSLFDDKAVEIEELTYIIKQDINSLNKQIAQL

SEQ ID NO: 52774 - protein, 592 aa, Homo sapiens
  DOMAIN (20)..(70): Syntaxin / epimorphin family proteins domain identified by eMATRIX, accession number BL00914, p-value=2.523e-15, raw score of 24.91
  DOMAIN (72)..(244): SPRY domain identified by PFam, accession name SPRY, E-value= 7.1e-13, PFam score of 56.2
MNIQTIDTQRVDQDSYIQSRADTMQNIESTIVELGSIFQQLAHMVKEQEETIQSDSSLWPPVCLRLNREDTEIQISGLQGAGPGLVRAGAAILRPEEGGRDHIENAGCLGAAILREALYGKLRDVGAAMLVRPSWNGSGCGRSHLRYKIGSSRGEDEFSYGFDGRGLKAENGQFEEFGQTFGENDVIGCFANFETEEVELSFSKNGEDLGVAFWISKDSLADRALLPHVLCKNCVVELNFGQKEEPFFPPPEEFVFIHAVPVEERVRTAVPPKTIEECEVILMVGLPGSGKTQWALKYAKENPEKRYNVLGAETVLNQMRPRSNTVKVHCRPPMKANCSRLSVDCLSSVVKWSIKSVTDSTAAEPCKTSAPGVSSEKALHFRQLQRVLFELELLGRTGLRSNVLLPNDLQDWACTSHQHSHKRPSDSAAKAYFSVLCTSRCFSSFSTLMGDQCTVSHVSTGTHPSSTTATRSCGQGPAHAEVRGEWVNEQKEHSGSRRQISLEHEILLHPRYFGPNLLNTVKQKLFTEVEGTCTGKYGFVIAVTTIDNIGAGVIQPGRGFVLYPVKYKAIVFRPFKGEVVDAVVTQVNKPPK

SEQ ID NO: 52775 - protein, 113 aa, Homo sapiens
  DOMAIN (50)..(100): Syntaxin / epimorphin family proteins domain identified by eMATRIX, accession number BL00914, p-value=3.732e-18, raw score of 24.91
  misc_feature (1)...(113): Xaa = X or * as defined in Table 2
PLAPNHLGGGAVVLGAESHASKDVAIDMMDSRTSQQLQLIDEQDSYIQSRADTMQNIESTIVELGSIFQQLAHMVKEQEETIQRXDRVNSAHPWDPVHLLPSTQQVFIEHLFM

SEQ ID NO: 52776 - protein, 362 aa, Homo sapiens
  DOMAIN (274)..(324): Syntaxin / epimorphin family proteins domain identified by eMATRIX, accession number BL00914, p-value=9.878e-12, raw score of 24.91
  DOMAIN (56)..(362): Syntaxin domain identified by PFam, accession name Syntaxin, E-value=1.9e-07, PFam score of 9.1
  misc_feature (1)...(362): Xaa = X or * as defined in Table 2
SRGNATGLRTRIRVSTWVSQRHRSCPLQLLAVAAATSSPLPPPVTLVPPPPDTMSCRDRTQEFLSACKFAARPVKNGIQTNXGQLLRWLVRQRSEIHPSLAKRHLGKDLSNTFAKLEKLTILAKRKPLFDDKAGEIEELTYIIKQDINSLIKQIAQLQDFVRAKGSQSGRHLQTHSNTIVVSLQSKLASMSNDFKSVLEVRDRGTLKQQREPEERQFSRAPVSALPLSPTHRAGGAVVLGAESHASKDVAIDMMDSRTSQQLQLIDEQDSYIQSRADTMQNIESTIVELGSIFQQLAHMVKEQERETIQRIDENVLGAQLDVEAAHSEILKYFQSVTSNRWLMDKIFLILIVFFIIFVVFLA

SEQ ID NO: 52777 - protein, 120 aa, Homo sapiens
KTPQGWREVFVDIDPQVSDKLRFVLAPSATPAEAFIQHDETRDHVEVCPDAGVIIEELSQRIALTGGAALVADYGHDGTKTDTFRGFCDHKLHDVLIAPGTADLTADVDFSYLRRMAQGK

SEQ ID NO: 52778 - protein, 465 aa, Homo sapiens
  misc_feature (1)...(465): Xaa = X or * as defined in Table 2
AAPGNGLSPSSWRSELACEFQHECTAEVRFGAVVCRGARSHSFYLEREILQPPGMSLPENPVTPMLRHLMYKIKSTGPITVAEYMKEVLTNPAKGYYVYRDMLGEKGDFITSPEISQIFGELLGIWFISEWMATGKSTAFQLVELGPGRGTLVGDILRVFTQLGSVLKNCDISVHLVEVSQKLSEIQALTLTKEKVPLERNAGSPVYMKGVTKSGIPISWXSRICTDVPKGYSFYLAHEFLDVLPVHKFQKTPQGWREVFVDIDPQVSDKLRFVLAPSATPAEAFIQHDETRDHVEVCPDAGVIIEELSQRIALTGGAALVADYGHDGTKTDTFRGFCDHKLHDVLIAPGTADLTADVDFSYLRRMAQGKVASLGPIKQHTFLKNMGIDVRLXRFFXINQMRPSVRQQLLQGYDMLMNPKKMGERFNFFALLPHQRLQGGRYQRNARQSKPFASVVAGFSELAWQ

SEQ ID NO: 52779 - protein, 125 aa, Homo sapiens; identical to SEQ ID NO: 47708
  DOMAIN (71)..(82): RNase H domain identified by eMATRIX, accession number PF00075D, p-value=7.188e-09, raw score of 10.71

SEQ ID NO: 52780 - protein, 475 aa, Homo sapiens
  DOMAIN (365)..(376): RNase H domain identified by eMATRIX, accession number PF00075F, p-value=7.088e-10, raw score of 12.87
  DOMAIN (304)..(444): RNase H domain identified by PFam, accession name rnaseH, E- value=4.5e-16, PFam score of 66.8
DQEEQAQKEKRDQRKATALVMALRQTNPGGSERTENGAGQSPGRACYQCGLLGHFKKDCPMRNKLPPHPCPQCRGNHWKTLKQLRGFLGITAFCRLWIPGYSEIARPLYTLIKETQRANTHLVEWEPEAETAFKTLKQALVQAPALSPPTGQNFSFYITEIAGIALGVLTLTCGTTPQPVAYLSKETDVVAKGWPHCLRVVAAVAVLMSEAIKIIQGKDLTVWTTHDVNGILGAKGSLWLSDNCLLRYQALLLEGPVLQICMCMALNPATFLPEDGKPIEHACQQIIVQTYATQDDLLEVPLANPDLNLYINGSSFVENGIRRAGYTIVSDVTILESKPLPPGTSAQLAELVAPTRALELGKGKRINVYTDSKYAYLILHAYAAIWKEREFLTSGATTIKYHKEIIELLHPMQKHKEVAVLHCQSHQNGEGEGKTAAKVAGRSRERPARSKEKKRKSEKEKKRGRNKEELEERKK

SEQ ID NO: 52781 - protein, 189 aa, Homo sapiens; identical to SEQ ID NO: 47714
  DOMAIN (59)..(70): RNase H domain identified by eMATRIX, accession number PF00075B, p-value=1.000e-13, raw score of 12.56
  DOMAIN (1)..(184): Reverse transcriptase domain identified by PFam, accession name rvt, E-value=2e-14, PFam score of 61.4

SEQ ID NO: 52782 - protein, 410 aa, Homo sapiens
  DOMAIN (242)..(253): RNase H domain identified by eMATRIX, accession number PF00075B, p-value=1.000e-13, raw score of 12.56
  DOMAIN (175)..(363): Reverse transcriptase domain identified by PFam, accession name rvt, E-value=4.7e-31, PFam score of 116.6
  misc_feature (1)...(410): Xaa = X or * as defined in Table 2
GPRGTGPKGKARSEKGCSLSHGPQTNKPLVVQKGQKMEQANHPVGLVISVVYKDILKKIVQRETSHPLIHVRYAEAITGRRTAPEDKGSLGRDMLAKAGAIIYMNMGNKLPIWCHLLEEGIYLEVWALEGQFGRAKNACPVQIRLKDPTTFPYQRQYPLRPEAHKGLQDIVKHVKAQGLVKKCSSPCNTPILGVQKPNGQWSLVQDLRLISEAVIPLYPVVPNPYTLLSQIPEEAEWFPVLDLKDAFFCIPLHYDSHDSQFLFAFEDPTDHTSQLIWTVLPQGFRDSPHLFGQALAQDLGHFSSPGTLVLQYVDDLLLATSSEASCQQATLDLLNFLANQGYKASRSKAQLCLQQVKYLGLILARGTRTLGKERIQPILAYPHPKTLKQLWGFLQITGFCQLWIPRXSKI

SEQ ID NO: 52783 - protein, 70 aa, Homo sapiens; identical to SEQ ID NO: 47709

SEQ ID NO: 52784 - protein, 157 aa, Homo sapiens
QPEFGDTWYLSQVSDRMTAEEREKIPTSQQAIPSMDPHWYLDSDQGDWSRRDILAKAGAIIYMNMGSKLLICCPLLEEGINPEVWALEGQFRRAKYVHPVQIRLKDPTTFPCQRQYPLRPEAHKGLQDIVKHLEAEGLVRKCSSPYNTPVLGIQKPN

SEQ ID NO: 52785 - protein, 131 aa, Homo sapiens
  DOMAIN (58)..(74): Eukaryotic and viral aspartyl proteases proteins domain identified by eMATRIX, accession number BL00141A, p-value=8.800e- 09, raw score of 12.10
  DOMAIN (42)..(71): Retroviral aspartyl protease domain identified by PFam, accession name rvp, E-value=0.00053, PFam score of 19.3
MLRQSLEGALPQRMKFPWVRSPQPDDPTTGLRVPGEAPTHVITLTEPRVCLTIEGQEIDFLLDTGAAFSVVISCPGRLSQEDGKPIEHDCQQIVVQTYAAQDDLLEVPLTNPELNLYTDGSSSVKMGYEGQ

SEQ ID NO: 52786 - protein, 118 aa, Homo sapiens; identical to SEQ ID NO: 40932
  DOMAIN (34)..(46): RNase H domain identified by eMATRIX, accession number PF00075C, p-value=9.786e-11, raw score of 11.58

SEQ ID NO: 52787 - protein, 64 aa, Homo sapiens
  misc_feature (1)...(64): Xaa = X or * as defined in Table 2
TSSLLRKEDSAPSQGKSVVFTLTSQGXVPLWRTLQLQGPFFTPSSRKXLELSSANSQQHLGCPV

SEQ ID NO: 52788 - protein, 482 aa, Homo sapiens; identical to SEQ ID NO: 40497
  DOMAIN (136)..(147): RNase H domain identified by eMATRIX, accession number PF00075B, p-value=2.636e-13, raw score of 12.56
  DOMAIN (70)..(253): Reverse transcriptase domain identified by PFam, accession name rvt, E-value=1.8e-32, PFam score of 121.3

SEQ ID NO: 52789 - protein, 507 aa, Homo sapiens
  DOMAIN (417)..(428): RNase H domain identified by eMATRIX, accession number PF00075B, p-value=1.000e-13, raw score of 12.56
  DOMAIN (7)..(225): Gag P30 core shell protein domain identified by PFam, accession name Gag_p30, E-value=2.8e-28, PFam score of 102.6
LDTKVLHVPFSLSDLKQIKADLGKFSDDPDRYKDVLQGLGQTFDLAWRDVMLLLDQILAFIEKNAALAAAREFGDTWYLSQVNDRMTAKERDKFLTGQQAIPTMDPHWDFDSDHGDWSHKHLLTCVLEGLKGIRKKPMNYSMMSTITQGQEEKPSAFLERLREALRKYTPLSPESLEGQLILKDKFITQSAADIRRQLQKQALGPEQNLQELLNLATLVFYNRDQEEQAQKEKRDQRKAAALVRALRQTNLGGSERTEYGAGQSPRRDILAKAGAIIYMNMGNKLPICCPLLEEGINPEVWALERQFGRAKNARPVQIRLKDPTTFPYQRQYPLRLEAHKALQDIVKHLKPQGLVRKCSSPCNTPVLGVQKPNGQWRLVQDLRLINEAVIPVYLVVANPYTLLSQIPEEAEWFMVLDLKDAFFCIPLHSGSQFLFAFEDPTDHMSQLMWMVLPQGFRDSPHLFGEALAQDLGHFSSPGTLVLQYMDDLLLATSWEASCQQATLELSS

SEQ ID NO: 52790 - protein, 229 aa, Homo sapiens; identical to SEQ ID NO: 40938
  DOMAIN (101)..(112): RNase H domain identified by eMATRIX, accession number PF00075B, p-value=1.000e-13, raw score of 12.56
  DOMAIN (34)..(219): Reverse transcriptase domain identified by PFam, accession name rvt, E-value=1.3e-27, PFam score of 105.1

SEQ ID NO: 52791 - protein, 21 aa, Homo sapiens
EVAVLHCRSHQKGEGEGRTAA

SEQ ID NO: 52792 - protein, 316 aa, Homo sapiens
  DOMAIN (35)..(47): PEPSIN (A1) ASPARTIC PROTEASE FAMILY SIGNATURE domain identified by eMATRIX, accession number PR00792C, p-value=1.931e- 09, raw score of 9.10
  DOMAIN (18)..(115): Retroviral aspartyl protease domain identified by PFam, accession name rvp, E-value=1.7e-15, PFam score of 60.2
SNDRTEDDCGKHPFMSSPPTEPWVCLIIEGQEIDFLLDTGTTFSVLIPCLGRLSSRSVTIQGILGQPVTRYFSHLLSCNWETLLFSHAFLVMPESPTPLLGRDILAKAGAIISMKTGNKLPICCPLLEGINPEVWALEGQFGRAKNAHPLQIRLKDPISFPYQRQYPLRPEAHKGLQDIVKHLKAQDSVRKCSSPCNTPILGVQKLNSQWRLVQDLRLINEAVIPLYPVVRNPYTLLSQVPEEAEWFTVLDLKDAFFCIPLHSDSQFLFAFEDPTDHTSQLMWMVLPQRFRDSPHLFGQAQAQDLGHFSSPGTLVL

SEQ ID NO: 52793 - protein, 400 aa, Homo sapiens; identical to SEQ ID NO: 47718
  DOMAIN (35)..(47): PEPSIN (A1) ASPARTIC PROTEASE FAMILY SIGNATURE domain identified by eMATRIX, accession number PR00792C, p-value=1.931e- 09, raw score of 9.10
  DOMAIN (18)..(115): Retroviral aspartyl protease domain identified by PFam, accession name rvp, E-value=1.7e-15, PFam score of 60.2

SEQ ID NO: 52794 - protein, 102 aa, Homo sapiens
DQEEEAQKEKQDQRKAAALVMALRQTNLGDSERTENGAGQSLAVEGQEIDFLLDNGAAFSVLISCPRQLSSRSVTIRGILGQPVTRYFSHLLSCNWETFLQI

SEQ ID NO: 52795 - protein, 132 aa, Homo sapiens
VEGQEIDFLLDNGAAFSVLISCPRQLSSRSVTIRGILGQPVTRYFSHLLSCNWETFLQISSPLEDTTTAGPFFTPIQEEVARVVIIQFPTAIGVSCLEGGLTGEANRASESALKIRAPLLLQRNAAPHQQRN

SEQ ID NO: 52796 - protein, 25 aa, Homo sapiens
FFFFFTFQNCIKNCNSHCEGLRLHS

SEQ ID NO: 52797 - protein, 313 aa, Homo sapiens
  DOMAIN (213)..(220): RNase H domain identified by eMATRIX, accession number PF00075I, p-value=9.053e-10, raw score of 16.21
  DOMAIN (206)..(282): Integrase core domain identified by PFam, accession name rve, E-value=6e-17, PFam score of 62.6
SNNRTEGASSCHPLTEPQVCLTIEGQEIDFLLDTGTAFSVLISCPAWGTGQDSVSKKNEKKRKEKAKGNHQANAEAKIAARWNPSLEIPTEGPLVWNNPLQEIKPQYSLTETEWGLSQGHSFLPLGWLMTEEVKVLIPEASQWKILKTLHQTFQMGIENTQQMAKSLFTGPNLLWTIRHVVKACEVCQRNNPLVHHKAPLGEQRIGHYPGEDWQLDFTHMPKSKGFQYLLVCVDTFTNWIEAFPCKIEKAQEVNKVLIHETIPRFGLPQSLQSDNDPAFKAMITQGIFQGAKDTISPSLCLEATILREGREGN

SEQ ID NO: 52798 - protein, 131 aa, Homo sapiens
  misc_feature (1)...(131): Xaa = X or * as defined in Table 2
GPLNPTFLGPPCGLGGKLVFLLLRQXVQLFRSAGSRDRCGFLDRERNKTNQNCGKQAKKSPKDHKNPRAVGYVPFNLXQEGNLAQPGYMSPSPSLIXSRSRQTWGSFQMILIGTKRNRPKRKSEIRERLQP

SEQ ID NO: 52799 - protein, 129 aa, Homo sapiens
  misc_feature (1)...(129): Xaa = X or * as defined in Table 2
RGKRTWRERRNGWSRGFCPLPLTGSWLISRESPRLACLGEGLGVPGMXDLPHAWPTTLMCPELVGSWSHXLQEXSHGPSQXVLQLLRWCVWSLFLLMFGCVWSFFLLVSSWSRWLRSEATDLCGECYSS

SEQ ID NO: 52800 - protein, 821 aa, Homo sapiens
  DOMAIN (706)..(717): RNase H domain identified by eMATRIX, accession number PF00075F, p-value=7.088e-10, raw score of 12.87
  DOMAIN (222)..(407): Reverse transcriptase domain identified by PFam, accession name rvt, E-value=2.4e-28, PFam score of 107.6
  misc_feature (1)...(821): Xaa = X or * as defined in Table 2
ETSCPLVRVHYAEAITGRCTAPEDEGSLGQKPPARRSNNRTEGAWGKRQLMSSPSTEPRVCLTIEGQEIDFLLDTGAAFSVLISCPGRLSSTSVTIQGILGQPVTRYFSHLLSCNWETLLFSHAFLLMPERPTGLLGRDILAKAGAIIYMNMGNKLPICCPLLVEGINPEVWALEGQFGRAKNARPLQIRLKDPTTFPYQRQYPLRPEAHKGLQDIVKHVKAQGLVKKCSSPCNTPILGVQKPNGQWSLVQDLRLISEAVIPLYPVVPNPYTLLSQIPEEAEWSWALTFKDAFFCIPLHSDSQFLFAFEDPTDHTSQLTGTVLPQGFRDSPHLFGQALAQDLGHFSNPGTLVLQYVDDLLLATSSEASCEQATPDLLNFLTNQGYKVSRLKAQLCLQEVKYLGLILARGTRALSKEXIQPILAYPHPKTLKQLRGFLEITGFCXLWIPGYSKIARPLYTLIKETQRANTHLVEWEPEAETTFKTLKQALVQAPALSLPTGQNFSLYVRERARIALGVLTQTHGTTPQPVAYLSKEIDVVAKGWPHCLRVVAAVAVLASEAIKIIQGKDLTVXTTYDVNGILGAKGSLWLSDNCLLRYQALLLEGPVLQICTCMALNPATFLPEDGEPIKHDCQQIIVQTYAARDDLLEVPLTNPDLNLYTDGSSFVENGIRKVSDVTILESKPLPPGTSAQLAELVALTWALELGKGKRINVYTDSKYAYLILHAHAAIWKEREFLTSVGTPIKYHKEIIELLHAMQKHKEVGILHXQSHQNRKERGEQQHKQLAEAAERKERDRKSKKETERKRQEVREKEGQTQKSKRG

SEQ ID NO: 52801 - protein, 1180 aa, Homo sapiens
  DOMAIN (856)..(872): MUCIN GLYCOPROTEIN PRECURSOR MEM domain identified by eMATRIX, accession number PD01364B, p-value=5.500e-09, raw score of 13.94
  DOMAIN (166)..(229): PWWP domain identified by PFam, accession name PWWP, E-value= 0.086, PFam score of 3.9
  misc_feature (1)...(1180): Xaa = X or * as defined in Table 2
DHPGHIHSSPCHERPNNVSTLPFLPGEQHPILLPPRNCPGDKILEENFRYNNYKRTMMSFKERLENTVERCAHINGNRPRQSRGFGELLSTAKQDLVLEEQSPSSSNSLENSLVKDYIHYNGDFNAKSVNGCVPSPSDAKSISSEDDLRNPDSPSSNELIHYRPRTFNVGDLVWGQIKGLTSWPGKLVREDDVHNSCQQSPEEGKVEPEKLKTLTEGLEAYSRVRKRNRNGIKVPPRSPRSTIGSPRPSMPSSPSTKSDGHHQYKDIPNPLIAGISNVLNTPSSAAFPTASAGSSSVKSQPGLLGMPLNQILNQHNAASFPASSLLSAAAKAQLGKSKQTCWXQQXAAVAILGAVAGSGNTGRDIGTLKHHVSLLLANMASPNRXRAKWSSSTKRXADVSAKRRIAEKKTTTYDSVEFAQTVSNGSSAVPKPGPDLLRKQGQGSFPISSMSQLLQSMSCQSSHLSSNSTPGCGASNTALPCSANQLHFTDPSMNSSVLQNIPLRGEAVHCHNANTNFVHSNSPVPNHHLAGLINQIQASGNCGMLSQSGMALGNSLHPNPPQSRISTSSTPVIPNSIVSSYNQTSSEAGGSGPSSSIAIAGTNHPAITKTTSVLQDGVIVTTAAGNPLQSQLPIGSDFPFVGQEHALHFPSNSTSQQPSSTPLEPQPPQFSTYLFASESTASPKPESINISSSLPAGEGKSEITPPPFRFSQPECKRCFSFSLQXHGWAGIAACSLSALSSLASEPSPSSCHASPATFNLTISDLLQQQNTPLPSLTQMTAPPDHLPSNQSDNSRAETLLTSPLGNPLPSFAGSDTTFNPLFLPAVNGASGLMTLNPQLLGGVLNSASANTANHPEVSIATSSQATTTTTTTSSAVAALTVSTLGGTAVVSMAETLLNISNNAGNTPGPAKLNSNSVVPQLLNPLLGTGLLGDMSSINNTLSNHQLTHLQSLLNNNQMFPPNQQQQQLLQGYQNLQAFQGQSTIPCPANNNPMACLFQNFQIQTPRCYGGGYTTHARCEGPAGGLGGSFRAVGHSGIWARSPRTVPQPEAPEHSQLFHTELQDKATLIFPERHMEMSFRCLWLTLKKGSGNEAPLTLRRRPTAVHGGEAAFPHGHISLQEGELLQVPMSFQGKKPVAPTHGPHGNLTPPPASQLWFLPPDLFLQPRRDTDLGTSKASTYY

SEQ ID NO: 52802 - protein, 167 aa, Homo sapiens
RLPRALCVHAAKTSKLSGPWSRPAAFMSTLLINQPQYAWLKELGLREENEGVYNGSWGGRGEVITTYCPANNEPIARVRQASVADYEETVKKAREAWKIWADVSLEMGKILVEGVGEVQEYVDICDYAVGLSRMIGGPILPSERSGHALIEQWNPVGLVGIITAFNF

SEQ ID NO: 52803 - protein, 619 aa, Homo sapiens
  DOMAIN (240)..(282): Aldehyde dehydrogenases glutamic acid proteins domain identified by eMATRIX, accession number BL00687B, p-value=8.154e- 23, raw score of 17.54
  DOMAIN (111)..(619): Aldehyde dehydrogenase family domain identified by PFam, accession name aldedh, E-value=4.9e-34, PFam score of 126.5
  misc_feature (1)...(619): Xaa = X or * as defined in Table 2
SATHGLSDSCYWLVVSRAIGRNNLSPASPASIIHALVFLAEPQLFQPRILGLIDEESGHEGGRPAAKTRKLSGPWSRPAAFMSTLLINQPQYAWLKELGLREENEGVYNGSWGGRGEVITTYCPANNEPIARVRQASVADYEETVKKAREAWKIWADIPAPKPKEKLVRQIGDALREEDSKLLRKPWCPLEDWGKILLEGVGEVQEYVDICDYAVGLSRMIGGPILPSERSGHALIEQWNPVGLVGIITAFNFPVAVYGWNNAIAMICGNVCLWKGAPTTSLISVAVTKIIAKVLEDNKLPGAICSLTCGGADIGTAMAKDERVNLLSFTGSTQVGKQVGLMVQERFGRHYQNWRSLLELGGNNAIIAFEDADLSLVVPSALFACCGEQLGQRCTTSRGRLFYYMESIHDEVFKQTLKRAYGTRSRVGNPWDPNVLYGAISHQGRQLSMFLGAVEEAKKERLAQWVYGGKVMDRPGNYVEPTNVTSLDHDASIAHTETFAPILYVFKFKNEEEVFAWEXWKXNRGLSSXHSLPKDLGAESFRWLGPKGTQTCGIVKCQPFPTKWGLRLGGAFGGEKAHLVVARESGQXCWGKQYMRKVYLVLFNYSKDLPSGPQGIKFQ

SEQ ID NO: 52804 - protein, 477 aa, Homo sapiens
  DOMAIN (303)..(321): DEAH-box subfamily ATP-dependent helicases proteins domain identified by eMATRIX, accession number BL00690B, p-value=9.036e- 14, raw score of 13.38
  DOMAIN (9)..(340): Malate synthase domain identified by PFam, accession name Malate_synthase, E-value=1.2e-10, PFam score of -161.3
MTEQATTTDELAFTRPYGEQEKQILTAEAVEFLTELVTHFTPQRNKLLAARIQQQQDIDNGTLPDFISETASIRDADGKIRGIPADLEDRRVEITGPVERKMVINALNANVKVFMADFEDSWHQTETADDADDAAELADDAAAVFEDSALVSDAFAFVSDVFAAEADLAAALACSVASPAFVVAVEADDAALSADFPAAVALAEACPALVDAALADDAAAVFEPAAAEALCPAAVSEDLAFVSTLIRLRSSYSATQKKQDILEAIRDHQVVIVAGETGSGKTTQLPKICMELGRGIKGLIGHTQPRRLAARTVANRIAEELKTEPGGCIGYKVRFSDHVSDNTMVKLMTDGILLAEIQQDRLLMQYDTIIIDEAHERSLNIDFLLGYLKELLPRRPDLKIIITSATIDPERFSRHFNNAPIIEVSGRTYPVEVRYRPIVEEADDTERDQLQAFVLVYVLCILIYVNNVNAYWSEVNI

SEQ ID NO: 52805 - protein, 394 aa, Homo sapiens
  DOMAIN (194)..(241): Malate synthase proteins domain identified by eMATRIX, accession number BL00510B, p-value=6.860e-13, raw score of 16.72
  DOMAIN (112)..(388): Malate synthase domain identified by PFam, accession name Malate_synthase, E-value=0.009, PFam score of -348.9
MVNSDEPAKQLLCQGMVLADAFYYVGENGERNWVSPVDAIVERDEKGRIVKAKDAAGHELVYTGMSKMSKSKNNGIDPQVMVERYGADTVRLFMMFASPADMTLEWQESGVEGANRFLKRVWKLVYEHTAKGDVAALNVDALTENQKALRRDVHKTIAKVTDDIGPRSMLTWKIRGIPADLEDRRVEITGPVERKMVINALNANVKVFMADFEDSLALRAGTKAAGVGEDRPLPLHKIVQIAVQFHDFLARAQPQHIAKRAEPGPDPALTSTCGLRSPHPHGATDRIRGEDRRAAATAKPAAAGGNATEGSASGARARRAIERKAPGRHAATETADDAAAAPDQRLGEGQGTPDYCFIVIGSILMSSLGIDLSGQNTTVLHLQRDSVVFDDCRQ

SEQ ID NO: 52806 - protein, 816 aa, Homo sapiens
  DOMAIN (159)..(200): Malate synthase proteins domain identified by eMATRIX, accession number BL00510D, p-value=1.000e-40, raw score of 14.13
  DOMAIN (1)..(423): Malate synthase domain identified by PFam, accession name Malate_synthase, E-value=1.5e-155, PFam score of 530.2
  misc_feature (1)...(816): Xaa = X or * as defined in Table 2
GQACHASSSPLKGSRGSPPNFEILYGPIFEDSLAPDXPKVIAGQITLRDAVTGPISSPNEAGKIYQLKPNPAVLICRVRGLHLPEKHVTWRGEAIPGSLFDFALYFFHNYQALLAKGSGPYFYLPKTQSWQEAAWWSEVFSYAEDRFNLPRGTIKATLLIETLPAVFQMDEILHALRDHIVGLNCGRWDYIFSYIKTLKNYPDRVLPDRQAVTMDKPFLNAYSRLLIKTCHKRGAFAMGGMAAFIPSKDEEHNNQVLNKVKADKSLEANNGHDGTWIAHPGLADTAMAVFNDILGSRKNQLEVMREQHAPITADQLLAPCDGERTERKFNALMESEKGQSQNLWKFAVYSGLRHGELAALAWEDVDLEKGIVNVRRNLTILDMFGPPKTNAGIRTVTLLQPALEALKEQYKLTGHHRKSEITFYHREYGRTEKQKLHFVFMPRVCNGKQKPYYSVSSLGARWNAAVKRAGIRRRNPYHTRHTFACWLLTAGANPAFIASQMGHETAQMVYEIYGMWIDDMSDEQIAMLNARVMVYDVASGNALFISELGPLPENVTWLSPEGEFQKWNGTAWVKDTEAEKLFRIREAEETKNNLMQVASEHIAPLQDAADLEIATEEEISLLEAWKKYRSIPLCSKVVTMMFDDRPGCPVGFPMWGRGGFDRMPPGWGGRPMPPSRRDMSPHRGPPPPLTGRGGRGGSRARNLPLPPPPPPIGEDLMAYDRRGRPGDCYYGMVGFSPDETWNSAIDTWSPSEWQMAYEPQGGSGYDYSYAGIGGSYGDLGGPITTAQVTIPKDLTGSIIGKRGQRIKQMLMSWQLS

SEQ ID NO: 52807 - protein, 316 aa, Homo sapiens
  DOMAIN (180)..(216): Malate synthase proteins domain identified by eMATRIX, accession number BL00510C, p-value=9.795e-34, raw score of 13.15
  DOMAIN (52)..(316): Malate synthase domain identified by PFam, accession name Malate_synthase, E-value=1.7e-37, PFam score of 138.0
  misc_feature (1)...(316): Xaa = X or * as defined in Table 2
MIPNVQGPMRGLEGPNYIFIKISKNRRYTMAVTSVGLASSLCRVVRPCRAPAGVVSRGSPDDEWLFCPQARIQQQQDIDNGTLPDFISETASIRDADWKIRGIPADLEDRRVEITGPVERKMVINALNAIFMADFEDSLAPDWNKVIDGQINLRDAVNGTISYTNEAGKIYQLKPNPAVLICRVRGLHLPEKHVTWRGEAIPGSLFDLALYFFHNYQALLAKGSGPYFYLPKTQSWQEAAWWSEVFSYAEDRFNLPRGTIKATLLDXTLAGGFQMVDPSALGGXTGPWDHLRYIKVENIPKVGEEGDAETTGGTAV

SEQ ID NO: 52808 - protein, 130 aa, Homo sapiens; identical to SEQ ID NO: 50677

SEQ ID NO: 52809 - protein, 253 aa, Homo sapiens; identical to SEQ ID NO: 50678

SEQ ID NO: 52810 - protein, 54 aa, Homo sapiens; identical to SEQ ID NO: 43361

SEQ ID NO: 52811 - protein, 300 aa, Homo sapiens; identical to SEQ ID NO: 50679
  DOMAIN (212)..(255): 1 kw MIND INHIBITOR DIVISION CONTROL domain identified by eMATRIX, accession number DM01756B, p-value=4.822e-15, raw score of 22.91
  DOMAIN (177)..(290): ParA family ATPase domain identified by PFam, accession name ParA, E-value=1e-15, PFam score of 65.7

SEQ ID NO: 52812 - protein, 678 aa, Homo sapiens
  DOMAIN (358)..(379): GLUTELIN SIGNATURE domain identified by eMATRIX, accession number PR00211B, p-value=4.721e-10, raw score of 0.86
MSKLNHNLSEVMSKLEKQHSSKVFVVKRLSSSSRRSLVISPPVRTSTVSSPLTSPTSPSTLSSKSKSESVSATEDLAPDAAQGEDNSEIKELLEDEEIGKEGSEASSSEEEEPLLTCNGPSQAQPSPIIESARSQEEVPPSSPALSPGGALSPSGHPLSSAAEVVLRTRTAGDALQKAFTDKEELLKQQASNLHEQKKAGVIFEAEEVITLLTSVLKTSSASRTSLSSRHQFAPGATVLYKGDKRVLNLDSPSSRLRTHRPLPKPRPGHRPEAVPDGWVQRSLSFTGPPAMTIMYSCIANGRAVLAELTLTGGSYQVPPDPRHRPHGFRPSRVVPPEPAPKDAALRGGPEPARGTQAPAPREIPPPRETPPPQEAPPQREAGVPAAAALRTSTVSSPLTSPTSPSTLSSKSKSESVSATEDLAPDAAQGEDNSEIKELLEDEEIGKEGSEASSSEEEEPLLTCNGPSQAQPSPIIESARSLSMKKTTSGDNHTLRDPHYVEDKGHKYLVFEANTGTENGYQGEESLFNKAYYGGGTNLVRKESQKLQQSAKKRDAELANGALGIIELNNDYTLKKVMKPLITSNTVTDEIERANVFKMNGKWYLFTDSRGSKMTIDGINSNDIYMLGYVSNSLTGPYKPLNKTGLVLQMGLDPNDVTFTYSHFAVPQAKGNNVVQGAN

SEQ ID NO: 52813 - protein, 233 aa, Homo sapiens
RLFGEMSKLNHNLSEVMSKLEKQHSSKVFVVKRLSSSSRRSLVISPPVRTSTVSSPLTSPTSPSTLSSKSKSESVSATEDLAPDAAQGEDNSEIKELLEDEEIGKEGSEASSSEEEEPLLTCNGPSQAQPSPIIESARSQEEVPPSSPALSPGGALSPSGHPLSSAAEVVLRTRTAVPQAKGNNVVITSYMTNRGFFEDKKATFAPSFLMNIKGNKTSVVKNSILEQGQLTVN

SEQ ID NO: 52814 - protein, 630 aa, Homo sapiens; identical to SEQ ID NO: 50681
  DOMAIN (160)..(192): ABC transporters family proteins domain identified by eMATRIX, accession number BL00211B, p-value=8.714e-27, raw score of 13.37
  DOMAIN (42)..(234): ABC transporter domain identified by PFam, accession name ABC_tran, E-value=1.8e-26, PFam score of 101.4

SEQ ID NO: 52815 - protein, 425 aa, Homo sapiens
  misc_feature (1)...(425): Xaa = X or * as defined in Table 2
LSVFPRVRNFTTQAECHKLFKVLKNFLIAGGGVHESSKRASXTLQFIYYSEWYGHEELKAIVWNNDLLWEDYEEKLADQAVRTMEIYVAQFSEIKERIAKRGRKLVDYDSARHHLEAVQNATKKDEAKTAKAEEEFNKAQTVFEDLNQELLEELPILYNSRIGCYVTIFQNISNLRDVFYREMSKLNHNLYEVMSKLEKQHSNKVFVVKGLSSPSTLSLKSESESVSATEDLAPDAAQGEDNSEIKELLEEEEIEKEGSEASSSEEDEPLPACNGPAQAQPSPTTERAKSQEEVLPSSTTPSPGGALSPSGQPSSSATEVVLRTRTASEGSEQPKKRASIQRTSAPPKPPEKPVRTPEAKENENIHNQNPEELCTSPTLMTSQVASEPGEAKKMEDKEKDNKLISANSSEKYIFQRPSVLIHMKH

SEQ ID NO: 52816 - protein, 594 aa, Homo sapiens
  misc_feature (1)...(594): Xaa = X or * as defined in Table 2
MPGARTSSSGASENHRARGQGGGPQGVGRMAEGKAGGAAGLFAKQVQKKFSRAQEKALXKLGKAVETKDERFEQSASNFYQQQAEGHKLYKDLKNFLSAVKVMHESSKRVSETLQEIYSSEWDGHEELKAIVWNNDLLWEDYEEKLADQAVRTMEIYVAQFSEIKERIAKRGRKLVDYDSARHHLEAVQNAKKKDEAKTAKAEEEFNKAQTVFEDLNQELLEELPILYNSRIGCYVTIFQNISNLRDVFYREMSKLNHNLYEVMSKLEKQHSNKVFVVKGLSSSSRRSLVISPPVRTATVSSPLTSPTSPSTLSLKSESESVSATEDLAPDAAQGEDNSEIKELLEEEEIEKEGSEASSSEEDEPLPACNGPAQAQPSPTTERAKSQEEVLPSSTTPSPGGALSPSGQLSSSATEVVLRTRTASEGSERPKKTASIQRTSAPPRRPPPPRATASPRPCSGNIPSSPTASGGGSATSPRASLGTGTASPRTSLEIXPNPEPPEKPVRTPEAKENENIHNQNPEELCTSPTLMTSQVASEPGEAKKMEDKEKDNKLISADSSEGQDQLQVSMVPENNNLTAPEPQEEVSTSENPQL

SEQ ID NO: 52817 - protein, 119 aa, Homo sapiens
RPSLGLGMCTIWQTSLAGKHRRTIETHTDDYRISLEQGTPGLEPPLNALTAISKKIGCNGFFPFQIRPGKNETDGRMFSPAIGIVEDPVTGNANGPMGAWLVHHNVLPHDGNVLRVKGH

SEQ ID NO: 52818 - protein, 141 aa, Homo sapiens
  misc_feature (1)...(141): Xaa = X or * as defined in Table 2
WGSKGNLLYSHQTHSVSHQFSLVACCLELEYSPFSFPYACLLSSLMRLEKHQELNLWPAHQRSMRHPQDTLVVFSHHGRVLLXDKTSRGTIRQQHSRFTKICCSAATAAVTQANRVWSGPLANSNRPAAEGPVLAAFMGWL

SEQ ID NO: 52819 - protein, 375 aa, Homo sapiens
TSIGSAGLLWRRLTNQRVRATSTTPDIIIMSILLIQCLLGLSTIPFSAQYPDGSEMMKLVGWAQSIVTFRGGSSEMLNGVAFVFRLHLVLGMTIFLLFPFTRLVHVWSAPFEYFTRRYQIVYHVDAFTSQPFRGNSAGVVFPADNLSEAQMQLIARELGHSETAFLLHSDDSDVRIRYFTPTVEVPICGHATVAAHYVRAKVLGLGNCTIWQTSLAGKHRVTIEKHNDDYRISLEQGTPGFEPPLEGETRAAIINALHLTEDDILPGLPIQVATTGHSKVMIPLKPEVDIDALSPDLNALTAISKKIGCNGFFPFQIRPGKNETDGRMFSPAIGIVEDPVTGNANGPMGAWSVFHGSRPTLDDPPAQIYPYFQMM

SEQ ID NO: 52820 - protein, 300 aa, Homo sapiens
  misc_feature (1)...(300): Xaa = X or * as defined in Table 2
MCARGSLWGCYSGLERKCEAALPDRVVSSKSACGAVSQDLLQAQGRRAGPPSWLYADPVHTGTIECGGHWCLNAALLDFQSPQRLLTYLHCGLQRPMESDPPELAPMVHHQEGIYLNIRKAMYDKPTANKLNWDKSNVSSLITGTRQEETTANGTTFATIHLQFFIQIPAVPRKTLLNRADYYFPEHNPSLTLVINRRITKFSEPNWEAPPSRGRLTPHTAGYSSETKIPEERSDSSIRGSRKSAVLQPLLLDSQANRVWSGPLANSNRPAAEGPVCXLWWVTLHGPLKATMQVCQQPLW

SEQ ID NO: 52821 - protein, 217 aa, Homo sapiens
  misc_feature (1)...(217): Xaa = X or * as defined in Table 2
YPPSPAELTVCRLRQLQLRDVLYCIAYPSGPGVKPFRGNSAGVVFPADNLSEAQMQLIARELGHSETAFLLHSDDSDVRIRFTPTVEVPICGHATVAAHYVRAKVLGLGNCTIWQTSLAGKHRVTIEKHNDDYRISLNALTAISKKIGCNGFFPFQIRPGKNETDGRMFSPAIGIVEDPVTGNANGPMGAWLVHHNVLPHDGNVLRVRQXGPRDFGL

SEQ ID NO: 52822 - protein, 464 aa, Homo sapiens
  misc_feature (1)...(464): Xaa = X or * as defined in Table 2
MELKTKARELREECRSLRSQCDQLEERVSAMEDEMNEMKQEGKFREKRIKRNEQSLQEIWDYVKRPNLRLIGVPESDAENGTKLENTLQDIIQETFPNLARQANVQIQEIQRTPQRYSSRRATPRHIIVRFTKVEMKEKMLRAAREKGRVTLKGKPIRLTADLSAETLQARREWGPILNILKEKNFQPRISYPAKLSFISEGEIKYFTDKQMLTDFVTSRPALKELLKEALNMERNNRYQPLQNHAKMMGKDFMTKTPKAMATKAKIDKWDLIKLKSFCTAKETTIRVNRQLTEWEKIFAVYSSDKGLISRIYKEHKQIYKKKTNNPISNWAKDMNRHFSKEDIYAGNRHMKKCSSPLAIREMQIKTTTGPSAAGLLEFARGPLQTLFAWVSAAVAAEQRIFVNRKCCCLIVPLEVLSQRSTQPCEPVGKAQYSRGSGPIFQVPSVTPFLDQERELPDPLRFPX

SEQ ID NO: 52823 - protein, 143 aa, Homo sapiens; identical to SEQ ID NO: 47698
  DOMAIN (73)..(121): Ribosomal protein S13 proteins domain identified by eMATRIX, accession number BL00646A, p-value=2.887e-11, raw score of 25.82
  DOMAIN (20)..(143): Ribosomal protein S13/S18 domain identified by PFam, accession name Ribosomal_S13, E-value=3.5e-26, PFam score of 100.4

SEQ ID NO: 52824 - protein, 155 aa, Homo sapiens
  misc_feature (1)...(155): Xaa = X or * as defined in Table 2
GVHAASDKPCWITTSQTPDVQHRWWLLISSMLXTAPNRRSDKAFTPHPTNHAGSQLRKHPTCSIDGVIDIFHAVNTFVQHHMEETLKAFHVTGHHILIARHGLGVGKENTEHAANVVNDQRNSGFFCRFQQTFCQTCCQLIQRFVNARLRDFISC

SEQ ID NO: 52825 - protein, 98 aa, Homo sapiens
  DOMAIN (15)..(48): Ribosomal protein S13 proteins domain identified by eMATRIX, accession number BL00646B, p-value=2.034e-09, raw score of 21.42
  DOMAIN (2)..(88): Ribosomal protein S13/S18 domain identified by PFam, accession name Ribosomal_S13, E-value=1.5e-15, PFam score of 64.2
  misc_feature (1)...(98): Xaa = X or * as defined in Table 2
IQVLANGLDNKLREDLERLKKIRAHRGLRHFWGXVGGLISLPTSTQHSSYSLFFFPNLLFLLCMTCDSSLFTCSLRVRGQHTKTTGRRGRTVGVSKKK

SEQ ID NO: 52826 - protein, 115 aa, Homo sapiens
  DOMAIN (54)..(101): PROTEIN STEROL CARRIER LIPID-TRAN domain identified by eMATRIX, accession number PD02796B, p-value=6.270e-09, raw score of 20.92
  misc_feature (1)...(115): Xaa = X or * as defined in Table 2
FIDTTEAGSHFLYALVRFAATITTITDDGARRLRTLFQRQQADLVSVSKSGFFTADCTHTNALIDVVRTIFNNAVFXNPGFVIARLKIEIAIIKATFGQLTEDREQVLMFQAVRR

SEQ ID NO: 52827 - protein, 47 aa, Homo sapiens
  misc_feature (1)...(47): Xaa = X or * as defined in Table 2
SVLPGRPDARQYRQTRQSWXRWSLRLRGSYPVAGRSLSRRHRQTERF

SEQ ID NO: 52828 - protein, 141 aa, Homo sapiens
LVHQQWIQTKKKSLIYPFCHSPSQRVVEVAALDQWLAMLYPRVEHQAVLAVVVVVVGPLVVRPYHTRRDAVRLLRQPAVFIVAVDIVRILRDAVIRPHCECTVRVRSGSGSRLPAGSVAYGMRMSRSGARVRTLSILPVAL

SEQ ID NO: 52829 - protein, 305 aa, Homo sapiens
MSRTRQSKPNRSRTVASNVAAAVVGKVVVAVNSNHAVGKVAQNLQARNLQKNRLTASAMPNRQANNNVAAVRVNLPLRKGLLEAAEEAGIPLVVNHVVGMFGIFFTDAESVTCYQDVMACDVERFKRFFHMMLDEGVYLAPSAFEAGFMSVAHSMEDINNTIDAARRIKYGAPIKVDSSPAGIWNGNSTIRPHQSANTSSKPPTSAEITMCGIVRRKPIIRAICGAIKPTKLNGPIVIVAVADFLAAQRISLFTNQQTDFTRHKFFTGWQFGIKEERFAKCHLKQRANGHYDKCLFVFNRLLKCF

SEQ ID NO: 52830 - protein, 51 aa, Homo sapiens
LLHQASGRLRSARGLRHCSRVLSLVHVRVLWRRLSGGSHCSLSVAVFGRVF

SEQ ID NO: 52831 - protein, 54 aa, Homo sapiens
TFDRRQVQDVSRLHSGSSKSVCVRIFGSGRAVSMQSIHSGARQPWGHFPHRLGY

SEQ ID NO: 52832 - protein, 251 aa, Homo sapiens
  DOMAIN (121)..(169): Ribosomal protein S13 proteins domain identified by eMATRIX, accession number BL00646A, p-value=5.183e-09, raw score of 25.82
  DOMAIN (142)..(203): Ribosomal protein S13/S18 domain identified by PFam, accession name Ribosomal_S13, E-value=4.7e-29, PFam score of 110.0
DSTASHHATAAGCGVNALSDLRLCSGSLAFGNDYPMRLGQLRALVKSLRFFFTRLAQTFVDLRIVQRTRNAVTKIREFILQKIYSFRKPMTNYQIPQAALLKYSEVTGIGPKAPEVVGAQVHHTGSSLDRMTSSNLPLVSQGVGRRYAHVVLRKADIDLTKRAGVLTEDEVERVITIMQNPRQYKIPDWFLNRQKDVKDGKTSDTYLPSEPLSLPTLNQGFSLLHECHQTPEGGRQQLLNELLERSASTHR

SEQ ID NO: 52833 - protein, 165 aa, Homo sapiens
  DOMAIN (23)..(71): Ribosomal protein S13 proteins domain identified by eMATRIX, accession number BL00646A, p-value=6.192e-29, raw score of 25.82
  DOMAIN (24)..(159): Ribosomal protein S13/S18 domain identified by PFam, accession name Ribosomal_S13, E-value=3.2e-48, PFam score of 173.6
  misc_feature (1)...(165): Xaa = X or * as defined in Table 2
ARAAACAAAMSLVIPEKFQHILRVLNTNIDGRRKIAFAITAIKGVGRRYAHVVLRKADIDLTKRAGELTEDEVERVITIMQNPTQYKIPDWFLNRQKDVKDGKFQPGSXANGLSTTKLRENLKPLKEDSGPIKGLRQLPWGLRVRGQHTKTTGRRGRTVGVSKKK

SEQ ID NO: 52834 - protein, 399 aa, Homo sapiens
MGLHRRFILILRACRLGQILPAGPTLMEVFSRAVVRRDILLSMREGCGCHHTEANTLSPGDGEERKWKEQGSSSPDCYENEQRPDVLPAPLLKAWCVTAKALPDISAISALLAVKHGNYSSLTPPLSPCTHYGRWPQHGFTSLKKLRPQSVTSRIQPGSDVIVCAEMDEQWGYVGAKSRQRWLFYAYDRIRRTVVAHVFGPAGMQDSRQSLHSSRRDLSLLTDVRTAKHADFGYLALKRKTCNCVTYTLLNPIAPENHDYGMNDPGSDVIVCAEMDEQWGYVGAKYRQRWLFYAYDSLRKTVVAHVFGERTMATLGRLMSLLSPFDVVIWMTDGWPLYESRLKGKLHVISKRYTQRIERHNLNLRQHLARLGRKSLSFSKSVELHDKVIGHYLNIKHYQ

SEQ ID NO: 52835 - protein, 635 aa, Homo sapiens
  DOMAIN (275)..(327): CBS domain identified by PFam, accession name CBS, E-value= 1.8e-08, PFam score of 41.6
MRTAIATVICCNNCQRRHTNSRCHTDNCRRADSASSHATSGSSSRGCAGSGRCGASSTRRCLGPVCCFRGSKRSWRRQHEGHKDCRKLVFHNFSFIHRMDNTAVPPVQLLTGWCVTAKAPPDISAISALTAVKHGNCSSLTPLLNPPGSDVIVCAEMDEQWGYVGAKSRQRWLFYAYDSLRKTVVAHVFGERTMATLGRLMSLLSPFDVVIWMTDGWPLYESRLKGKLHVISKRYTQRIERHNLNLRQHLARLGRKSLSFSKSVELHDKQQGLDAALIDAPLAVDAQTPLSELLSHVGQAPCAVPVVDEDQQYVGIISKGMLLRALDREGGVRVPVIYPKRFRTTDVCMPLSLGTCIREIEAEFPDPIFRRSVVYICEHNTNGAMGIIVNKPLENLKIEGILEKLKITPEPRDESIRLDKPVMLGGPLAEDRGFILHTPASNFASSIRISDNTVMTTSRDVLETLGTDKQPSDVLVALGYASWEKGQLEQEILDNAWLTAPADLNILFKTPIADRWREAAKLIGVDILTMPAQDGTPDWNIIERLLKEWQPDEIIVGLPLNMDGTEQPLTARARKFANRIHGRFGVEVKLHDERLSTVEARSGLFEQGGYRALNKGKVDSASAVIILESYFEQGY

SEQ ID NO: 52836 - protein, 158 aa, Homo sapiens
WTWWLRCYENRHRHCHLLQQLPTSPHQHAVATPTTVAVPTAPAATPPVVVAVVVAPVVVVVVPVVPVVASVPFVEPGSDVIVCAEMDEQWGYVGAKSRQRWLFYAYDSLRKTVVAHVFGERTFDVVIWMTDGWPLYESRPAFTGRDCVDDAFFAVAGV

SEQ ID NO: 52837 - protein, 157 aa, Homo sapiens
MATAVHLHRFSTRPQSVTSRIQPGSDVIVCAEMDEQWGYVGAKSRQRWLFYAYDSLRKTVVAHVFGERTMATLGRLMSLLSPFDVVIWMTDGWPLYESRLKGKLHVISKRYTQRIERHNLNLRQHLARLGRKSLSFSKSVELHDKVIGHYLNIKHYQ

SEQ ID NO: 52838 - protein, 107 aa, Homo sapiens
  DOMAIN (63)..(90): Protamine P1 proteins domain identified by eMATRIX, accession number BL00048, p-value=9.775e-09, raw score of 6.39
SRIQPGSDVIVCAEMDEQWGYVGAKSRQRWLFYAYDSLRKTVVAHVFGERTIRTLTRRLFRCLRSSHDLVSSPVSHRRRRAGSRQRHRRARGGENVEYQWGALRHGA

SEQ ID NO: 52839 - protein, 93 aa, Homo sapiens
ARYVGNAGCTGGALFGRSQTIREAVGERRLAESRDVAALDTPCDPEIKMAEWMQTLKETGSTSGHIVTRRISVRISHVTPGPASQDGPDVQQR

SEQ ID NO: 52840 - protein, 1631 aa, Homo sapiens
  DOMAIN (618)..(632): Orn/Lys/Arg decarboxylases family 1 pyridoxal-P attachment si domain identified by eMATRIX, accession number BL00703D, p-value= 2.552e-09, raw score of 10.19
  DOMAIN (573)..(761): Orn/Lys/Arg decarboxylase domain identified by PFam, accession name OKR_DC_1, E-value=4.1e-16, PFam score of 60.1
  misc_feature (1)...(1631): Xaa = X or * as defined in Table 2
MTCRRDATQVEDTAEFPFSMLAYQRTCPNNSGHISQQAQHGSIRTPPDSSHALGGSPSWQTSPIHCVVQVCKGWATWPPSIPQQFQSSQSDNQKATTGLSYRTNAHKLVLPEPTRTELGQNPYKTSHGHKRGTANTLTPPTTVQTKDPNQAHTAATDYMPSYSADFHKRWVPFTYVRAGRDPVCILGSGLHGMLGCYGRYRQRIILRLLRAVVLYRDRDFGSPNASARLDFGTSSHHGSASIATWAYRLRGITVMPIKLYSLRLAYLVALRGLSTHEGSGTPQGGPTYRFYIPLFRPLRRKALHYLSSKVDSSAKSSSGGTGSRHHKPMSCTTLHHYNCTTEPQTIQYNYYRPNSPKNNQGESQLEVSPPRIVVVGTIGPEGANYRYCESSERQGYTTTNKEQHNKYQRKQQQKREDNPQQKQPQNHHGDTPTNRAEKQNIYNNQHHTRGPPHSEPNGKTPRPENRGPTPPTTSEGVTVSSNTQHSREQVKTPTKRKTINTQRSQNTPQKCRTARRNTRDEPNRKHTNQENQEQKKAEKKKGTCNCSTTSTMSSCIRDPRDPEVTLSPERETVYMVPSRNRYGIIGPIFRRKCNLKPCRRKSVKAADQRQSRAKTVLLRGDNCTYDGVCYNAKEAQDRWKKPPIVCTLTKPGTACTFQPDLCRSLCHARRPGDHNGPTASYIHVREGVGRLNFFRFNQAYMMHAPPPRCMPSAHPTTWRCDDGRQQRPVTDTGRLLGNASGRKLAGFKDIPDNWSMLDPIKSASLLREWVKMVNWKKRCSGGAVFKSVSLIRHNRPFNRSTLRGVCMTLRLSSARLNMLCVTRFAPPIVERQRLPSQPCQVLPQIRLCRSIRCVYRLLITCTFPSGGIHTAASHPSSIHHAYTVKTGSFNGGDGGILNQEPGYVARQRQKGPPIIREETEAYKMTTSGRQLRVPWKVARAPKEPTSGCVLYYAATRHCGRGRRQAAASCQVTLEDPVWIGFDDHRRNLGHTRLPERLKIRSQCAGAAADAATGYCDGEFDRSTGQLANGGNSREDISSKFADKVHLFMRIRRERVIRLTKSQTHAFTLAPALSTIRARGQRTDIARFIEVRVFQQTIICASGQRTCGSGSGSRLPVIPGRDLALPRYSFAGKNLFVDQYRDTGRTVCPPANHDRWAPLKTQHIDKSHKTKKNKGGYLGPHCCIGPEGECFKRRWGYPPSILDYGSTFLCRRCSSWWQESGRVGGCLVCTTTLRIVCPAQRWSRDGGLLLQPSYSADFEQPKEEKPALRVMDGDTGDGVLTIAGLRCKDMHAAPVRYRNQDDHGYKLHTGTRFYVELCGDRFRLRAQGLPHLGRTLESEPARKWNPPKTKESPTELHGTWEPRWDPAITPKAPRDNTTTRARTDLHPPPRNTIHLNEKSITDHMRVYPGAPVVHLRSRGRQPGVDGGDSLTSRAAAIRVPPRKCPQMCITQFPPRVTHTKHYLFYISLKTDQYKQLKKELPINKALRAPEELLSPARGPSKGSPVGQNFLILPALLKANNTKEIHILCPTFHPSFSLGCYGGSPVASPHYRVNSSQQHRTTSSFTNHIQMIYKRRGGSPMRKAPEIYEEELVGLVIHFLGLGCLIRRVQIHNTNNAICFYWIEKLSTWVADX

SEQ ID NO: 52841 - protein, 408 aa, Homo sapiens
MTWAKAITEGCEKAMCLAAAAKASESTSTTAAVANRKRTRSESGKKRRSNFFISAIRTDSPGRERCFHGRLIPESAVKHALLRQRRISDRPSSSGNPRCDNRHIRVLFLGIIIGLGTEVEFGIMVKPGSDVIVCAEMDEQWGYVGAKSRQRWLFYAYDRLRKTVVAHVFGERTMATLGRLMSLLSPFDVVIWMTDGWPLYESRLKGKLHVISKRYTQRIERHNLNLRQHLARLGRKSLSFSKSVELHDKVIGHYLNINTINKLESLPNPNNKLPVTCTNCHGQPSPQHREGVKDVMRFNEPMYKVGEQNSVCMSCHLPEQLQKAFWPHDVHVTKVACASCHSLHPQQDTMQTLSDKGRIKICVDCHSDQRTIRTLTRRLFRCLRSSHDLVSSPVSHRRRRAATVRGIL

SEQ ID NO: 52842 - protein, 100 aa, Homo sapiens
YGHEWRWMPGNSPHYGRWPQHDFPPFKKLRPQSVTSRIQPGSDVIVCAEMDEQWGYVGAKSRQRWLFYAYDRLRKTVVAHVFGERTGNRYIASITAEVMK

SEQ ID NO: 52843 - protein, 162 aa, Homo sapiens
MSSRRVPSSPVVKTFINDLNNQIWRMPGLLNTREIAGRYKKLLEMTINMLNVFGNEDFDCHGDLKADQLKMDILIKKLKQKFSKEPSSPRGGRTTRGEYRDESRLKGKLHVISKRYTQRIERHNLNLRQHLARLGRKSLSFSKSVELHDKVIGHYLNIKHYQ

SEQ ID NO: 52844 - protein, 126 aa, Homo sapiens
RSDRLLIHGFSFPAMGFRLRKTVVAHVFGERTMATLGRLMSLLSPFDVVIWMTDGWPLYESRLKGKLHVISKRYTQRIERHNLNLRQHLARLGRKSLSFSKSGTACCGHCLTRDIPMLHHQGNQLF

SEQ ID NO: 52845 - protein, 157 aa, Homo sapiens
  misc_feature (1)...(157): Xaa = X or * as defined in Table 2
SMGSGDMRSSPSRAAALRQLPRPFRQLAVRMEMISRFRSAKEQTKSLRKWRKAKSIFXSVAQTGFNVLVCTTIIETGIDSRQPTLLSLNARITSVCAAAPVTRSRRTFASSGYAWLLTPHPKAMTTDAKNVLKQLPRWKISGQVRAGTARSGDSRRW

SEQ ID NO: 52846 - protein, 349 aa, Homo sapiens
  DOMAIN (31)..(72): Bacterial regulatory proteins gntR family proteins. domain identified by eMATRIX, accession number BL00043, p-value=5.000e-10, raw score of 22.96
  DOMAIN (18)..(155): Bacterial regulatory proteins, deoR family domain identified by PFam, accession name deoR, E-value=1.6e-66, PFam score of 234.4
MSNTDASGEKRVTGTSERREQIIQRLRQQGSVQVNDLSALYGVSTVTIRNDLAFLEKQGIAVRAYGGALICDSTTPSVEPSVEDKSALNTAMKRSVAKAAVELIQPGHRVILDSGTTTFEIARLMRKHTDVIAMTNGMNVANALLEAEGVELLMTAGICALLTGCCVTAKAPPDISAISALTAVKHGNCSSLTPLLNPPGSDVPVCAEMDEQWGYVGAKSRQRWLFYAYDSLRKTVVAHVFGERTMATLGRLMSLLSPFDVVIWMTDGWPLYESRLKGKLHVISKRYTQRIERHNLNLRQHLARLGRKSLSFSKSVELHDKVIGHYLNGDFLQSTLREAPLIPHTREHP

SEQ ID NO: 52847 - protein, 93 aa, Homo sapiens
  misc_feature (1)...(93): Xaa = X or * as defined in Table 2
LTGFRRLCDLRFGGGAVRSVLARSREFILQHXFRRIVTGSMGRSLVPSAPLRPSIVLVLFRKAWXLVKTQRKMHVVSIVQKKASCWYPLLGCL

SEQ ID NO: 52848 - protein, 884 aa, Homo sapiens
  DOMAIN (598)..(649): D-isomer specific 2-hydroxyacid dehydrogenases NAD-binding si domain identified by eMATRIX, accession number BL00065C, p-value= 1.621e-35, raw score of 27.25
  DOMAIN (482)..(670): D-isomer specific 2-hydroxyacid dehydr domain identified by PFam, accession name 2-Hacid_DH, E-value=6.3e-140, PFam score of 342.4
MGWGKFVGFALLEFLAPLGTPVFVGMLQTPDLRALPPRVLWRVTTAMEARLPRCGRKGLRNILYDVLWDMEEVENRAKNNLPRGADIWQRPCIPGPLADMGCQQTVTLFSRYVHFCPEADIFMYTAMEPEGSEKPTPPPRGRRRTGTVGGQLGPGHAQQLGSDIQLKLQGLGYLSKGFAPDLGKMRAHVEAAIGKFLQNFGVLETLLKRALPKAPLPNLTGPSPLLNGPLAMDGFEVNGLRLFSLSIPEPSVKNLFAVNEFYRNNDDFINPDLQERPQSVTSRIQPGSDVIVCAEMDEQWGYVGAKSRQRWLFYAYDRLRKTVVAHVFGERTMATLGRLMSLLSPFDVVIWMTDGWPLYESRLKGKLHVISKRYTQRIERYNLNLRQHLARLGRKSLSFSKSVELHDKVIGHMWYELIMSCSRCFFSFLSCVLSFVCLTSDPLWLDRTSAKRSRPETVAMLFRIEQPGDLMRAKARIPGIYAPFSNTRSVAELVIGELLLLLRGVPEANAKAHRGVWNKLAAGSFEARGKKLGIIGYGHIGTQLGILAESLGMYVYFYDIENKLPLGNATQVQHLSDLLNMSDVVSLHVPENPSTKNMMGAKEISLMKPGSLLINASRGTVVDIPALCDALASKHLAGAAIDVFPTEPATNSDPFTSPLCEFDNVLLTPHIGGSTQEAQENIGLEVAVHIHENRPGVLTALNKIFAEQGVNIAAQYLANCRPDGYVERQQERGNTGSCEISISNIQHIGNVRLKNISKLENMEFCATKQRVYFSDKNKKASYKIINYGDYYDVDYYDNNLKNEVFDWIVIAGADEWQEIEDFGHERLEWLKKYGDFDNGIPVDDTIARVVSNIDSLAFEKMFIEWMQECHEITDGEIIAIDGRP

SEQ ID NO: 52849 - protein, 284 aa, Homo sapiens
  DOMAIN (170)..(185): Glutamine synthetase proteins domain identified by eMATRIX, accession number BL00180G, p-value=8.683e-14, raw score of 10.20
  DOMAIN (169)..(187): Glutamine synthetase domain identified by PFam, accession name gln-synt, E-value=5.1e-10, PFam score of 33.2
MQDELVKLQAKHQRTIVFISHDLDEAMRIGDRIAIMQNGEVVQVGTPDEILNNPANDYVRTFFRGVDISQVFSAKDIARRTPNGLIRKTPGFGPRSALKLLQDEDREYGYVIERGNKFVGAVSIDSLKTAATDGVVRNGKSTAGHQRYLCSHCRKTWQLQFTYTASQPARRIEVRFPDPAANPYLCFAALLMAGLDGIKNKIHPGEAMDKNLYDLPPEEAKEIPQVAGSLEEALNELDLDREFLKAGGVFTDEAIDAYIALRREEDDRVRMTPHPVEFELYYSV

SEQ ID NO: 52850 - protein, 269 aa, Homo sapiens; identical to SEQ ID NO: 45219

SEQ ID NO: 52851 - protein, 580 aa, Homo sapiens
MGGCVCDHAQRRTKQPHEDRHPRHISCCGESDKCTRQRGVHILAAHLAGYVYKMLLCSGDLIKHGEVGLPGPRSGRGYEDRERFRKPVRFRIPRRISIKIPLYEGAVSHYASSLREWAQSELANIGNSAYPQIADTAIVELANVRSPMLEVRVDNYGILNSKYAMANWGSQGIPLLEGYGGMQIKSGSNSDSLRGLNWPQSVTSRIQPGSDVIVCAEMDEQWGYVGAKSRQRWLFYAYDSLRKTVVAHVFGERTMATLGRLMSLLSPFDVVIWMTDGWPLYESRLKGKLHFYRHKSHMHKALGQRRLHCASHQKLSSKRHHQTRRGFLRLIPGRWREPISKEVSAESPQVLSSRVCQGPPGSVGPLKGLNIPSFNSSRKNAGATPAQHSRRHSATPLTPTAENPPATARVVSQNLGLPKQDIARRPVRAQGVPQTGPGDLPPWASPRAGGYEGTSLRTYEPPHDAPQHPALHTQHTDQTGKHAAPGHNHTTAETYPTATYREKTRNTRNLKDFQPTERQLTTSDHDSQRHAARCRAGLILLTHTERRTPPHPWSQEALNGASEAPEHRTQRTQQRDLANV

SEQ ID NO: 52852 - protein, 1048 aa, Homo sapiens
  DOMAIN (6)..(60): ATP-BINDING TRANSPORT TRANSMEMBR domain identified by eMATRIX, accession number PD00131B, p-value=5.650e-13, raw score of 34.97
  DOMAIN (1)..(180): ABC transporter domain identified by PFam, accession name ABC_tran, E-value=1.2e-60, PFam score of 214.9
MGLSGSGKSTMVRLLNRLIEPTRGQVLIDGVDIAKISDAELREVRRKKIAMVFQSFALMPHMTVLDNTAFGMELAGINAEERREKALDALRQVGLENYAHSYPDELSGGMRQRVGLARAINPDILLMDEAFSALDPLIRTEMQDELVKLQAKHQRTIVFISHDLDEAMRIGDRIAIMQNGEVVQVGTPDEILNNPANDYVRTFFRGVDISQVFSAKDIARRTPNGLIRKTPGFGPRSALKLLQDEDREYGYVIERGNKFVGAVSIDSLKTAAVPPVQLLTGWCVTAKAPPDISAISALTAVKHGNCSSLTPLLNPPGSDVIVCAEMDEQWGYVGAKSRQRWLFYAYDSLRKTVVAHVFGERTMATLGRLMSLLSPFDVVIWMTDGWPLYESRLKGNFTDMPPYVEAYPNENLTTVMPEQYRYTLPVKAGEQRLLGELTGAACATLVAEIAERHAGPVVLIAPDMQNALRLHDEISQFTDQMVMNLADWETLPYDSFSPHQDIISSRLSTLYQLPTMQRGVLIVPVNTLMQRVCPHSFLHGHALVMKKGQRLSRDALRTQLDSAGYRHVDQVMEHGEYATRGALLDLFPMGSELPYRLDFFDDEIDSLRVFDVDSQRTLEEVEAINLLPAHEFPTDKAAIELFRSQWRDTFEVKRDPEHIYQQVSKGTLPAGIEYWQPLFFSEPLPPLFSYFPANTLLVNTGDLETSAERFQADTLARFENRGVDPMRPLLPPQSLWLRVDELFSELKNWPRVAHPRLRQEVKDSQRSRVPARSVRFLVLAAAFLRISWVLSLSTGIVATDGFYPSIPEQPLARLIQTSGPQPRTTASQALMVHTQEGARRASRRWLSRVSPSALIEKRTLSSTQLIKKSGNMRITIILVAPARAENIGAAARAMKTMGFSDLRIVDSQAHLEPATRWVAHGSGDIIDNIKVFPTLAESLHDVDFTVATTARSRAKYHYYATPVELVPLLEEKSSWMSHAALVFGREDSGLTNEELALADVLTGVPMVARKNSALTSKKTGLGPVPLQVSPFDQGPRVPIKAQPQPDWA

SEQ ID NO: 52853 - protein, 604 aa, Homo sapiens
  DOMAIN (323)..(375): CBS domain identified by PFam, accession name CBS, E-value= 4.5e-08, PFam score of 40.3
PVQNGSSPLGALPGAPLIFGPSVPAISRPGSCSPEWPTLDTSGYSAPRWLFTAYAGSEAVFAHVFGDALGDAGLLMSLLSPFDVVIWMTDGWPLYESRLKGKLHVISKRYTQRIERHNLNLRQHLARLGRKSLSFSKSVEQHDKLESLPGQIDKSLDEASLSLRAGSLRTITHILLPLLRPAILSALIYSFVRAITTVSAIVFLVTPDTRVATAYILNRVEDGEYGVAIAYGSILIVVMLAIIFIFDWLIGESLLSRFEKTVDDHSQSRLPAEGSILSQDISGVKLFSLLTPARGYVPIRAPCPFLCASYRFFCVARQQGLDAALIDAPLAVDALTPLSELLSHVGQAPCSVPVVDEDQQYVGIISKGMLLRALDREGGVRVPVDYILNGFHPLLLGMPAPLAIIVFALIACRFPGSNGRIRRSRRIRHLHKMPDATLSASYQAYVRHQTNVTALVLRSSHRFRKDRHCWGFVFLQQPILRATGQFEIQTFRYLSVFSVQRHKTNGKTALMSGNVADKAVNRATGPTACVWLFSLRNSSMVTTRFCGLCEWADQQGARPARISENGKRGYSYLYDVHMGAQSGETRGRQGEYASKPPSREYAGD

SEQ ID NO: 52854 - protein, 710 aa, Homo sapiens
  DOMAIN (10)..(240): Diaminopimelate epimerase domain identified by PFam, accession name DAP_epimerase, E-value=1.4e-114, PFam score of 394.0
MGVNDAVLEMHGLGNDFMVVDAGFDQLLVVEPPYDLELDFHYRMFNADGSEVAQCGNGARCFARFVRLKGLTNKRDIRVSTANGRMVLTVTDDDLVRVNMGEPNFEPSAVPFRANKAEKTYIMRAAEQTILCGVVSMGNPHCVIQVDDVDTAAVETLGPVLESHERFPERANIGFMQVVKREHIRLRVYERGAGETQACGSGACAAVAVGIQQGLLAEEVRVELPGGRLDIAWKGEELQETLTELDDRAVVDYLIKNPEFFIRNARAVEAIRVPHPVRGTVSLVEWHMARARNHIHVLEENMALLMEQAIANEGLFYRLLYLQRSLTAASSLDDMLMRFHRWARDLGLAVAMPVTINKGNQIIENQLDTETITISYEFILCQHLIANTEFSYLALPENYNRLCLPNSKNQTNNRFKTLNSKAIGRLLAAGGVYNGNIEGFRDTAEKLAVPPVQLLTGWCVTAKALPDISAISALTAVKHGNCSSLTPLLNPPGSDVIVCAEMDEQWGYVGAKSRQRWLFYAYDSLRKTVVAHVFGERTMATLGRLMSLLSPFDVVIWMTDGWPLESWHVISKRYTQRIERHNLNLSSTSILVLLNGATQFQDLGDLNKELEETYTDSKNHISCVGNDFGFNDIFSRYVEAVGREGDVLLGISTSGNSANVIKAIAAAREKGMKVITLTGKDGGKMAGTADIEIRVPHFGYADRIQEIHIK

SEQ ID NO: 52855 - protein, 605 aa, Homo sapiens
  DOMAIN (31)..(294): Sodium:galactoside symporter family domain identified by PFam, accession name Na_Galacto_symp, E-value=0.056, PFam score of -112.0
MGLFYMGAPLALTLGSPLSGALLEMHGFMGHPGWFWMFVIEGLLAVGAGVFTFFWLDDTPEQARFLSKQEKTLLINQLASEEQQKVTSRLSDALRNGRVWQLAIIYLTIQVAVYGLIFFLPTQVAALLGTKVGFTASVVTAIPWVAALFGTWLIPRYSDKTGERRNVAALTLLAAGIGIGLSGLLSPVMAIVALCVAAIGFIAVQPVFWTMPTQLLSGTALAAGIGFVNLFGAVGGFIAPILRVKAETLFASDAAGLLTLAAVAVIDRRGTSLNRLRNTMIALLSNPFKERLRKGEVQIGLWLSSTTAYMAEIAATSGYDWLLIDGEHAPNTIQDLYHQLQAVAPYASQPVIRPVEGSKPLIKQVLDIGAQTLLIPMVDTAEQARQVVSATRYPPYAVHPVQLLTGWCVTAKAPPDISAISALTAVKHGNCSSLTPLLNPPGSDVIVCAEMDEQWGYVGAKSRQRWLFYAYDSLRKTVVAHVFGERTMATLGRLMSLLSPFDVVIWMTDGWPLYESRLKGKLHTQERKARSKQQKDADTAPPIQVGTQTPQTVHAARDTRQASPRASKISQHRQADGDKRQTRHAEAQATRTHTGRRKTIKETAT

SEQ ID NO: 52856 - protein, 466 aa, Homo sapiens
TFDDSGVKHIDFANEAGNKQVFRLFVDFTRRAVLLNATIAHHIPVPGYRPAVRFNKVVIVSQHCRNDTAGTVGWRSYHTTTGGVFFVNCQRKHVYPVNDIHRIVRQFIAGNQHPAQGRRTTWHAQRAWQYTFGVHPAIDTCLHGLPDMREILVDLFLAVQRQFVLGGRGEVHVLAALFTVVKGVIGCIFGQHYGYSFPFPGLFNFGFLYHFFERTLHVFDSVDDVVVNQLFVLDTYTTTAVTCQQQIDSVSAHTGSQNTVVRHRRTTALDVAQHSCAGFTTGFFLDEMRQFVNITHMFGNRHDRVFFTFRDTRFDFVYQVFTAEFNFRNHNEFTATGNGRSQRQISTITAHHFHHGNTLVRRRGVTQTVDRFSRIQPGSDVIVCAEMDEQWGYVGAKSRQRWLFYAYDRLRKTVVAHVFGERMLQLFPGGGAIIHDDHLPVAVVLAQNRFYCPNRQLLSVPGRHID

SEQ ID NO: 52857 - protein, 306 aa, Homo sapiens
  DOMAIN (26)..(52): DNA photolyases class 1 proteins domain identified by eMATRIX, accession number BL00394D, p-value=3.250e-29, raw score of 15.11
  DOMAIN (8)..(64): DNA photolyase domain identified by PFam, accession name DNA_photolyase, E-value=3.6e-29, PFam score of 110.3
MVICQPINGGWQWPPSTGTDPAPYFRIFNPTTQGEKFDHEGEFIRQWLPELRDVPGKVVHEPWKWAQKAAAPPQTRLHSTPTTIPHRVPGHTPNLKPIWEVDLPKFSHKATSHATDKPSDTTQNDQIVIAYMEPPEIVHETTTSSTHPSLYIILKRQTRELRPQSVTSRIQPGSDVIVCAEMDEQWGYVGAKSRQRWLFYAYDSLRKTVVAHVFGERTMATLGRLMSLLSPFDVVIWMTDGWPLYESRLKGKLHVISKRYTQRIERHNLNLRQHLARLGRKSLSFSKSVELHDKVIGHYLNIKHYQ

SEQ ID NO: 52858 - protein, 241 aa, Homo sapiens
YGHEWRWMPGNRPHYGRWPQHDFPPFKKLRPQSVTSRIQPGSDVIVCAEMDEQWGYVGAKSRQHWLFYAYDRLRKTVVAHVFGERTMATLGRLMSLLSPFDVVIWMTDGWPLYESRLKGKLHVISKRYTQRIERHNLNLRQHLARLGRKSLSFSKSVEKITSGPTTNATPGTQKTATDKRGGKKLPIQIPIGPISRIASGAAINTISIGLRKFLVTAGVMLSTQRSIYDRHQVITSAGITV

SEQ ID NO: 52859 - protein, 342 aa, Homo sapiens
GVMRTAIATVICCNNCQRRHTNSRCHTDNCRRADSASSHATSGSSSRGCAGSGRCGASSTRRCLGPVCCFRGSKRSWRRQHEGHKDCRKLVFHNFSFIHRMDNTAVPPVQLLTGWCVTAKALPDISAISALTAVKHGNCSSLTPLLNPPGSDVIVCAEMDEQWGYVGAKSRQRWLFYAYDRLRKTVVAHRLRIHSRLPIVIPARITEALVECFARSTLQILLVNHINHAHEVDETFRQAMAKLRRVGVTLLNQSVLLRDVNDNAQTLANLSNALFDAGVMPYYLHVLDKVQGAAHFMVSDDEARQIMRELLTLVSGYLVPKLAREIGGEPSKTPLDLQLRQQ

SEQ ID NO: 52860 - protein, 211 aa, Homo sapiens
NYCRMKIANMATLSNAVISLSAQSPSIRLKPRLSLLIQLLTGWCVTAKAPPDISAISALTAVKHGNCSSLTPLLNPPGSDVIVCAEMDEQWGYVGAKSRQRWLFYAYDRLRKTVVAHVFGERTMATLGRLMSLLSPFDVVIWMTDGWPLYESRLKGKLHVISKRYTQRIERHNLNLRQHLARLGRKSLSFSKSVEQHDKVIGHYLNIKHYQ

SEQ ID NO: 52861 - protein, 1016 aa, Homo sapiens
  DOMAIN (50)..(75): FLAGELLAR BIOSYNTHETIC PROTEIN FLHB SIGNATURE domain identified by eMATRIX, accession number PR00950A, p-value=1.643e- 23, raw score of 12.14
  DOMAIN (46)..(348): FlhB HrpN YscU SpaS Family domain identified by PFam, accession name Bac_export_2, E-value=1e-86, PFam score of 301.5
MATDSVGLNCTPAPHARDVLLWRPSSLPVSTSCVFPLGRIGDVSDESDDKTEAPTPHRLEKAREEGQIPRSRELTSLLILLVGVSVIWFGGVSLARRLSGMLSAGLHFDHSIINDPNLILGQIILLIREAMLALLPLISGVVLVALISPVMLGGLVFSGKSLQPKFSKLNPLPGIKRMFSAQTGAELLKAILKTILVGSVTGFFLWHHWPQMMRLMAESPITAMGNAMDLVGLCALLVVLGVIPMVGFDVFFQIFSHLKKLRMSRQDIRDEFKQSEGDPHVKGRSAAPAKSVYRVDQPNVPIGPKCAEHTRVRKRFLPWRDMVFIDTTVSTIAAKSSEILSGILKALNAGITRYSAKQPGRLTPTPIVLRHKWVIWPSPETRSPILKPFTSVTEYLTTVTEQYCSGPTNTSGNRDGLFATTHPSYRCERDNAQLFTNTRKCFYCTRNLLRGMRRRHLGTNTRLTFRNDRIEETGNVNALFLQLTGKVLRHYRITKHDRNNGVIGSRQDGHAVRLPASTISSTLMDAATMAGASELENRVNAGDHFCNRVFYLNTGVHFDEIELAVFEQELESTCTAIADINTRFSATFADVATQFRGNARWWRFFDHFLVAAFFRFRTGYGDGLCQLCVAAHYAHTADTPHSAGGFDNHRITKAFNNGTVFIQIVAHRAVRTRHLRHVRHPAQSSFSSFILLRTPPDAGRNPWEDSKRAVHIVPYYFANDTKLPPFFGPPSVLITHKSRIRPSSCSAGEYGHIRAIRTMFANLLVEHGPKEMTTEGARKQAGPSSVTLGIQPASDVIVCAEMDEQWGYVGAKSRQRWLFYAYDSLRKTVVAHVFGERTMATLGRLMSLLSPFDVVIWMTDGWPLYESRLKGKLHVISKRYTQRIERHNLNLRQHLARLGRKSLSFSKSVELHDKLESLPGQIDKSLDEASLSLRAGSLRTITHILLPLLRPAILSALIYSFVRAITTVSAIVFLVTPDTRVATAYILNRVEDGEYGVAIAYGFHSDRGDAGDYLHL

SEQ ID NO: 52862 - protein, 410 aa, Homo sapiens
  misc_feature (1)...(410): Xaa = X or * as defined in Table 2
MANDLPHSNSGDGQKPSSPDLFTAPLLADPTVGFLPNDAEELFIFLTEITEITIPCRVTDPQLVVTLHEKKGDVALPVPYDHQRGFSGIFEDRSYICKTTIGDREVDSDAYYVYRLQAVPPVQLLTGWCVTAKAPPDISAISALTAVKHGNCSSLTPLLNPPGSDVIVCAEMDEQWGYVGAKSRQRWLFYAYDSLRARRVVAHVFGXRTMATLGRLMSLLSPFDVVIWMTDGWPLYESRLKGKLHVISKRYTQRIERHNLNLRQHLARLGRKSLSFSKSVELHDKPSPQHREGVKDVMRFNEPMYPLESRPRLYVCHLRNGAQASGRRCQLPMGCACHPVSQRNDRPNRRPERHATRKTTTRQRQQNSRQHKQTQKKAKPNKRRATERGKGPQQKAERPKRHTHCFLKLQ

SEQ ID NO: 52863 - protein, 455 aa, Homo sapiens
  DOMAIN (146)..(163): Zinc finger present in dystrophin CBP/p300. domain identified by eMATRIX, accession number PF00569, p-value=3.195e-14, raw score of 13.42
  DOMAIN (131)..(176): Zinc finger present in dystrophin, CBP/p300 domain identified by PFam, accession name ZZ, E-value=5.5e-05, PFam score of 30.0
  misc_feature (1)...(455): Xaa = X or * as defined in Table 2
HEASSPLAMASLTVKAYLLGKEDAAREIRRFSFCCSPEPEAEAEAAAGPGPCERLLSRVAALFPALRPGGFQAHYRDEDGDLVAFSSDEELTMAMSYVKDDIFRIXIKEKKECRRDHRPPCAQEAPRNMVHPNVICDGCNGPVVGTRYKCSVCPYYDLCSVCEGKGLHRGHTKLAFPSPFGHLSEGFSHSRWLRKVKHGHFGWPGWEMGPPGNWEPTFLPRAGEARPGPTAESASGPSEDPSVNFLKNVGESVAAAFSPLNFEVDIDVEHGGKRSRLTPVSPESSSTEEKSSSQPSSCCSDPSKPGGNVEGATQSLAEQMRKIALESEGRPEEQMESDNCSGGDDDWTHLSSKEVDPSTGELQSLQMPESEGPSSLDPSQGGNPQGWKEAALYPHLPPEVEPAAXFESLSQMVVPWGFSXLKGGWVHQGSCRPRNYDIGAALDTIPVIQKHPPPL

SEQ ID NO: 52864 - protein, 31 aa, Homo sapiens; identical to SEQ ID NO: 52103
  misc_feature (1)...(31): Xaa = X or * as defined in Table 2

SEQ ID NO: 52865 - protein, 146 aa, Homo sapiens
  misc_feature (1)...(146): Xaa = X or * as defined in Table 2
VFPGPLGSLVDICGPSRVPFPWVVPAVLPVQFVQRLPRFFRCPPVLVTSVIRSISTLIQALGSSPFARRYWGNLGXFLFLGVLRCFSSTGSPHXPMNSVNDSVSKHTEVTPFGNPGNNGSYHLTDAYRRLARPSSPLTPGHPPLYG

SEQ ID NO: 52866 - protein, 70 aa, Homo sapiens
ATAGCPSCSATEGVVRNGKSTAGHQRYLCSPCRKTWQLQFTYTASQPGARIMGVGLNTVLRHLKNSGRSR

SEQ ID NO: 52867 - protein, 212 aa, Homo sapiens
TDGVVRNGKSTAGHQRYLCSHCRKTWQLQFTYTASQPGTHQKIIDMAMNGVGCRATARIMGVGLNTILRHLKNSGRSRRAVTSSSARKWTNSGAMSGLNRASWLFYAYDSLRKTVVAHVFGERTMATLGRLMSLLSPFDVVIWMTDGWPLYESRLKGKLHVISKRYTQRIERHNLNLRQHLARLGRKSLSFSKSVELHDKVIGHYLNIKHYQ

SEQ ID NO: 52868 - protein, 58 aa, Homo sapiens
SGCPGCKYSEIVVSQFQPVPPPNHDAMVAGNRIILEAKIAGITPAIFTFSAKCALCAA

SEQ ID NO: 52869 - protein, 81 aa, Homo sapiens
CNRKKRRAISIPCRKRTISCASCTISYATAAAASRWFTFLTTVWPLKSTVKTCNTLPMMINISKISRCLLWSFPATIKRIV

SEQ ID NO: 52870 - protein, 692 aa, Homo sapiens
  DOMAIN (332)..(384): CBS domain identified by PFam, accession name CBS, E-value= 1.8e-08, PFam score of 41.6
  misc_feature (1)...(692): Xaa = X or * as defined in Table 2
LFLYSSHGQYGCPSCSATDGVVRNGKSTAGHQRYLCSHCRKTWQLQFTYTASQPAGQXRTAIATVICCNNCQRRHTNSRCHTDNCRRADSASSHATSGSSSRGCAGSGRCGASSTRRCLGPVCCFRGSKRSWRRQHEGHKDCRKLVFHNFSFIHRMDNTAVPPVQLLTGWCVTAKAPPDISAISALTAVKHGNCSSLTPLLNPPGSDVIVCAEMDEQWGYVGAKSRQRWLFYAYDSLRKTVVAHVFGERTMATLGRLMSLLSPFDVVIWMTDGWPLYESRLKGKLHVISKRYTQRIERHNLNLRQHLARLGRKSLSFSKSVELHDKQQGLDAALIDAPLAVDAQTPLSELLSHVGQAPCAVPVVDEDQQYVGIISKGMLLRALDREGGVRVPVIYPKRFRTTDVCMPLSLGTCIREIEAEFPDPIFRRSVVYICEHNTNGAMGIIVNKPLENLKIEGILEKLKITPEPRDESIRLDKPVMLGGPLAEDRGFILHTPASNFASSIRISDNTVMTTSRDVLETLGTDKQPSDVLVALGYASWEKGQLEQEILDNAWLTAPADLNILFKTPIADRWREAAKLIGVDILTMPAQDGTPDWNIIERLLKEWQPDEIIVGLPLNMDGTEQPLTARARKFANRIHGRFGVEVKLHDERLSTVEARSGLFEQGGYRALNKGKVDSASAVIILESYFEQGY

SEQ ID NO: 52871 - protein, 856 aa, Homo sapiens
  DOMAIN (84)..(137): Clathrin light chain proteins domain identified by eMATRIX, accession number BL00224B, p-value=3.683e-10, raw score of 16.94
  misc_feature (1)...(856): Xaa = X or * as defined in Table 2
PEVQGLQQAGAAARRPGVGLAAPRVVCEGRLRGSGLQSRLCPGASVXATDGVVRNGKSTAGHQRYLCSHCRKTWQLQFTYTASQPAGQXREKEEKEEVEEEEEEEKKKRRREGEKEEKEEKEKEKKKKFKKKKKKKKKKKKKKKKKKKKKKKKKKQLSLVTVMSQQCQLWRNEARTTGACLPSPTVSAAAPPIVSTTVTAFAAATLAKGDLRSRASSKQVPLLVVLVWVWPHPGWFVKAGSVALGSSPGCVLELLCKLLTGWCVTAKAPPDISAISALTAVKHGNCSSLTPLLNPPGSDVIVCAEMDEQWGYVGAKSRQRWLFYAYDSLRKTVVAHVFGERTMATLGRLMSLLSPFDVVIWMTDGWPLYESRLKGKLHTQERKARSKQQKDADTAPPIQVGTQTPQTVHAARDTRQASPRASKISQHRQADGDKRQTRHAEAQATRTHTGRRKTIKETATQQAYADEQTRRTARTHRRTARHTAAHTHRTRVAARQTTEKDNEQSDTQPPTQKTPSATATAHTPRRTETTTNIVQARHTSARERNHTRQHQATRRETTTNAHTNTPHYHAEHTQSRSQQQTTSTERPTTDSSTTINNNNHTPRTVRDERRMTQHKHPSRASTTTNRTTTTGAYQHTQRDTRDTRRDTHEDTTTQQPHTTTPTANEAAYTAHTTKTDDHRHTADDTQKNNKDETKRQARQHQRSATHTSTGKTEDDHKNRKKTDQEAKKQEHTHTDKRSTKIQNARRTHQAHREPLRAVLPRVPSFLFIVGRRSFCLVLHPVSSLCCCVGVSVFVFSLSPRRLCVACLRPAGPGPGQFLISCVLNARASFLSCQPGLGSDPTTIMVFCVTRVLSRCY

SEQ ID NO: 52872 - protein, 70 aa, Homo sapiens; identical to SEQ ID NO: 52866

SEQ ID NO: 52873 - protein, 71 aa, Homo sapiens
NAVADTSFSNLFAQPHQEHGSCDQTYNSGEVECKARVNHQALHTRHIRQTASNTDRLEYCQHQSTVAGVLA

SEQ ID NO: 52874 - protein, 390 aa, Homo sapiens
  DOMAIN (71)..(112): Bacterial regulatory proteins gntR family proteins. domain identified by eMATRIX, accession number BL00043, p-value=5.000e-10, raw score of 22.96
  DOMAIN (59)..(196): Bacterial regulatory proteins, deoR family domain identified by PFam, accession name deoR, E-value=1.6e-66, PFam score of 234.4
  misc_feature (1)...(390): Xaa = X or * as defined in Table 2
AADDRGHLRPTDGLLRNGKSTAGHQRYLCSHCRKTWQLQFTYTASQPAGQXRVTGTSERREQIIQRLRQQGSVQVNDLSALYGVSTVTIRNDLAFLEKQGIAVRAYGGALICDSTTPSVEPSVEDKSALNTAMKRSVAKAAVELIQPGHRVILDSGTTTFEIARLMRKHTDVIAMTNGMNVANALLEAEGVELLMTAGICALLTGCCVTAKAPPDISAISALTAVKHGNCSSLTPLLNPPGSDVPVCAEMDEQWGYVGAKSRQRWLFYAYDSLRKTVVAHVFGERTMATLGRLMSLLSPFDVVIWMTDGWPLYESRLKGKLHVISKRYTQRIERHNLNLRQHLARLGRKSLSFSKSVELHDKVIGHYLNGDFLQSTLREAPLIPHTREHP

SEQ ID NO: 52875 - protein, 580 aa, Homo sapiens
  misc_feature (1)...(580): Xaa = X or * as defined in Table 2
TSPGYWRANSTDPDGRYCRTGTSGGVCHALSSLRCPSCSATDGVVRNGKSTAGHQRYLCSHCRKTWQLQFTYTASQPAGQXRFLSKQEKTLLINQLASEEQQKVTSRLSDALRNGRVWQLAIIYLTIQVAVYGLIFFLPTQVAALLGTKVGFTASVVTAIPWVAALFGTWLIPRYSDKTGERRNVAALTLLAAGIGIGLSGLLSPVMAIVALCVAAIGFIAVQPVFWTMPTQLLSGTALAAGIGFVNLFGAVGGFIAPILRVKAETLFASDAAGLLTLAAVAVIDRRGTSLNRLRNTMIALLSNPFKERLRKGEVQIGLWLSSTTAYMAEIAATSGYDWLLIDGEHAPNTIQDLYHQLQAVAPYASQPVIRPVEGSKPLIKQVLDIGAQTLLIPMVDTAEQARQVVSATRYPPYAVHPVQLLTGWCVTAKAPPDISAISALTAVKHGNCSSLTPLLNPPGSDVIVCAEMDEQWGYVGAKSRQRWLFYAYDSLRKTVVAHVFGERTMATLGRLMSLLSPFDVVIWMTDGWPLYESRLKGKLHVISKRYTQRIERHNLNLRQHTGTGWDGSRCRSQKSGGAA

SEQ ID NO: 52876 - protein, 75 aa, Homo sapiens
  misc_feature (1)...(75): Xaa = X or * as defined in Table 2
SGIIAFQYLLMTLKVLPVASVSISCPSCSATDGVVRNGKSTAGHQRYLCSHCRKTWQLQFTYTASQPAGQXRGGA

SEQ ID NO: 52877 - protein, 1142 aa, Homo sapiens
  DOMAIN (241)..(257): GLYCOSYL HYDROLASE FAMILY 2 SIGNATURE domain identified by eMATRIX, accession number PR00132A, p-value=3.727e-14, raw score of 13.45
  DOMAIN (160)..(686): Glycosyl hydrolases family 2 domain identified by PFam, accession name Glyco_hydro_2, E-value=2.4e-18, PFam score of 52.2
  misc_feature (1)...(1142): Xaa = X or * as defined in Table 2
GAPVASVSISCPSCSATDGVVRNGKSTAGHQRYLCSHCRKTWQLQFTYTASQPAGQXRTIGRAMLKNKHMTITEFVAQRMRDAQQKGEISPDINTAMTSRLLLDLTYGVLADIEAEDLARKRRLLRITRDDWRYLNRILILSLFRRAGDNCARVSYQTPTREIKKLDGLWAFSLDRENCGIDQRWWESALQESRAIAVPGSFNDQFADADIRNYAGNVWYQREVFIPKGWAGQRIVLRFDAVTHYGKVWVNNQEVMEHQGGYTPFEADVTPYVIAGKSVRITVCVNNELNWQTIPPGMVITDENGKKKQSYFHDFFNYAGIHRSVMLYTTPNTWVDDITVVTHVAPDCEHANNIVYRAVIQFSTVVYVAVTVDSQVTIRVHSNNTVTVVRLGSIPGTVVHQISVQNVIAAMDIEHTRYYVTVMVSDVAAGQFQFVSTESFSIELINVHIQYTAVSYGDSIGVQHSPEFRSEALKLAERIGVTAAARELSLYESQLYNWRSKQQNQQTSSERELEMSTEIARRDILREAPEMKYVFIEKHQAEFSIKAMCRVLRVARSGWYTWCQRRTRISTRQQFRQHCDSVVLAAFTRSKQRYGAPRLTDELRAQAVPFNVKTRAASCAVRAEGKAPRIQPVVTRKACWSKLWAEFSRQKSASQLHACFVRISAGIPLMAGIMGPRTKYPTQLNNHRDHNNSHKDFQRSNTSTIEIQVVPPVQWAQFKQLAQLTDEPPTAARPRARRSLGVRAAGADSNKIVFWLHHVTVTGDDKRCSFIRDCQQCFKFAQHAIGTPVFCQLNGGFDQMALMHFQFTFKQFEQRKSIRSTARKARDDFVVVQTADLFHVAFHYGIAQRGLTITSDDHMAVTAYAYYSCHELTPWLRIQSTNPVQNLERTDGPSKGSDILRRRFGRKGRHGQLLINGIVRVRIGRCKTVYDGVFEVLQWLLFLSAVPPVQLLTGWCVTAKALPDISAISALTAVKHGNCSSLTPLLNPPGSDVIVCAEMDEQWGYVGAKSRQRWLFYAYDSLRKTVVAHVFGERTMAALANVFLGTPDGHAPWSRQSIPDVDPCLYGREQSLQRNTSKCVQATDGFGCDVKADCGTIRRDCGRCGDSTITRSLPDTWGFSRSHLQALQPWDWPVVLQQSETG

SEQ ID NO: 52878 - protein, 822 aa, Homo sapiens
  DOMAIN (128)..(148): MALTOSE BINDING PROTEIN SIGNATURE domain identified by eMATRIX, accession number PR00181H, p-value=1.103e-27, raw score of 14.36
  DOMAIN (3)..(167): Bacterial extracellular solute-bindin domain identified by PFam, accession name SBP_bacterial_1, E-value=2.5e-26, PFam score of 97.4
MNADTDYSIAEAAFNKGETAMTINGPWAWSNIDTSKVNYGVTVLPTFKGQPSKPFVGVLSAGINAASPNKELAKEFLENYLLTDEGLEAVNKDKPLGAVALKSYEEELAKDPRIAATMENAQKGEIMPNIPQMSAFWYAVRTAVINAASGRQTVDEALKDAQTRITNCCRIRRESLIRPGMRKNPMDVIKKKHWWQSDALKWSVLGLLGLLVGYLVVLMYAQGEYLFAITTLILSSAGLYIFANRKAYAWRYVYPGMAGMGLFVLFPLVCTIAIGFNNYRRTKQVAGMPAKSSSLRSSQDREMRPGAKAERTRYDSPGSYGVAGPGFLGSRGGSPFGGPGKYNNTITKYALNIAPSAQNQSPHGPKLNRRQETQHALDWLDAGYTFTYSEDQALTPYFKLAYVYDDSNNDNDVNGDSIDNGTEGSAVRVGLGTQFSFTKNFSAYTDANYLGGGDVDQDWSANDLTGITAKDAQMLSVVKPLQEFGKLDKCLSRYGTRFEFNNEKQVIFSSDVNNEDTFVILEGVISLRREENVLIGITQAPYIMGLADGLMKNDIPYKLISEGNCTGYHLPAKQTITLIEQNQLWRDAFYWLAWHNRILELRDVQLIGHNSYEQFAHIIFMIAAMQMGSVWGDDFSSGQHSVARKSQLHKPILRVKCHEGFTISANPNSSPRYPTIIEQAEQPRIVDFSIVRFMSISQCLILAGSMMRTFIKKVYAAIEAGDKAAAQKAFNEMQPIVDRQAAKATDGVVRNGKSTAGHQRYLCSHCRKTWQLQFTYTASQSGTHQKIIDMAMNGVGCRATARIMGVGLNTILRHLKNSGRSR

SEQ ID NO: 52879 - protein, 284 aa, Homo sapiens; identical to SEQ ID NO: 52849
  DOMAIN (170)..(185): Glutamine synthetase proteins domain identified by eMATRIX, accession number BL00180G, p-value=8.683e-14, raw score of 10.20
  DOMAIN (169)..(187): Glutamine synthetase domain identified by PFam, accession name gln-synt, E-value=5.1e-10, PFam score of 33.2

SEQ ID NO: 52880 - protein, 361 aa, Homo sapiens
  misc_feature (1)...(361): Xaa = X or * as defined in Table 2
MIIIDPRYTDTGAGREDEWIPIRPGTDAALVNGLAYVMITENLVDQAFLDKYCVGYDEKTLPASAPKNGHYKAYILATDGVVRTAKSTAGHQRYLCSHCRKTWQLQFTYTASQPAGQXRYTDTGAGREDEWIPIRPGTDAALVNGLAYVMITENLVDQAFLDKYCVGYDEKTLPASAPKNGHYKAYILATDGWCVPPKAPPDISAISALTAVKHGNCSSLTPLLNPPGSDVIVCAEMDEQWGYVGAKSRQRWLFYAYDSLRKTVVAHVFGERTMATLGRLMSLLSPFDVVIWMTDGWPLYESRLKGKLHVISKRYTQRIERHNLNLRQHLARLGRKSLSFSKSVELHDKVIGHYLNIKHYQ

SEQ ID NO: 52881 - protein, 847 aa, Homo sapiens
  DOMAIN (579)..(589): Orn/DAP/Arg decarboxylases family 2 pyridoxal-P attachment si domain identified by eMATRIX, accession number BL00878E, p-value= 8.759e-10, raw score of 12.59
  DOMAIN (568)..(608): Pyridoxal-dependent decarboxylase domain identified by PFam, accession name Orn_DAP_Arg_deC, E-value=3.3e-12, PFam score of 43.4
  misc_feature (1)...(847): Xaa = X or * as defined in Table 2
NPRLAGSEGSCPSCSATDGVVRNGKSTAGHQRYLCSHCRKTWQLQFTYTASQPAGQXRKLTPGCLFVALKGERFDAHDFADQAKAGGAGALLVSRPLDIDLPQLIVKDTRLAFGELAAWVRQQVPARVVALTGSSGKTSVKEMTAAILSQCGNTLYTAGNLNNDIGVPMTLLRLTPEYDYAVIELGANHQGEIAWTVTHPPRFVTKQWLCFLPDGLLLFAEARFVIWQMQPAVMAVDVAAFAHLFNQQQYQRFTGRPPDSSKLPWKITCNGECVTFHWWLLGVAVRISRLLPVRVMTALEGNYNGTEGISALPFNGIILAHSNESEWVTFRNNKNNEAFLDRVYIVKVPYCLRISEEIKIYEKLLNHIFECWQHFLNNPESLQCYIWAANADFREARQVIFKTFFTVGVEEELGIRQTRTNDFLVTGDNLLRIFRFDVGNEDKVRQQFAVVRIHREVFLVTFHGVNQRFSRHREEFLFEFCVSVTANLTRCFFGIGFNLRLTFFVIGDDFPTLTQNFRILIGVIDGEFRLAHKAVAANHAIGLNAQNGCRNDFVAHAAGSRALAADGRSLEHAPTVETVVAGPLCESGDVFTQQEGGNVETRALPEVKAAVPPVQLLTGWCVTAKALPDISAISALTAVKHGNCSSLTPLLNPPGSDVIVCAEMDEQWGYVGAKSRQRWLFYAYDRLRKTVVAHRLRIHSRLPIVIPARITEALVECFARSTLQILLVNHINHAHEVDETFRQAMAKLRRVGVTLLNQSVLLRDVNDNAQTLANLSNALFDAGVMPYYLHVLDKVQGAAHFMVSDDEARQIMRELLTLVSGYLVPKLAREIGGEPSKTPLDLQLRQQ

SEQ ID NO: 52882 - protein, 464 aa, Homo sapiens
  DOMAIN (395)..(434): PROTEIN ZINC FINGER ZINC-FINGER METAL-BINDING NU domain identified by eMATRIX, accession number PD01066, p-value=5.636e-36, raw score of 19.43
  DOMAIN (218)..(369): SIS domain identified by PFam, accession name SIS, E-value= 1.3e-24, PFam score of 95.2
  misc_feature (1)...(464): Xaa = X or * as defined in Table 2
KGLCSHSEMVVPSYSATDGVVRNGKSTAGHQRYLCSHCRKTWQLQFTYTASQPAGQXRDIVLTKLMMVWHSQSGYEKAYAHIQRWWYRAILLLTGWCVTAKALPDISAISALTAVKHGNCSSLTPLLNPPGSDVIVCAEMDEQWGYVGAKSRQRWLFYAYDRLRKTVVAHVFGERTMATLGRLMSLLSPFDVVIWMTDGWPLYESRLKGKLHVISKRYTQRIERHNLNLSSTSILVLLNGATQFQDLGDLNKELEETYTDSKNHISCVGNDFGFNDIFSRYVEAVGREGDVLLGISTSGNSANVIKAIAAAREKGMKVITLTGKDGGKMAGTADIEIRVPHFGYADRIQEIHIKVIHILIQLIEKEMVNFTGLVQRGGGTGPHKDGWGITFYEVAFEDVAVNFTQEEWALLDPWQKKLYRDVMLETYRNLASVGDDDNIPSLREQVAHQRYFKTWHVEREYFSK

SEQ ID NO: 52883 - protein, 455 aa, Homo sapiens
  misc_feature (1)...(455): Xaa = X or * as defined in Table 2
RLQSLHYQGRGKPVPMRSYSLSFLFTISNSAGVFRCPSCSATDGVVRNGKSTAGHQRYLCSHCRKTWQLQFTYTASQPAGQXRLLGPKNRPREQNWLLWCERGVMSRLQALYLREQGFNNVKVDNFQTKVDSCTRPLAGQQFYPCIPDDALVQPLFGGNFVFQRREAGHITNREDIVRHQHGGWRGANSRDDTPGTVELFNGFNQQSAIAKTLRAFNATRQHDHVIFAISHFDQRRIRQQLHAARAGNRQVTIAGDAGSGDFDTAANQQIDSGDGFSLFTTRGEANQCRCAHIHSPFFLPFQTVRVFSAVPPVQLLTGWCVTAKAPPDISAISALTAVKHGNCSSLTPLLNPPGSDVIVCAEMDEQWGYVGAKSRQRWLFYAYDSLRKTVVAHVFAVKPYWDTGGGFHCRWIYMQQEKELLQLSLQQGKYNQKRAAELLGLTYHQFRALLKKHQI

SEQ ID NO: 52884 - protein, 509 aa, Homo sapiens
  DOMAIN (18)..(256): Diaminopimelate epimerase domain identified by PFam, accession name DAP_epimerase, E-value=2.4e-88, PFam score of 306.9
  misc_feature (1)...(509): Xaa = X or * as defined in Table 2
RIQRYCGKTGCPSCSATDGVVRNGKSTAGHQRYLCSHCRKTWQLQFTYTASQPAGQXRMFNADGSEVAQCGNGARCFARFVRLKGLTNKRDIRVSTANGRMVLTVTDDDLVRVNMGEPNFEPSAVPFRANKAEKTYIMRAAEQTILCGVVSMGNPHCVIQVDDVDTAAVETLGPVLESHERFPERANIGFMQVVKREHIRLRVYERGAGETQACGSGACAAVAVGIQQGLLAEEVRVELPGGRLDIAWKGEELQETLTELDDRAVVDYLIKNPEFFIRNARAVEAIRVPHPVRGTVSLVEWHMARARNHIHVLEENMALLMEQAIANEGLFYRLLYLQRSLTAASSLDDMLMRFHRWARDLGLAVAMPVTINKGNQIIENQLDTETITISYEFILCQHLIANTEFSYLALPENYNRLCLPNSKNQTNNRFKTLNSKAIGRLLAAGGVYNGNIEGFRDTAEKLAVPPVQLLTGWCVTAKALPDISAISALTAVKHGNCSSLYTASQPAGQ

SEQ ID NO: 52885 - protein, 648 aa, Homo sapiens
  DOMAIN (113)..(153): AMINOTRANSFERASE PROTEIN AMIDOTRA domain identified by eMATRIX, accession number PD00718D, p-value=4.857e-21, raw score of 29.33
  DOMAIN (195)..(312): CBS domain identified by PFam, accession name CBS, E-value=5e -11, PFam score of 50.1
  misc_feature (1)...(648): Xaa = X or * as defined in Table 2
TRYRSCPSCSATDGVVRNGKSTAGHQRYLCSHCRKTWQLQFTYTASQPAGQXRRNACQYRTPAVVASRQKRWHGDLGMIGSRDVMLFISDSVGAKELDLIIPRLEDKSIALLAMTGKPTSPLGLAAKAVLDISVEREACPMHLAPTSSTVNTLMMGDALAMAVMQARGFNEEDFARSHPAGALGARLLNKVHHLMRRDDAIPQVALTASVMDAMLELSRTGLGLVAVCDAQQQVQGVFTDGDLRRWLVGGGALTTPVNEAMTVGGTTLQSQSRAIDAKEILMKRKITAAPVVDENGKLTGAIKLQDFYQGRGLFNPSIPRVSTADAGLANRARRNWVGSSWKQVGQIILQGGPQNAEKSGQRYTVSHDRHRDAERQRVKSGLPRYAECSTYPSCPVALDLAFASHGIHMHAPGEALRMLVTAMDKAADARTKLARLLATKGITHEIQIPDISTKEKAQQPIGLNMEQIKPEKQDFIKPVIPQAGKHNGVNMSVLRSLLTAGVLASGLLWSLNGITATPAAQASDDRYEVTQQRNPDAACLDCHKPDTEAVPPVQLLTGWCVTAKAPPDISAISALTAVKHGNCSSLTPLLNPPGSDVIVCAELDEQWGYVGAKSRQRWLFYAYAQSPRTTRCCARIRLHALWRRWGVL

SEQ ID NO: 52886 - protein, 488 aa, Homo sapiens
  DOMAIN (191)..(229): ATP-BINDING TRANSPORT TRANSMEMBR domain identified by eMATRIX, accession number PD00131C, p-value=2.824e-09, raw score of 19.59
  DOMAIN (48)..(218): ABC transporter domain identified by PFam, accession name ABC_tran, E-value=1.6e-48, PFam score of 174.6
  misc_feature (1)...(488): Xaa = X or * as defined in Table 2
NRGCPSCSATDGVVRNGKSTAGHQRYLCSHCRKTWQLQFTYTASQPAGQXRLLNRLIEPTRGQVLIDGVDIAKISDAELREVRRKKIAMVFQSFALMPHMTVLDNTAFGMELAGINAEERREKALDALRQVGLENYAHSYPDELSGGMRQRVGLARAINPDILLMDEAFSALDPLIRTEMQDELVKLQAKHQRTIVFISHDLDEAMRIGDRIAIMQNGEVVQVGTPDEILNNPANDYVRTFFRGVDISQVFSAKDIARRTPNGLIRKTPGFGPRSALKLLQDEDREYGYVIERGNKFVGAVSIDSLKTAAVPPVQLLTGWCVTAKAPPDISAISALTAVKHGNCSSLTPLLNPPGSDVIVCAEMDEQWGYVGAKSRQRWLFYAYDSLRKTVVAHVFGERTMATLGRLMSLLSPFDVVIWMTDGWPLYESRLKGKLHVISKRYTQRIERHNLNLRQHLARLGRKSLSFSKSVELHDKVIGHYLNIKHYQ

SEQ ID NO: 52887 - protein, 422 aa, Homo sapiens
  DOMAIN (262)..(372): Oxidoreductase FAD/NAD-binding domain identified by PFam, accession name oxidored_fad, E-value=1.4e-05, PFam score of 22.8
MTAATEQLNASRGLSTREMERQAELAKITTDYINSGGSEGDEKLQNMIKAQNDYYAAEDAKRADWLAGAESAFADYGDSAMDMYGNVNEIASSALNGMTDMMVQFLTTGKANFADFAKNIISMIIKMIAQMVIFNTSLRNDGRSVSSGGAAVSLAAAAGSVATSGFNASNSAPKVVTIREVERSVDVSGMEASSTSWITIRSFTAETSTFGPTMTASMTFLPTYCSIIASLLSSFKLAAATDGVVRNGKSTAGHQRYLCSHCRKTWQLQFTYTASQPALARNPNRDITIYWGGREEQHLYDLCELEALSLKHPGLQVVPVVEQPEAGWRGRTGTVLTAVLQDHATDGVVRNGKSTAGHQRYLCSHCRKTWQLQFTYTASQPGTHQKIIDMAMNGVGCRATARIMGVGLNTIFRHLKNSGRSR

SEQ ID NO: 52888 - protein, 358 aa, Homo sapiens
  misc_feature (1)...(358): Xaa = X or * as defined in Table 2
GAPVASVSISCPSCSATDGVVRNGKSTAGHQRYLCSHCRKTWQLQFTYTASQPAGQXRTENQTPHVLTHKWELNYENPWTQGGEHLTMGLVVGWRGLQEGDPARTNLSYYQANVGSGQHRENKGPINLGNVGKSNGERGGKSLYRCKIFLESSVTMKDRELPPVYDGVFEVLQWLLFLSAVPPVQLLTGWCVTAKAPPDISAISALTAVKHGNCSSLTPLLNPPGSDVIVCAEMDEQWGYVGAKSRQRWLFYAYDSLRKTVVAHVFGERTMATLGRLMSLLSPFDVVIWMTDGWPLYESRLKGKLHVISKRYTQRIERHNLNLRQHLARLGRKSLSFSKSVELHDKVIGHYLNIKHYQ

SEQ ID NO: 52889 - protein, 483 aa, Homo sapiens
  misc_feature (1)...(483): Xaa = X or * as defined in Table 2
RRWRRGAHEAATGGTGRGPAEEAAPGEPAAGRAAPKSGGKRLGGVLGRGGVGRRSGSPDRSGAHSAAPRRCRQLPGRCPSCSATDGVVRNGKSTAGHQRYLCSHCRKTWQLQFTYTASQPAGQXRSKGAIGEGPPDPRGIVEQNLGGDISIPCYNGPRPRRSAQKTTLGPLNQPRIPSAQCAGAFPRVAAAGAGGGGGGGSGGSGFCLGWRLRRRRQRRRRWRRGEGEGDGDAGHMRPRPAGRAEARRRRRLRGNPPPGARLPNREGNGSGVSWAAEVSGDGRGARTEAARTRRRPGGADNYPGAVPPVQLLTGWCVTAKAPPDISAISALTAVKHGNCSSLTPLLNPPGSDVIVCAEMDEQWGYVGAKSRQRWLFYAYDSLRKTVVAHVFGERTMATLGRLMSLLSPFDVVIWMTDGWPLYESRLKGKLHVISKRYTQRIERHNLNLRQHLARLGRKSLSFSKSVELHDKVIGHYLNIKHYQ

SEQ ID NO: 52890 - protein, 212 aa, Homo sapiens
  misc_feature (1)...(212): Xaa = X or * as defined in Table 2
VISRPGSSIQVRGLLLSRHGLALGSAPDLWKLPWVNLVQGMGQQSQGSSCREGCSRPQCPSAAPCGAAPAHFCSAATFWESEVQSIPRCRATDGVVRNGKSTAGHQRYLCSHCRKTWQLQFTYTASQPEVIRSSPTSAPRSDGTKTVPPLMGISPXSAHHRLATSDPSLCLSESLCSREPAAVPRASNQQPQGVKDVHHQFTARTSRYPSKC

SEQ ID NO: 52891 - protein, 55 aa, Homo sapiens
AWREALLGECSCLVDSRGSPVSEGIASLFRLMPEQVGPLMTMVTSMPALASTSFS

SEQ ID NO: 52892 - protein, 157 aa, Homo sapiens
  misc_feature (1)...(157): Xaa = X or * as defined in Table 2
GGARSRQNPRCGPCMVVVPGQSGRSVSADSSTEFREQGGSAISFPKSINRAGPELFRFMENPFNSVXYRKNVRELTPAIMAVLPVEFRTRLAPQNDTMSLIASAMKECSEAKQAVLLNAPEHQKMKEVSEGIASLFRLMPEQVGPLMTMVTSMLGVI

SEQ ID NO: 52893 - protein, 103 aa, Homo sapiens
AWHQRQIFTHLLQNIGVSAFQRRHTAAQAGGKIEFAAHRPFGYFRHHLARSGQFGNFINTFNLDGGGVHIHHQQTRRAQVRDFPQRGDIQLRFVGQACSPCGE

SEQ ID NO: 52894 - protein, 141 aa, Homo sapiens
LSINCRSSSARSNTTVLAVERHKPNTIPVINDQPSTAESAIPSSVATAIWAIAPGMAMAFTAIKSFSEKCKPTPNINRMTPSSASSGASLVSATKPGVNGPASTPANRYPTRGEIRSLLASMPRIKASTRPPTMVVISGVA

SEQ ID NO: 52895 - protein, 903 aa, Homo sapiens
  DOMAIN (794)..(820): Dihydrodipicolinate synthetase proteins domain identified by eMATRIX, accession number BL00665E, p-value=2.200e-16, raw score of 20.33
  DOMAIN (681)..(883): Dihydrodipicolinate synthetase family domain identified by PFam, accession name DHDPS, E-value=1.8e-36, PFam score of 134.6
MAHMKLVDEAKARADVVVVSIFVNPMQFDRPEDLARYPRTLQEDCEKLNKRKVDLVFAPSVKEIYPNGTETHTYVDVPGLSTMLEGASRPGHFRGVSTIVSKLFNLVQPDIACFGEKDFQQLALIRKMVADMGFDIEIVGVPIMRAKDGLALSPVCEKRGWKKWAQQRGLRNMQFFPLQSYDALPALLKMGDCHLVVQKRGAADAVLPSKLTNILAVGGNAVITAEAYTELGQLCETFPGIAVCVEPESVEALVAGIRQALLLPKHNTVAREYAERTLGAFIHSEPHVVIFGHIDLNFRAATSNQLFLQPIKQRIGNPTPTKLWMHAKIISRPAMPVITAHHRSDHVTVYLSDQKQTDVMVHLTLDVHFRIVPRTQQVATLPKGDDLFEIFLAKYAYLHGIRYLFAENNKMAEIAQFLHENYLSVDTTVEVSITVTRDEKLIACGGIAGNIIKCVAISESVRGEGLALTLATELINLAYERHSTHLFIYTKTEYEALFRQCGFSTLTSVPGVMVLMENSATRLKRYAESLKKFRHPGNKIGCIVMNANPFTNGHGDRIHRIPEDRKKKKGKRKPPFWTRIALIVSAAGVAFSHGANDGQKGIGLVMLVLVGIAPAGFVVNMNASGYEITRTRDAVTNFEHYLQQHPELPQKLIAMEPPLPAASTDGTQVTEFHCHPANTFDAIARVKTMLPGNMESYEPLSVSQRSQLRRIMLCISDTSAKLAKLPGVSSPFRVILYNFRDLTGQDLTPETVTRLALQNENIVGIKDTIDSVGHLRTMINTVKSVRPSFSVFCGYDDHLLNTMLLGGDGAITASANFAPELSVGIYRAWREGDLATAATLNKKLLQLPAIYALETPFVSLIKYSMQCVGLPVETYCLPPILEASEEAKDKVHVLLTAQGILPV

SEQ ID NO: 52896 - protein, 861 aa, Homo sapiens; identical to SEQ ID NO: 48441
  DOMAIN (396)..(438): Bacterial regulatory proteins asnC family proteins. domain identified by eMATRIX, accession number BL00519B, p-value=5.500e- 29, raw score of 26.49
  DOMAIN (391)..(493): AsnC family domain identified by PFam, accession name ASNC_trans_reg, E-value=2.3e-22, PFam score of 87.8

SEQ ID NO: 52897 - protein, 132 aa, Homo sapiens
  DOMAIN (62)..(125): pfkB family carbohydrate kinase domain identified by PFam, accession name pfkB, E-value=9.3e-14, PFam score of 46.8
  misc_feature (1)...(132): Xaa = X or * as defined in Table 2
APSDQKRDFLVPHGADSAMAKSGXCESGNDLLSSSHMNQLRAESIPEDVIAGASALVLTFIIKFVIAENPQWWQQFLKDHVSILAMNEDEAEALTGESDPLLASDKALDWVDLVLCTAGPIGLYMAGGGDVN

SEQ ID NO: 52898 - protein, 563 aa, Homo sapiens
  DOMAIN (167)..(183): pfkB family of carbohydrate kinases proteins domain identified by eMATRIX, accession number BL00583A, p-value=4.462e- 09, raw score of 13.61
  DOMAIN (170)..(422): pfkB family carbohydrate kinase domain identified by PFam, accession name pfkB, E-value=8.8e-63, PFam score of 203.1
  misc_feature (1)...(563): Xaa = X or * as defined in Table 2
QSAWANRHRLVDCGRPGNGSDAGVAARSGRNDGTGRCGLCHSCSRYGDHHRQSDRIYRHYDAGRSPSGAVDYGTQRGNRFSRAVYPVGARRWRXGLPLVQQFQPENETSAAWVVGINQPLVDIEAKVDDEFIERYGLSAGHSLVIEDDVAEALYQDVQQKNLITHQSAGGTIGNTMHNYSVLADDRSVLLGVMCSNIEIGSYAYRYLCNTSSRTDLNYLQGVDGPIGRCFTLIGESGERTFAISPGHMNQLRAESIPEDVIAGASALVLTSYLVRCKPGEPMPEATMKAIEYAKKYNVPVVLTLGTKFVIAKNPQWWQQFLKDHVSILAMNEDEAEALTGESDPLLASDKALDWVDLVLCTAGPIGLYMAGFTEDEAKRKTQHPLLPGAIAEFNQYEFSRAMRHKDCQNPLRVYSHIAPYMGGPEKCNILGRSGWLLYGRGLDKQRLTQYQSKLGAAMVIVAAWCVEDYQVIRLAGSLTARATRLAHEAQLDVAPLGKIPHLRTPGLLVMDMDSTAIQIECIDEIAKLAGTGEMVAEVTRTGDARRTRFYRQPAQPCGDAERR

SEQ ID NO: 52899 - protein, 52 aa, Homo sapiens
LDIRFRLLKDASLPRQFAAYPCLPNAPYPPSPVSDAQWDRASPTQVSPTKAL

SEQ ID NO: 52900 - protein, 43 aa, Homo sapiens
LSSGQCWLPGVRTGGRPAGPPGPGWRGPHGQGRCLPGCPALTS

SEQ ID NO: 52901 - protein, 425 aa, Homo sapiens
  misc_feature (1)...(425): Xaa = X or * as defined in Table 2
MLPAHLDACVTTLQKIRWTLSVVDPTLALRVPLPALSIRDDPPLRAYLPGRGALKVIRFDDMDFATIDGINRMLVDIDTNYLFLPRVTSSTIRCLSVPTRRTVPAVTASGRSVKYYPPDFDPSKIPKLKLPKDRQYVVRLMAPFNMRCKTCGEYIYKGKKFNARKETVQNEVYLGLPIFRFYIKCTRCLGRDSPFKTDPENTDYTMESLGATRNFQGXEASWEEEEKRVQKEREDEESLNNPMKVLENRTKDSKLEMEVLENLQELKDLNQRQAHVDFEGMLRQHRLSEEERRSQQQEEFEQKTAALLEEARKRRLLEDSDSEDEAAPSPLQPALRPNPTATLDEAPKPKRKVEVWEQSVGSLGSRPPLSRLVVVKKAKADPDCSNGQPQAAPHPRSPAEQEGGQPYTPDAWRVLPEPTGCIPGQ

SEQ ID NO: 52902 - protein, 137 aa, Homo sapiens
VLKLQKVYYAQSQQKVFDVRLNGHVVVKDLDIFDRVGHSTARDEIIPMSIRKGKLSVQGEVSTFTGKLYIEFVKGYYDNPKVCALYIMAGTVDDVPKLHSNPLLPLPVVRTNDYPEQGGGVWERNQPYWFWFLYFSQ

SEQ ID NO: 52903 - protein, 147 aa, Homo sapiens
  misc_feature (1)...(147): Xaa = X or * as defined in Table 2
MGSWSLPGRTLWKEKVRFLKSKERTNPGSNFFSFPGSQHTREERSQECLSLPVLPSYLATRLSLPDSCPLKGRKAHXQRHSEIXLMGFEPGWPGKLXGWIELAFLLGCLHLTLPLPCPTPLPPKSTKSGCFSLSIALCFNKQFAVTK

SEQ ID NO: 52904 - protein, 64 aa, Homo sapiens
VFDVRLNGHVVVKDLDIFDRVGHSTAHDEIIPMSIRKGKLSVQGEGYYDNPKVCALYIMAGTVD

SEQ ID NO: 52905 - protein, 76 aa, Homo sapiens
  misc_feature (1)...(76): Xaa = X or * as defined in Table 2
XVYFAQSQQKVFDVRLNGHVVVKDLDIFDRVGHSTAHDEIIPMSIRKGKLSVQGEVSTFTGKLYIEFVKGYYDNPK

SEQ ID NO: 52906 - protein, 24 aa, Homo sapiens
AQRCFLLILIVCPSFPCPFISLSK

SEQ ID NO: 52907 - protein, 321 aa, Homo sapiens
  misc_feature (1)...(321): Xaa = X or * as defined in Table 2
VRGGLAAGRGRGSAGAAPVVVAAMLGAWAVEGTAVALLRLLLLLLPPAIRGPGLGVAGVAGAAGAGLPESVIWAVNAGGEAHVDVHGIHFRKCIPLXGRVGRALYYGMKLPILRSNPEDQSCYQTERSNEETFGYESPIQREGGLTCWSLKFAEVYFAQSQQKVFDVRLNGHVVVKDLDIFDRVGHSTAHDEIIPMSIRKGKLSVQGEVSTFTQGKLLPLSFSKGYLXPIPKVCALYIMAGTVDDVPKASAFNPGLEKKEEEEEEEEYDEGSNLKKQTNKNRVQSGPRTPNPYALDNSSLMFPILVAFGVFIPTLFCLCRL

SEQ ID NO: 52908 - protein, 68 aa, Homo sapiens
PQNGEIFPPVCCNGGNQLICRFQECRFQPGRYQCSVLKQLAWLNEIFVQTDGRAMDKKLFAPRLVHTP

SEQ ID NO: 52909 - protein, 132 aa, Homo sapiens
  misc_feature (1)...(132): Xaa = X or * as defined in Table 2
NKQLNKKRRRTMIALIQRVTRASVTVEGEVTGEIGAGLLVLLGVEKDDDEQKANRDAEGQMNLNVQQAGGSVLVVSQFTLAADTERGMRPSFSQGHHRIRAQAFYDYFVESCRQQRXYAQGGLSAEFRLLNS

SEQ ID NO: 52910 - protein, 643 aa, Homo sapiens
MAGKPEYDKTISTSIVLNALNALGVSAEASGRNDLVVKTVEGDRKVSGSAYRETKDRGFHHGTLLLNADLSRLANYLNPDKKKLAAKGITSVRSRVTNLTELLPGITHEQVCEAITEAFFAHYGERVEAEIISPNKTPDLPNFAETFARQSSWEWNFGQAPAFSHLLDERFTWGGVELHFDVEKGHITRAQVFTDSLNPAPLEALAGRLQGCLFSLYNSDLNTVIDNVLRIFPLLLSWISFWLLYSIVPTIRVPNRDAIVGAFVAALLFEAGKKGFALYITMFPSYQLIYGVLAVIPILFVWVYWTCVTVEGEVTGEIGAGLLVLLGVEKDDDEQKANRLCERVLGYRIFSDAEGKMNLNVQQAGGSVLVVSQFTLAADTERGMRPSFSKGVIDDIGFNTEISQTRFHQASHLFKRKGIYRLHFARRRCQQIQRRQRRRRFMQRTAVAITHQQRMKQGILRLWRNWLLWLLILLLRRNRLLRLLILLLWRNRLLRLLILWLRRNRLLWLLILRLRRNWLLRLLILLLRCNRLLRLLYRFNNWRKQRFVWTIIQQRFHWRKFKIIQRERIRPSRLFAGITLLLSLRKLTSQFSLCRSICIFCVYGHIMLILFAIALLLCLGELTCQFILLHRIDFIIVVLIARI

SEQ ID NO: 52911 - protein, 28 aa, Homo sapiens
  misc_feature (1)...(28): Xaa = X or * as defined in Table 2
QTISQTTVQSNXNSGLRISPKTAQLHGD

SEQ ID NO: 52912 - protein, 163 aa, Homo sapiens
  misc_feature (1)...(163): Xaa = X or * as defined in Table 2
KARQKSCQPVTTDTQCRHTSSSIGKRLAFCQNLTQIHTESTMKPWILLLVMFISGVVMLLPVLGSFWNKDPFLDMIRETEQCWVQPPYKYCEKRCTKIMTCVRPNHTCCWTYCGNICLDIRRAPXHQCXTPRFYWPITTVGXRMTIWSKKSAAYFLLGTPTWL

SEQ ID NO: 52913 - protein, 136 aa, Homo sapiens
  DOMAIN (85)..(98): Laminin-type EGF-like (LE) domain proteins domain identified by eMATRIX, accession number BL01248, p-value=1.340e-09, raw score of 11.02
  DOMAIN (30)..(103): EGF-like domain identified by PFam, accession name EGF, E- value=4.3e-09, PFam score of 43.6
HVTGECRCPPGYTGAFCEDLCPPGKHGPQCEQRCPCQNGGVCHHVTGECSCPSGWMGTVCGQPCPEGRFGKNCSQECQCHNGGTCDAATGQCHCSPGYTGERCQDECPVGTYGVLRNKTCQCVNGGVLRPVWRIQT

SEQ ID NO: 52914 - protein, 129 aa, Homo sapiens
  DOMAIN (112)..(125): Laminin-type EGF-like (LE) domain proteins domain identified by eMATRIX, accession number BL01248, p-value=1.340e-09, raw score of 11.02
  DOMAIN (14)..(127): EGF-like domain identified by PFam, accession name EGF, E- value=2.4e-08, PFam score of 41.2
CEASCEQGTYGNDCHQRCQCQNGATCDHVTGECRCPPGYAGAFCEDLCPPGKHGPQCEQRCPCQNGGVCHHVTGECSCPSGWMGTVCGQPCPEGRFGKNCSQECQCHNGGTCDAATGQCHCSPGYTGYV

SEQ ID NO: 52915 - protein, 109 aa, Homo sapiens
  misc_feature (1)...(109): Xaa = X or * as defined in Table 2
CCGGRARSELCLLNLCIKGADXIQAWXKFCQWPCERADGRGCRKAERCPCPKGAYSLYCRESVCCLPSFVNKNSSSLCVAHNWGRHCYLWTAADVKQFISSHMFPVEHL

SEQ ID NO: 52916 - protein, 74 aa, Homo sapiens
  misc_feature (1)...(74): Xaa = X or * as defined in Table 2
GGGRARSELCLLNLCIKGADXIQAWXKFCQWPCERADGRGSXFDRGAEVCNQTDWQSIRSSQGGRDQRFSTERA

SEQ ID NO: 52917 - protein, 91 aa, Homo sapiens
  DOMAIN (44)..(65): COMPLEMENT C9 SIGNATURE domain identified by eMATRIX, accession number PR00764F, p-value=6.610e-09, raw score of 16.89
TGLWETWSNFPGEQERQRLKEEGPCDTCEDLCPPGKHGPQCEQRCPCQNGGVCHHVTGECSCPSGWMSPIPGYSVHTHAGDFSTKESYHDG

SEQ ID NO: 52918 - protein, 466 aa, Homo sapiens
  DOMAIN (214)..(233): TYPE III EGF-LIKE SIGNATURE domain identified by eMATRIX, accession number PR00011B, p-value=4.966e-13, raw score of 13.08
  DOMAIN (100)..(286): EGF-like domain identified by PFam, accession name EGF, E- value=1.9e-14, PFam score of 61.4
  misc_feature (1)...(466): Xaa = X or * as defined in Table 2
MGWGQGPDVQLMNGHERSPSHSPREAKKSGSPLPTDIHCFSPQSQPAMVITGVPTAPAGASAKMGLCATPITGACPLWLRGFRGWRCEDRCEQGTYGNDCHQRCQCQNGATCDHVTGECRCPPGYTGAFCEDLCPPGKHGPQCEQRCPCQNGGVCHHVTGECSCPSGWMLSFPGWRPIXFSKSLXMQGTVCGQPCPEGRFGKNCSQECQCHNGGTCDAATGQCHCSPGYTGERAAVPDVRKCQDECPVGTYGVLCAETCQCVNGGKCYHVSGACLCEAGFAGERCEARLCPEGLYGIKCDKRCPCHLENTHRGDDREKAEFGHLLIALEVQYTEISNCIEKSQEASCYDIRMLKQPYGETNTEEELAVNYVYSIYASKEQIRYKHGRSFANGHVKELMEGPSRRIAGSGGEKYKRDEEKNTLLRGQNRGGRGKNPKKTKAWVKIQGQNKIEISGVGADRKRFFREK

SEQ ID NO: 52919 - protein, 736 aa, Homo sapiens
  DOMAIN (473)..(503): Sulfatases proteins domain identified by eMATRIX, accession number BL00523E, p-value=2.565e-25, raw score of 19.27
  DOMAIN (178)..(668): Sulfatase domain identified by PFam, accession name Sulfatase, E-value=5.6e-209, PFam score of 707.6
MEQKGEFKNDTLIYEFFHIVAKPHPLPIKSSTYTTFQSARVTRFFLDAEKECRCQEGQVEAALIAMGGTCQGTQRLSTAGESESATHMREPAVQCRRDSQCVSVLAGRRRFFQGAASPLHPASVALTQLHVRWASTATIGQVSGFPGKIRVSPTTNLGDSDYIFTASHWGLGHYGPAVHVHSQGGIDERGSNDSGRLYVTNPCGNVPSWTPNIDRLAEDGVKLTQHISAASLCTPSRAAFLTGRYPVRSGMVSSIGYRVLQWTGASGGLPTNETTFAKILKEKGYATGLIGKWHLGLNCESASDHCHHPLHHGFDHFYGMPFSLMGDCARWELSEKRVNLEQKLNFLFQVLALVALTLVAGKLTHLIPVSWMPVIWSALSAVLLLASSYFVGALIVHADCFLMRNHTITEQPMCFQRTTPLILQEVASFLKRNKHGPFLLFVSFLHVHIPLITMENFLGKSLHGLYGDNVEEMDWMVGRILDTLDVEGLSNSTLIYFTSDHGGSLENQLGNTQYGGWNGIYKGGKGMGGWEGGIRVPGIFRWPGVLPAGRVIGEPTSLMDVFPTVVRLAGGEVPQDRVIDGQDLLPLLLGTAQHSDHEFLMHYCERVLHAARWHQRDRGTMWKVHFVTPVFQPEGAGACYGRKVCPCFGEKVVHHDPPLLFDLSRDPSETHILTPASEPVFYQVMERVQQAVWEHQRTLSPVPLQLDRLGNIWRPWLQPCCGPFPLCWCLREDDPQ

SEQ ID NO: 52920 - protein, 631 aa, Homo sapiens
  DOMAIN (333)..(363): Sulfatases proteins domain identified by eMATRIX, accession number BL00523E, p-value=2.565e-25, raw score of 19.27
  DOMAIN (45)..(537): Sulfatase domain identified by PFam, accession name Sulfatase, E-value=4.4e-207, PFam score of 701.3
  misc_feature (1)...(631): Xaa = X or * as defined in Table 2
GSTERDNMLHLHHSCVCFRSWLPAMLAVLLSLAPSASSDISASRPNILLLMADDHGVGDIGCYGNNTMRTPNIDRLAEDGVKLTQHISAASLCTPSRAAFLTGRYPVRSGMVSSIGYRVLQWTGASAGFTTNETTFAKILKEKGYATGLIGKWHLGLNCESASDHCHHPLHHGFEHFYGMPFSLMGDCARWELSEKRVNLEQKLNFLFQVLALVALTLVAGKLTHLIPVSWMPVIWSALSAVLLLASSYFVGALIVHADCFLMRNHTITEQPMCFQRTTPLILQEVASFLKRNKHGPFLLFVSFLHVHIPLITMENFLGKSLHGLYGDNVEEMDWMVGRILDTLDVEGLSNSTLIYFTSDHGGSLENQLGNTQYGGWNGIYKGGKGMGGWEGGIRVPGIFRWPGVLPAGRVIGEPTSLMDVFPTVVRLAGGEVPQDRVIDGQDLLPLLLGTAQHSDHEFLMHYCERFLHAARWHQRDRGTMWESPTLXPPCVSSQEGAGACYGRKVCPCFGEKVVHHDPPLLFDLSRDPSETHILTPASEPVFYQVMERVQQAVWEHQRTLSPVPMQLDRLGNIWRPWMQPCCGPFPLCWCLREDDPQINVCSEKLEPRFLNFVTQIETNQLAMVVVIPAL

SEQ ID NO: 52921 - protein, 61 aa, Homo sapiens
CTTTNLNFEQNTSLLLWSHTEIKVSKYRQYYPFSSSSPDSRVPARSAHPHSPLKSGPFFSS

SEQ ID NO: 52922 - protein, 171 aa, Homo sapiens
  DOMAIN (38)..(72): Neuromodulin (GAP-43) proteins domain identified by eMATRIX, accession number BL00412C, p-value=9.241e-10, raw score of 10.28
PPSLKKKQTTKKPTETPPVKETQQEPDEESLVPSGENLASETKTESAKTEGPSPALLEETPLEPAVGPKAACPLDSESAEGVVPPASGGGRVQNSPPVGRKTLPLTTAPEAGEVTPSDSGGQEDSPAKGLSVRLEFDYSEDKSSWDNQQENPPPTKKIGKKPVAKMPLRRP

SEQ ID NO: 52923 - protein, 203 aa, Homo sapiens
CGSETVPVPDGPRSDSVKSLERRASDAKIQEGKVNTRRKSTDSVPISKSTLSRSLSLQASDFDGASSSGNPEAVALAPDAYSTGSSSASSTLKRTKKPRPPSLKKKQTSKKPTETPPVKETQQEPDEESLVPSGENLASETKTESAKTEAPRKPRQGVRKAVIRITCNGTGQIIVNGIRACDFWFSQLRMGGITIPILSHVQP

SEQ ID NO: 52924 - protein, 705 aa, Homo sapiens
MGGSQSLQPAPASDLNLEASEAILGKLYLGLLWEEHLVAPSYCCGQKRFPGIQFWSLSSGCMAGGLLLPSASFLCTPGTVVFPAREQPGISDCLLLGRTHERGSSVPGATAQFPGSCACGWADGVENTTYSKTIALYGFFFKIKGLKHDTTSYSFYMQRIKHTDLESPSAVYEHNHVSLRAARLVKYEIRAEALVDGKWQEFRTNQIKQKFGLTTFLENCCFLDRDIGRSLRPLFLCLRLHGITKGENSTTAIKYEHQLIWFQIHESCCDHTFTDEDIAAAGQLSNSQEVPQPVWKIVAEYEKTIAQMIGRCPDLRGLRPAPMFLNYEEALEDRRLRTAPEGSFASADALLSRLAHPVSLCGALDYLEPDLAEKNPPLFAQKLQEELEFAIMRIEALKLARQIALASRSHQDGQAGNCRQGGYDATPSCQQEGPQAQPAGLKWVTVARGSHRSQDFSGVKREAAHPTDVSISKTALYSRIGTAEVEKPAGLLFQQPDLDSALQIARAEHKARLERRVTGSTNRWRLPKQPFSGDLLSLSQMCKALSIDFEEALRNPDSSFLQDNTFLQHNRGRGAGLLGRSFYTSGPLLCDIGKLHVQRQQILSGVLGSGPAPPPLGSHPDCSSPHTALVLISMPSFFYLVPYLPPPPMKQQTAGKQRSPYKSILSASSVLTCAAGSGNATRDRWRPFRPGAHGLTGQQRVKPKL

SEQ ID NO: 52925 - protein, 637 aa, Homo sapiens
  DOMAIN (110)..(125): WILM'S TUMOUR PROTEIN SIGNATURE domain identified by eMATRIX, accession number PR00049D, p-value=4.661e-09, raw score of 0.00
VGQPRGLRTLEKLTASVAGGAANFFGDIERDLGPRDTSRGIRGGNLGDRGCSSAEMAYASWQRWSPVEWARWMWTAVTSSGDSSLLVLQGDSGKRSSDSEEAFETPESTTPVKAPPAPPPPPPEVIPEPEVSTQPPPEEPGWGSETVPVPDGPRSDSVEGSPFRTQAHSFSGVFDEDQPIASTGTDILDFDNIELVDTFQTLEPRASDAKNQEGKVNTRRKSTDSVPISKSTLSRSLSLQASDFDGASSSGNPEAVALAPDAYSTESAKRVVPPASGGGRVQNSPPVGRKTLPLTTAPEAGEVTPSDSGGQEDSPAKGLSVRLEFDYSEDKSSWDNQQENPPPTKKIGKKPVAKMPLRRPKMKKTPEKLDNTPASPPRSPAEPNDIPIAKGTYTFDIDKWDDPNFNPFSSTSKMQESPKLPQQSYNFDPDTCDESVDPFKTSSKTPSSPSKSPASFEIPASAMEANAVDGDGLNKPAKKKKTPLKTMVEDVMSVCSLFDTFRVKKSPKRSPLSDPPSQDPTPAATPETPPVISAVVHATDEEKLAVTNQKWTCMTVDLEADKQDYPQPSDLSTFVNETKFSSPTEELDYRNFYEIEYMEKIGSSLPQDDDAPKKQALYLMFDTSQESPVKSSTVRMS

SEQ ID NO: 52926 - protein, 750 aa, Homo sapiens
  misc_feature (1)...(750): Xaa = X or * as defined in Table 2
HLRRKRNLPRREGLSPALLEETPLEPAVGPKAACPLDSESAEGVVPPASGGKRCLFTTAPEAGEVTPSDSGGQEDSPAKGLSVRLEFDYSEDKSSWDNQQENPPPTKKIGKKPVAKMPLRRPKMKKTPEKLDNTPASPPRSPAEPNDIPIAKGTYTFDIDKWDDPNFNPFSSTSKMQESPKLPQQSYNFDPDTCDESVDPFKTSSKTPSSPSKSPASFEIPASAMEANGVDGDGLNKPAKKKKTPLKTDTFRVKKSPKRSPLSDPPSQDPTPAATPETPPVISAVVHATDEEKLAVTNQKWTCMTVDLEADKQDYPQPSDLSTFVNETKFSSPTEELDYRNSYEIEYMEKIGSSLPQDDDAPKKQALYLMFDTSQESPVKSSPVRMSESPTPCSGSSFEETGSPLRNTAAKNQHPVPTRDWAPXPRSSHLAGCQRKSSQEVELGGPWGLGHPFQEGDLKFTASPRGSFASADALLSRLAHPVFSLCGALDYLEPNFRQKRNPPLFAQKLQREAVHPTDVSISKTALYSRIRTTEVEKPAGLLFQQPDLDSALQIARAEIITKEREVSEWKDKYEESRREVMEMRKILAEYEKTIAQMIEDEQREKSVSHQTVQQLVLEKEQALADLNSVEKSLADLFRRYEKMKEVLESFRKNEEVLKRCAQEYLSRVKKEEQRYQALKVHAEEKLDRANAEIAQVRGKAQQEQAAHQASLAERSSCRVDALERTLEQKNKEIEELTKICDELIAKMGKS

SEQ ID NO: 52927 - protein, 298 aa, Homo sapiens
  DOMAIN (246)..(261): Aminopeptidase P and proline dipeptidase proteins domain identified by eMATRIX, accession number BL00491C, p-value=8.800e- 18, raw score of 12.15
  DOMAIN (49)..(298): metallopeptidase family M24 domain identified by PFam, accession name Peptidase_M24, E-value=6.5e-63, PFam score of 222.4
  misc_feature (1)...(298): Xaa = X or * as defined in Table 2
AETNMVWYDWMRPSHAQLHSDYMQPLTEAKAKSKNKVRGVQQLIQRLRLIKSPAEIERMQIAGKLTSQAFIETMFTSKAPVEEAFLYAKFEFECRARGADILAYPPVVAGGNRSNTLHYVKNNQLIKDGEMVLLDGGCESSCYVSDITRTWPVNGRFTAPQAELYEAVLEIQRDCLALCFPGTSLENIYSMMLTLIGQKLKDLGIMKNTQGKXCLRRLLEQYCPHHVGHYLGMDVHDTPDMPRSLPLQPGMVITIEPGIYIPEDDKDAPEKFRGLGVRIEDDVVVTQDSPLILSADCP

SEQ ID NO: 52928 - protein, 352 aa, Homo sapiens
  DOMAIN (122)..(136): LEUCINE-RICH REPEAT SIGNATURE domain identified by eMATRIX, accession number PR00019A, p-value=2.565e-10, raw score of 11.19
  DOMAIN (73)..(311): Leucine Rich Repeat domain identified by PFam, accession name LRR, E-value=1.5e-24, PFam score of 95.0
  misc_feature (1)...(352): Xaa = X or * as defined in Table 2
RIWKTQMMRMKKMMMMMMMMMRTTLFFQQESQEAIFFPFDLFPMCPFGCQCYSRVVHCSDLGLTSVPTNIPFDTRMLDLQNNKIKEIKENDFKGLTSLYGLILNNNKLTKIHPKAFLTTKKLRRLYLSHNQLSEIPLNLPKSLAELRIHENKVKKIQKDTFKGMNALHVLEMSANPLXXSMGIEPGAFXRGXRCSYIRIAEAKLTSVPKGLPPTLLELHLDYNKISTVELEDFKRYKELQRLGLGNNKITDIENGSLANIPRVREIHLGNIKLKKIPSGLPELKYLQIIFLHSNSIARVGVNDFCPTVPKMKKSLYSAISLFNNPVKYWEMQPATFRCVLSRMSVQLGNFGM

SEQ ID NO: 52929 - protein, 1536 aa, Homo sapiens
  DOMAIN (1347)..(1396): Eukaryotic RNA polymerase II heptapeptide repeat proteins domain identified by eMATRIX, accession number BL00115Z, p-value= 2.125e-09, raw score of 3.12
MKQLLPASGLLPLSSSPLSPRQESPGVERAHEGCLSQNLQVQRATREGEIDRVAKSGGQERACASSETESEAGDIMDQQFEEMNNKLNSVTDPTGFLRMVRRNNLFNSQAEYCAQPWGLSGEQQGPQPRSLHPAPLARPDPIQSHPQKSKEIEGVSADSSNPDPLDEGNSRRSSRFNVEAVLCSSRGRPDSSMPDCCRNAALEARSCQSMTSLFSNTVSPTQDGTSSLPRRQSSFAKPPLRALYDLLIAPMEGGVVESTEPLGTSRAGFASGTALFWLGDNGKAASPPGVSVSSLENEDDNTQCNRLEQGYREAAVPDWTQDLALCLLPTLQSLKARTAPHLCVPSSCYKAWYTLAVSKVSGMGLMHSSGPVGRHRQLILVLEGELYLIPFALLKGSSSNEYLYERFGLLAVPSIRSLSVQSKSHLRKNPPTYSSSTSMAAVIGNPKLPSAVMDRWLWGPMPSAEEEAYMVSELLGCQPLVGSVATKERVMSALTQAECVHFATHISWKLSALVLTPSMDGNPASSKSSFGHPYTIPESLRVQDDASDGESISDCPPLQELLLTAADVLDLQLPVKLVVLGSSQESNSKVTADGVIALTRAFLAAGAQCVLVSLWPVPVAASKMFIHAFYSSLLNGLKASAALGEAMKVVQSSKAFSHPSNWAGFMLIGSDVKLNSPSSLIGQALTEILQHPERARDALRVLLHLVEKSLQRIQNGQRNAMYTSQQSVENKVGGIPGWQALLTAVGFRLDPPTSGLPAAVFFPTSDPGDRLQQCSSTLQSLLGLPNPALQALCKLITASETGEQLISRLHQVLVQLQAGEKEQDLASAPIQVSISVQLWRLPGCHEFLAALDMGKPQAQMLAEGPCRHSMKLHKEPYSAHVQDLESSRRKQMLIFFVPLGFDLCEVGQEEVILKTGKQANRRTVHFALQSLLSLFGPDRSGHSGHVGLGDFQALGTHPARLMFLRAKLATVGRANAGLEGGYGLQVEPTESAEDSTELPKRLSLDSSSSLESLASAQSVSNALPLGYQQPPFSPTGADSIASDAISVYSLSSIASSMSFVSKPEGGSEGGGPGGRQDHDRSKNAYLQRSTLPRSQLPPQTRPAGNKDEEEYEGFSIISNEPLATYQENRNTCFSPDHKQPQPGTAGGMRVSVSSKGSISTPNSPVKMTLIPSPNSPFQKVGKLASSDTGESDQSSTETDSTVKSQEESNPKLDPQELAQKILEETQSHLIAVERLQRSGGQVSKSNNPEDGVQAPSSTAVFRASETSAFSRPVLSHQKSQPSPVTVKPKPPARSSSLPKVSSGYSSPTTSEMSIKDSPSQHSGRPSPGCDSQTSQLDQPLFKLKYPSSPYSAHISKSPRNMSPSSGHQSPAGSAPSPALSYSSAGSARSSPADAPDIDKLKMAAIDEKVQAVHNLKMFWQSTPQHSTGPMKIFRGAPGTMTSKRDVLSLLNLSPRHNKKEEGVDKLELKELSLQQHDGAPPKAPPNGHWRTETTSLGSLPLPAGPPATAPARPLRLPSGNGYKFLSPGRFFPSSKC

SEQ ID NO: 52930 - protein, 155 aa, Homo sapiens
SPGVERAHEGCLSQNLQVQRATREGEIDRVAKSGGQERACASSETESEAGDIMDQQFEEMNNKLNSVTDPTGFLRMVRRNNLFNSQAEYCAQPWGLSGEQQGPQPRSLHPAPLARPDPIQSHPQKSKEIEGVSADSSNPDPLDEGNSRRSSRFNV

SEQ ID NO: 52931 - protein, 514 aa, Homo sapiens
  DOMAIN (45)..(66): PROTEIN REPEAT DOMAIN TPR NUCLEA domain identified by eMATRIX, accession number PD00126A, p-value=4.115e-10, raw score of 22.53
  DOMAIN (38)..(311): TPR Domain domain identified by PFam, accession name TPR, E- value=1.9e-33, PFam score of 124.5
MGITKMNMNVMEEAIGYFEQQLAMLQQLSGNESVLDRGRAYGNLGDCYEALGDYEEAIKYYEQYLSVAQSLNRMQDQAKAYRGLGNGHRAMGSLQQALVCFEKRLVVAHELGEAFNKAQAYGELGSLHSQLGNYEQAISCLERQLNIARDMKDRALESDAACGLGGVYQQMGEYDTALQYHQLDLQIAEETNNPTCQGRAYGNLGLTYESLGTFERAVVYQEQHLSIAAQMNDLAAKTVSYSSLGRTHHALQNYSQAVMYLQEGLRLAEQLGRREDEAKIRHGLGLSLWASGNLEEAQHQLYRASALFETIRHEAQLSTDYKLSLFDLQTSSYQALQRVLVSLGHHDEALAVAERGRTRAFADLLVERQTGQQDSDPYSPVTIDQILEMVNGQRGLVLYYSLAAGYLYSWLLAPGAGIVKFHEHYLGENTVENSSDFQASSSVTLPTATGSALEQHIASVREALGVESHYSSIRNGHCRSLPCYLSLFHVSTAGHQDYKGTWVYDTCHLKSLHM

SEQ ID NO: 52932 - protein, 1408 aa, Homo sapiens
  DOMAIN (1219)..(1268): Eukaryotic RNA polymerase II heptapeptide repeat proteins domain identified by eMATRIX, accession number BL00115Z, p-value= 2.125e-09, raw score of 3.12
EAVLCSSRGRPDSSMPDCCRNAALEARSCQSMTSLFSNTVSPTQDGTSSLPRRQSSFAKPPLRALYDLLIAPMEGGVVESTEPLGTSRSGFASGTALFWLGDNGKAASPPGVSVSSLENEDDNTQCNRLEQGYREAAVPDWTQDLALCLLPTLQSLKARTAPHLCVPSSCYKAWYTLAVSKVSGMVEGKAWIILLLLAASTHALLQRPQEGDITPLAGSRAAAVSCQARPFSTFSGLMHSSGPVGRHRQLILVLEGELYLIPFALLKGSSSNEYLYERFGLLAVPSIRSLSVQSKSHLRKNPPTYSSSTSMAAVIGNPKLPSAVMDRWLWGPMPSAEEEAYMVSELLGCQPLVGSVATKERVMSALTQAECVHFATHISWKLSALVLTPSMDGNPASSKSSFGHPYTIPESLRVQDDASDGESISDCPPLQELLLTAADVLDLQLPVKLVVLGSSQESNSKVTADGVIALTRAFLAAGAQCVLVSLWPVPVAASKMFIHAFYSSLLNGLKASAALGEAMKVVQSSKAFSHPSNWAGFMLIGSDVKLNSPSSLIGQALTEILQHPERARDALRVLLHLVEKSLQRIQNGQRNAMYTSQQSVENKVGGIPGWQALLTAVGFRLDPPTSGLPAAVFFPTSDPGDRLQQCSSTLQSLLGLPNPALQALCKLITASETGEQLISRLHQVLVQLQAGEKEQDLASAPIQVSISVQLWRLPGCHEFLAALDMGKPQAQMLAEGPCRHSMKLHKEPYSAHVQDLESSRRKQMLIFFVPLGFDLCEVGQEEVILKTGKQANRRTVHFALQSLLSLFGPDRSGHSGHVGLGDFQALGTHPARLMFLRAKLATVGRANAGLEGGYGLQVEPTGSAEDSTELPKRLSLDSSSSLESLASAQSVSNALPLGYQQPPFSPTGADSIASDAISVYSLSSIASSMSFVSKPEGGSEGGGPGGRQDHDRSKNAYLQRSTLPRSQLPPQTRPASNKDEEEYEGFSIISNEPLATYQENRNTCFSPDHKQPQPGTAGGMRVSVSSKGSISTPNSPVKMTLIPSPNSPFQKVGKLASSDTGESDQSSTETDSTVKSQEESNPKLDPQELAQKILEETQSHLIAVERLQRSGGQVSKSNNPEDGVQAPSSTAVFRASETSAFSRPVLSHQKSQPSPVTVKPKPPARSSSLPKVSSGYSSPTTSEMSIKDSPSQHSGRPSPGCDSQTSQLDQPLFKLKYPSSPYSAHISKSPRNMSPSSGHQSPAGSAPSPALSYSSAGSARSSPADAPDIDKLKMAAIDEKVQAVHNLKMFWQSTPQHSTGPMKIFRGAPGTMTSKRDVLSLLNLSPRHNKKEEGVDKLELKELSLQQHDGAPPKAPPNGHWRTETTSLGSLPLPAGPPATAPARPLRLPSGNGYKFLSPGRFFPSSKC

SEQ ID NO: 52933 - protein, 1396 aa, Homo sapiens
  DOMAIN (1168)..(1217): Eukaryotic RNA polymerase II heptapeptide repeat proteins domain identified by eMATRIX, accession number BL00115Z, p-value= 2.125e-09, raw score of 3.12
  misc_feature (1)...(1396): Xaa = X or * as defined in Table 2
ALDFPGRRFRPTASFIWASVLFETIRHEAEVSTDYKLSLFDLQTSSYQALQRVLVSLGHHDEALAVAERGRTRAFADLLVERQTGQQDSDPYSPVTIDQILEMVNGQRGLVLYYSLAAGYLYSWLLAPGAGIVKFHEHYLGENTVENSSDFQASSSVTLPTATGSALEQHIASVREALGVESHYSRACASSETESEAGDIMDQQFEEMNNKLNSVTDPTGFLRMVRRNNLFNRSCQSMTSLFSNTVSPTQDGTSSLPRRQSSFAKPPLRALYDLLIAPMEGGLMHSSGPVGRHRQLILVLEGELYLIPFALLKGSSSNEYLYERFGLLAVPSIRSLSVQSKSHLRKNPPTYSSSTSMAAVIGNPKLPSAVMDRWLWGPMPSAEEEAYMVSELLGCQPLVGSVATKERVMSALTQAECVHFATHISWKLSALVLTPSMDGNPASSKSSFGHPYTIPESLRVQDDASDGESISDCPPLQELLLTAADVLDLAAALXRLVVLGSSRESTSKFTADGVFALTRAFLAAGAQCVLGSLWPVPVAAFKMFIHAFYSSLLNGLKASAALGEAMKVVQSSKAFSHPSNWAGFMLIGSDVKLNSPSSLIGQALTEILQHPERARDALRVLLHLVEKSLQRIQNGQRNAMYTSQQSVENKVGGIPGWQALLTAVGFRLDPPTSGLPAAVFFPTSDPGDRLQQCSSTLQSLLGLPNPALQALCKLITASETGEQLISRAVKNMVGMLHQVLVQLQAGEKEQDLASAPIQVSISVQLWRLPGCHEFLAALGFDLCEVGQEEVILKTGKQANRRTVHFALQSLLSLFDSTELPKRLSLDSSSSLESLASSLQSVSNALPLGYQQPPFSPTGADRIASDAISVYSLSSIASSMSFVSKPEGGSEGGGPGGRQDHDRSKNAYLQRSTLPRSQLPPQTRPAGNKDEEEYEGFSIISNEPLATYQENRNTCFSPDHKQPQPGTAGGMRVSVSSKGSISTPNSPVKMTLIPSPNSPFQKVGKLASSDTGESDQSSTETDSTVKSQEESNPKLDPQELAQKILEETQSHLIAVERLQRSGGQVSKSNNPEDGVQAPSSTAVFRASETSAFSRPVLSHQKSQPSPVTVKPKPPARSSSLPKVSSGYSSPTTSEMSIKDSPSQHSGRPSPGCDSQTSQLDQPLFKLKYPSSPYSAHISKSPRNMSPSSGHQSPAGSAPSPALSYSSAGSARSSPADAPDIDKLKMAAIDEKVQAVHNLKMFWQSTPQHSTGPMKIFRGAPGTMTSKRDVLSLLNLSPRHNKKEEGVDKLELKELSLQQHDGAPPKAPPNGHWRTETTSLGSLPLPAGPPATAPARPLRLPSGNGYKFLSPGKIFSLLSKCLKHLLLPIDFEQACRWGPGVCFSPSLSAFPSQPPAPS

SEQ ID NO: 52934 - protein, 206 aa, Homo sapiens
  DOMAIN (59)..(69): w KINASE ALPHA ADHESION T-CELL domain identified by eMATRIX, accession number DM00179, p-value=7.652e-09, raw score of 13.97
  DOMAIN (23)..(68): Immunoglobulin domain identified by PFam, accession name ig, E-value=0.00025, PFam score of 19.0
MHLLEENTEVKRIGANLLEIYEYRNGHQEVESPFQGRLQWNGSKDLQDVSITVLNVTLNDSGLYTCNVSREFEFEAHRPFVKTTRLIPLRVTEEEALSCHVRSSGGLLRNYMERLILSKRSQGERPSDYLEKNKRSATPVSWLSSFPAIRLRHQMCAQCKLSVDLPFWGLEDGGLVFQDSSFAVELLLCRPVAKIPQMNPSTKQLL

SEQ ID NO: 52935 - protein, 1176 aa, Homo sapiens
  DOMAIN (291)..(330): PROTEIN ZINC FINGER ZINC-FINGER METAL-BINDING NU domain identified by eMATRIX, accession number PD01066, p-value=8.807e-14, raw score of 19.43
  DOMAIN (40)..(135): SCAN domain identified by PFam, accession name SCAN, E-value= 1.1e-58, PFam score of 208.4
MATAVEPEDQDLWEEEGILMVKLEDDFTCRPESVLQRDDPVLETSHQNFRRFRYQEAASPREALIRLRELCHQWLRPERRTKEQILELLVLEQFLTVLPGELQSWVRGQRPESGEEAVTLVEGLQKQPRRPRRWASSPKISSRDNQELPPDSMVTGSWNYSQVTVHVHGQEVLSEETVHLGAEPESPNELQDPVQSSTPEQSPEETTQSPDLGAPAEQRPHQEEELQTLQESEVPVPEDPDLPAERSSGDSEMVALLTALSQVCPSYLCTTENLFEEPLGISHTKQGLVTFKDVAVCFSQDQWSDLDPTQKEFYGEYVLEEDCGIVVSLSFPIPRPDEISQVREEEPWVPDIQEPQETQEPEILSFTYTGDRSKDEEECLEQEDLSLEDIHRPVLGEPEIHQTPDWEIVFEDNPGRLNERRFGTNISQVNSFVNLRETTPVHPLLGRHHDCSVCGKSFTCNSHLVRHLRTHTGEKPYKCMECGKSYTRSSHLARHQKVHKMNAPYKYPLNRKNLEETSPVTQAERTPSVEKPYRCDDCGKHFRWTSDLVRHQRTHTGEKPFFCTICGKSFSQKSVLTTHQRIHLGGKPYLCGECGEDFSEHRRYLAHRKTHAAEELYLCSECGRCFTHSAAFAKHLRGHASVRPCRCNECGKSFSRRDHLLYISPRQVQGTTNEKISGRGLQQLLGAWVHLRNLGNRSTEKQFHGKRACYGNELGLTSDDEDYVPPDDDFNTMGYCEEIPVEENEVNDSSSKSSIETKPDASPQLPKKSITNSTLTSTGSSEAPVSFDGLPLEEEALEGDGSLEKELAIDNIMGEKIEMIAPVNSPSLDFNDNEDIPTELSDSSDTHDEGEVQAFYEDLSGRQYVNEVFNFSVDKLYDLLFTNSPFQRDFMEQRRFSDIIFHPWKKEENGNQSRVILYTITLTNPLAPKTATVRETQTMYKASQESECYVIDAEVLTHDVPYHDYFYTINRYTLTRVARNKSRLRCVSVCFPVCVEVPSETEAVQGNPMKLRCISCMKREEVEATTVVEWFYRPEGGKDFLIYEYRNGHQEVESPFQGRLQWNGSKDLQDVSITVLNVTLNDSGLYTCNVSREFEFEAHRPFVKTTRLIPLRVTEEGLISSSNVMPLNIELGRNTHIGLVNQRQPAPEHSSASTSAPDSHLGFPAIPQGGANEDET

SEQ ID NO: 52936 - protein, 369 aa, Homo sapiens
  DOMAIN (239)..(249): w KINASE ALPHA ADHESION T-CELL domain identified by eMATRIX, accession number DM00179, p-value=7.652e-09, raw score of 13.97
  DOMAIN (205)..(250): Immunoglobulin domain identified by PFam, accession name ig, E-value=0.00025, PFam score of 19.0
  misc_feature (1)...(369): Xaa = X or * as defined in Table 2
RPIEGQLGTCHPGSEPRTIRWRAPGKGLRLYTHPPTSDIAGRTGAAASFPAPLHLPREPRAGVDGTDAERILYPRRAAPAASGVGSRPAGEAVRADEAGAAGLGGFQSERNRSWGGESLGSRQPQKMPAFNRLFPLASLVLIYXVSVCFPVWGEVPLENGGRARANPMKLRCISCMKREEVEATTVVEWFYRPEGGKDFLIYEYRNGHQEVESPFQGRLQWNGSKDLQDVSITVLNVTLNDSGLYTCNVSREFEFEAHRPFVKTTRLIPLRVTEEAGEDFTSVVSEIMMYILLVFLTLWLLIEMIYCYRQVSKAEEAAQENAPGNSLEGGSQGLQINSTQDGLVTGQQDVGSHRAREHMPDFEEPPSAK

SEQ ID NO: 52937 - protein, 84 aa, Homo sapiens
  misc_feature (1)...(84): Xaa = X or * as defined in Table 2
VRVSWEYFCAPGPAGSPAGPGRGEEKQRLGLLIRDARSPAPPGPPVGSVRGPKPAPAGRVRAKGRRAXGAACSLAAGAWVEPGI

SEQ ID NO: 52938 - protein, 679 aa, Homo sapiens
  DOMAIN (15)..(312): Plexin repeat domain identified by PFam, accession name Plexin_repeat, E-value=3.1e-37, PFam score of 137.1
  misc_feature (1)...(679): Xaa = X or * as defined in Table 2
SVKNYTKCHVRNEQICNKLTSCKSCSLNLNCQWDQRQQECQALPAHLCGEGWSHIGDACLRVNSSRENYDNAKLYCYNLSGNLASLTTSKEVEFVLDEIQKYTQQKVSPWVGLRKINISYWGWEDMSPFTNTTLQWLPGEPNDSGFCAYLERAAVAGLKANPCTSMANGLVCEKPVVSPNQNARPCKKPCSLRTSCSNCTSNGMECMWCSSTKRCVDSNAYIISFPYGQCLEWQTATCSPQNCSGLRTCGQCLEQPGCGWCNDPSNTGRGHCIEGSSRGPMKLIGMHHNEMVLDTNLCPKEKNYEWSFIQCPACQCNGHSTCINNNVCEQCKNLTTGKQCQDCMPGYYGDPTNGGQCTACTCSGHANICHLHTGKCFCTTKGIKGDQCQLCDSENRYVGNPLRGTCYYKTLIDYQFTFSLLQEDDRHHTAIYFIVNPKQSNKNLHISINASNNFNLNITWPCXSTAGTISGEETYIVSKNNILEYRDSFSYEKFNFRSNPNITFYVYVSNFSWPIKIQIAFSQHNTIMDLVQFFVTFFSCFLSLLLEAAVVWKIKQTCWASRRREQLLRERQQMASRPFASVDVALEVGAEQTEFLRGPLEGAPKPIAIEPCAGNRAAVLTVFLCLPRGSSGAPPPGQSGLAIASALIDISQQKASDSKDKTSGVRNRKHLSTRQGTCV

SEQ ID NO: 52939 - protein, 37 aa, Homo sapiens
  misc_feature (1)...(37): Xaa = X or * as defined in Table 2
EMGVHTVSVKYPWAARHRQPLPVHRGATWVKGGAHKX

SEQ ID NO: 52940 - protein, 28 aa, Homo sapiens
AASLPVDFAIDSRDAGEGLLAVVKCLQK

SEQ ID NO: 52941 - protein, 134 aa, Homo sapiens
  DOMAIN (1)..(73): Filamin/ABP280 repeat domain identified by PFam, accession name Filamin, E-value=6.4e-10, PFam score of 46.4
TVGSICDLNLKIPEINSSDMSAHVTSPSGRVTEAEIVPMGKNSHCVRFVPQEMGVHTVSVKYRGQHVTGSPFQFTVGPLGEGGLHEACRQPAIQRHIRRQGEGRLCAGCEVGGGTHPWQPFSCHSALKQFSQIL

SEQ ID NO: 52942 - protein, 68 aa, Homo sapiens
  misc_feature (1)...(68): Xaa = X or * as defined in Table 2
NPEMRCREFCLPSCRPELALEXGXSVRDVAXAQMCSVVWAGRPLGFAAXSXGSGHSCGRCSIWGECWG

SEQ ID NO: 52943 - protein, 99 aa, Homo sapiens
  misc_feature (1)...(99): Xaa = X or * as defined in Table 2
HTLQPFISMGSLTKMFKVISEGPMDXRPHPKVRPMTXHSTPAPANFMGHFFWKIMICTDRTEVATLVAGVVSGASVGGKSPPYRKWNSPEPDVKGPRVL

SEQ ID NO: 52944 - protein, 126 aa, Homo sapiens
KVRAWGPGLHGGIVGRSADFVVESIGSEVGSLGKWTQLTSIFWRTEDYRAFRAVSRWMLGPCLSSIPLASWPPGHPKPSLRAAGHLQLPLIPALIHSGDLEGRNLMWVLCLKQCLERSKHLAYSVD

SEQ ID NO: 52945 - protein, 159 aa, Homo sapiens
HMPSGETAPLRIVDTGTGTGTVAYAPTELGLHEMHIKYMASHILESPLRFYVTTPTVPSVSAYGPGLVYGVANNTATFTIVTEDAGEGGLDLAIEGPSKAEEPRPRLSRAPGVDGAGASPGLGEDTGPQAPGLQVLTERIPGPSAPTPEFLSVGVSAVC

SEQ ID NO: 52946 - protein, 196 aa, Homo sapiens
  DOMAIN (18)..(29): Actinin-type actin-binding domain proteins domain identified by eMATRIX, accession number BL00019A, p-value=3.475e-13, raw score of 12.56
  DOMAIN (16)..(118): Calponin homology (CH) domain identified by PFam, accession name CH, E-value=1.4e-12, PFam score of 55.2
MPVTEKDLAEDAPWKKIQQNTFTRWCNEHLKCVNKRIGNLQTDLSDGLRLIALLEVLSQKRMYRKYHQRPTFRQMQLENVSVALEFLDRESIKLVSIGEFSGRAQAPTVVPTRPRACTPAEGEDFPQRAPTSEIRGSRPQGAFGMEVKYRQGSWQLKYSVIEEDTGDYGTIEALSAFPLTFNHSTFQAGDIWLQSQ

SEQ ID NO: 52947 - protein, 78 aa, Homo sapiens
  DOMAIN (1)..(69): Filamin/ABP280 repeat domain identified by PFam, accession name Filamin, E-value=7e-07, PFam score of 36.3
INGAHFTFFSTLSRGAGIGGLGITVEGPSESKINCRDNKDGSCSAEYIPFAPGDYDVNITYGGAHIPGELFLREDPRE

SEQ ID NO: 52948 - protein, 736 aa, Homo sapiens
  DOMAIN (6)..(42): Actinin-type actin-binding domain proteins domain identified by eMATRIX, accession number BL00019C, p-value=8.895e-23, raw score of 14.66
  DOMAIN (54)..(157): Calponin homology (CH) domain identified by PFam, accession name CH, E-value=9.4e-28, PFam score of 105.6
PKGMTKPVLLSPDSKAIVDGNLKLILGLVWTLILHYSISMPVWEDEGDDDAKKQTPKQRLLGWIQNKIPYLPITNFNQNWQDGKALGALVDSCAPGLCPDWESWDPQKPVDNAREAMQQADDWLGVPQVITPEEIIHPDVDEHSVMTYLSQFPKAKLKPGAPLKPKLNPKKARAYGRGIEPTGNMVKQPAKFTVDTISAGQGDVMVFVEDPEGNKEEAQVTPDSDKNKTYSVEYLPKVTGLHKSIREDRNGRSQKTVHTEGDMNMNIKKIVKQATVLTFTTALLAGGATQAFAKENNQKAYKETYGVSHITRHDMLQIPKQQQNEKYQVPQFDQSTIKNIESAKGLDVWDSWPLQNADGTVAEYNGYHVVFALAGSPKDADDTSIYMFYQKVGDNSIDSWKNAGRVFKDSDKFDANDPILKDQTQEWSGSATFTSDGKIRLFYTDYSGKHYGKQSLTTAQVNVSKSDDTLKINGVEDHKTIFDGDGKTYQNVQQFIDEGNYTSGDNHTLRDPHYVEDKGHKYLVFEANTGTENGYQGEESLFNKAYYGGGTNFFRKESQKLQQSAKKRDAELANGALGIIELNNDYTLKKVMKPLITSNTVTDEIERANVFKMNGKWYLFTDSRGSKMTIDGINSNDIYMLGYVSNSLTGPYKPLNKTGLVLQMGLDPNDVTFTYSHFAVPQAKGNNVVITSYMTNRGFFEDKKATFAPSFLMNIKGNKTSVVKNSILEQGQLTVN

SEQ ID NO: 52949 - protein, 2122 aa, Homo sapiens
  DOMAIN (91)..(127): Actinin-type actin-binding domain proteins domain identified by eMATRIX, accession number BL00019C, p-value=4.800e-30, raw score of 14.66
  DOMAIN (251)..(2008): Filamin/ABP280 repeat domain identified by PFam, accession name Filamin, E-value=0, PFam score of 1738.9
MPVTEKDLAEDAPWKKIQQNTFTRWCNEHLKCVNKRIGNLQTDLSDGLRLIALLEVLSQKRMYRKYHQRPTFRQMQLENVSVALEFLDRESIKLVSIDSKAIVDGNLKLILGLVWTLILHYSISMPVWEDEGDDDAKKQTPKQRLLGWIQNKIPYLPITNFNQNWQDGKALGALVDSCAPGLCPDWESWDPQKPVDNAREAMQQADDWLGVPQVITPEEIIHPDVDEHSVMTYLSQFPKAKLKPGAPLKPKLNPKKARAYGRGIEPTGNMVKQPAKFTVDTISAGQGDVMVFVEDPEGNKEEAQVTPDSDKNKTYSVEYLPKVTGLHKVTVLFAGQHISKSPFEVSVDKAQGDASKVTAKGPGLEAVGNIANKPTYFDIYTAGAGVGDIGVEVEDPQGKNTVELLVEDKGNQVYRCVYKPMQPGPHVVKIFFAGDTIPKSPFVVQVGEACNPNACRASGRGLQPKGVRIRETTDFKVDTKAAGSGELGVTMKGPKGLEELVKQKDFLDGVYAFEYYPSTPGRYSIAITWGGHHIPKSPFEVQVGPEAGMQKVRAWGPGLHGGIVGRSADFVVESIGSEVGSLGFAIEGPSQAKIEYNDQNDGSCDVKYWPKEPGEYAVHIMCDDEDIKDSPYMAFIHPATGGYNPDLVRAYGPGLEKSGCIVNNLAEFTVDPKDAGKAPLKIFAQDGEGQRIDIQMKNRMDGTYACSYTPVKAIKHTIAVVWGGVNIPHSPYRVNIGQGSHPQKVKVFGPGVERSGLKANEPTHFTVDCTEAGEGDVSVGIKCDARVLSEDEEDVDFDIIHNANDTFTVKYVPPAAGRYTIKVLFASQEIPASPFRVKVDPSHDASKVKAEGPGLSKAGVENGKPTHFTVYTKGAGKAPLNVQFNSPLPGDAVKDLDIIDNYDYSHTVKYTPTQQGNMQVLVTYGGDPIPKSPFTVGVAAPLDLSKIKLNGLENRVEVGKDQEFTVDTRGAGGQGKLDVTILSPSRKVVPCLVTPVTGRENSTAKFIPREEGLYAVDVTYDGHPVPGSPYTVEASLPPDPSKVKAHGPGLEGGLVGKPAEFTIDTKGAGTGGLGLTVEADIEMPFDPSKVVASGPGLEHGKVGEAGLLSVDCSEAGPGALGLEAVSDSVTKAEVSIQNNKDGTYAVTYVPLTAGMYTLTMKDGGELVPHFPARVKVGGDHIKAHIANPSGASTECFVTDNADGTYQVAVTEGCQPSRVQAQGPGLKEAFTNKPNVFTVVTRGAGIGGLGITVEGPSESKINCRDNKDGSCSAEYIPFAPGDYDVNITYGGAHIPGSPFRVPVKDVVDPSKVKIAGPGLGSGVRARVLQSFTVDSSKAGLAPLEVRVLGPRGLVEPVNVVDNGDGTHTVTYTPSQEGPYMVSVKYADEEIPRSPFKVKVLPTYDASKVTASGPGLSSYGVPASLPVDFAIDARDAGEGLLAVQITDQEGKPKRAIVHDNKDGTYAVTYIPDKTGRYMIGVTYGGDDIPLSPYRIRATQTGDASKCLATGPGIASTVKTGEEVGFVVDAKTAGKGKVTCTVLTPDGTEAEADVIENEDGTYDIFYTAAKPGTYVIYVRFGGVDIPNSPFTVMATDGEVTAVEEAPVNACPPGFRPWVTEEAYVPVSDMNGLGFKPFDLVIPFAVRKGEITGEVHMPSGKTATPEIVDNKDGTVTVRYAPTEVGLHEMHIKYMGSHIPESPLQFYVNYPNSGSVSAYGPGLVYGVANKTATFTIVTEDAGEGGLDLAIEGPSKAEISCIDNKDGTCTVTYLPTLPGDYSILVKYNDKHIPGSPFTAKITDDSRRCSQVKLGSAADFLLDIRLPNNHIGISFIPREVGEHLVSIKKNGNHVANSPVSIMVVQSEIGDAGYGGISLAGEGPSKVDIQTEDLEDGTCKVSYFPTVPGVYIVSTKFADEHVPGSPFTVKISGEGRVKESITRTSRAPSVATVGSICDLNLKIPEINSSDMSAHVTSPSGRVTEAEIVPMGKNSHCVRFVPQEMGVHTVSVKLPLNGAKGKIDAKVHSPSGAVEECHVSELEPDKYAVRFIPHENGVHTIDVKVQWEARWFETPSKCALGSLGQAGNPALVSAYGTGLEGGTTGIQSEFFINTTRAGPGTLSVTIEGPSK

SEQ ID NO: 52950 - protein, 173 aa, Homo sapiens
MGQDGHDRGAKVIASAYSDLGFDVDLSPMFSTPEEIARLAVENDVHVVGASSLAAGHKTLIPELVEALKKWGREDICVVAGGVIPPQDYAFLQERGVAAIYGPASIMINEATLAESIRRLRQGERATLAQAMTLVESRHPRHQALSTQLLDAIMPYCGNTLRLGVTGTPGAGK

SEQ ID NO: 52951 - protein, 85 aa, Homo sapiens
ILWLGFLEEVPFSWWLIFRPGANARVVDQHIQASVLLEQKVAKCMDALRVIDVQLVEARNQALSLQLLHCRKAPCLVPCSEHHIP

SEQ ID NO: 52952 - protein, 277 aa, Homo sapiens
  DOMAIN (82)..(101): Phosphoribulokinase proteins domain identified by eMATRIX, accession number BL00567A, p-value=5.500e-09, raw score of 10.66
  DOMAIN (84)..(114): Phosphoribulokinase domain identified by PFam, accession name PRK, E-value=0.0089, PFam score of 13.2
SRNWYEALNNTWGREDICVVDGWQSFRRQDYAFLQERGSGGDLWSSTLAQAMTLVESRHPRHQALSTQLLDAIMPYCGNTLRLGVTGTPGAGKSTFLEAFGMLLIREGLKVAVIAVDPSSPVTGGSILGDKTRMNDLARAEAAFIRPVPSSGHLGGASQRARELMLLCEAAGYDVVIVETVGVGQSETEVARMVDCFISLQIAGGADDLQGIKKGLMEVADLIVINKDDGDNHTNVAIARHMYESALHILRRPPMHRVPRNPKVNLLPGTAMANLLS

SEQ ID NO: 52953 - protein, 369 aa, Homo sapiens
MKGASRVVPLRADTAGAGVKVYNHPYRDIKVQAITIEKAVGFSFGFAASICLTYVLLQKDEHRCTKVADTTLSYTNCTTDGVPIARDVNLTALQMLIRDDYQSGDTGRSGNGRTDVAVKAHVNDQFGNPPFRHAPGLHAGFIPENATASDRAAGSTAITATLIPLESTTAKGLKKGTFPRAGGAGTPSRRVLPQYGIMASSSAYLVPDDAGDGFPPASGLGECGTLTLTASTIPGSAFYDRQPAGDLFSSTGHQRRSRTRALNSTPTPPNNERPTQPATQPPQTRAKQTPYRTPMHRTTTPPRTTGHNPTATQKRRHTTHPRRPAPRHAIAGPSSLKIRCRYTENTKEDGIKNLQSSSTAGVVAMSTLA

SEQ ID NO: 52954 - protein, 395 aa, Homo sapiens
  DOMAIN (237)..(249): 4Fe-4S ferredoxins iron-sulfur binding region proteins. domain identified by eMATRIX, accession number BL00198, p-value= 5.263e-12, raw score of 10.43
  DOMAIN (230)..(290): 4Fe-4S binding domain identified by PFam, accession name fer4, E-value=4.5e-05, PFam score of 30.3
MRTGILAPDRLQEQTSNPKRPHRPSEGSGLLLQDRKRHPKYCECPSCGSGKGRPSSPKHTPPLEKLKVCLREKFPTLLGTESSYICGQNLQRFYEDVFMGRTCFLREEGDYEDFSCQVYGVGLAVTSAIGAMLLEAEKGGLLEVISSRSESLQKDLKRKNRGGGGGRGGGGEEEEEEEGEEEEGGEGEEESREDRECWLGALNIFGCVCENALCVGACPVGALTMGEQVVQTNSARCIGCQSCVSACPFGMITIQSLPGDTRQQIVKCDLCEQREEGPACVESCPTQALQLLTERELRRVRQQRIVVSEISALKGAENLLDCPTTRVKCDQCGSNDHRTNIQLLPFACKDAAYDQCHKAQHNTGNDITSQNDEHGTHQASHSVNKIIEIQLRDVT

SEQ ID NO: 52955 - protein, 1003 aa, Homo sapiens
  DOMAIN (911)..(948): 3 kw RESISTANCE BENOMYL YLL028W CYCLOHEXIMIDE domain identified by eMATRIX, accession number DM00973A, p-value=2.800e- 17, raw score of 21.17
  DOMAIN (159)..(367): Aldehyde oxidase and xanthine dehydroge domain identified by PFam, accession name Ald_Xan_dh_C, E-value=1.2e-69, PFam score of 231.8
MGEPGPDGRRRPRPVAGSEFELPADVLIMAFGFQAHAMPWLQGSGIKLDKWGLIQTGDVGYLPTQTHLKKVFAGGDAVHGADLVQRLDSISAPVMCHQCENAPCVGACPVGALTMGEQVVQTNSARCIGCQSCVSACPFGMITIQSLPGDTRQQIVKCNRCALEEILRQGREMIQWSSPKPQNGDWHIGRGVAIIMQKSGIPDIDQANCMIKLESDGTFIVHSGGADIGTGLDTVVTKLAAEVLHCPPQDVHVISGDTDHALFDKGAYASSGTCFSGNAARLAAENLREKILFHGAQMLGEPVADVQLATPGVVRGKKGEVSFGDIAHKGETGTGFGSLVGTGSYITPDFAFPYGANFAEVAVNTRTEAELGHVGNETVYEEALAGYHYTDPDQAAEFVERTGCDSLAVAIGNQHGVYTSEPQLNFEVVKRVRDAVSVPLVLHGASGISDADIKTAISLGIAKINIHTELCQAAMVAVKENQDQPFLHLEREVRTLTLAPIVTRGYESSKRDVRIEGTGILGGMNYRVSEGPLQGMNFFLAADKGREKRDGSTLGDRLNYWDVKMSIQYDFMLKIEDTNVFRLLLLGSLFSLSARACTECEVDWSTITASNLPFRFQQAPGPRNSLGRYKFNMPSSEAIYLHDTPNHNLFKRDTRALSSGCVRVNKASDLANMLLQDAGWNDKRISDALKQGDTRYVNIRQSIPVNLYYLTAFVGADGPAGSELPHRASIRVWYRSHALLLAPSLREDLSEQFAKGVQLHNEKDLTKPAVLEVITPTQVRLTISEGRYHQVKRMFAAVGNHVVELHRERIGGITLDADLAPGEYRPLTEEEIASVEPVVTTRQHSSFAIVFILGLLAMLMPLSIDMYLPALPVISAQFGVPAGSTQMTLSTYILGFALGQLIYGPMADSFGRKPVVLGGTLVFAAAAVACALANTIDQLIVMRFFHGLAAAAASVVINALMRDIYPKEEFSRMMSFVMLVTTIARDPLELPDSIYSYFLFFLI

SEQ ID NO: 52956 - protein, 167 aa, Homo sapiens
  DOMAIN (91)..(103): 4Fe-4S ferredoxins iron-sulfur binding region proteins. domain identified by eMATRIX, accession number BL00198, p-value= 5.263e-12, raw score of 10.43
  DOMAIN (55)..(146): 4Fe-4S binding domain identified by PFam, accession name fer4, E-value=0.00015, PFam score of 27.3
  misc_feature (1)...(167): Xaa = X or * as defined in Table 2
YEGIVMKPLIIVNPADCIGCRTCEVACVVAHPSEQELNADVFLPRLKVQRLDSISAPVMCHQCENAPCVGACPVGALTMGEQVVQTNSARCIGCQSCVSACPFGMITIQSLPGDTRQQIVKCDLCEQRXEGPACVESCPTQALQLLIERELRRVRQQRIVVTGENPL

SEQ ID NO: 52957 - protein, 46 aa, Homo sapiens
YPHADSPECWLSSSSERGKSRLRPSRPATASPSPVQRQKRRTHSGP

SEQ ID NO: 52958 - protein, 746 aa, Homo sapiens
  DOMAIN (506)..(527): RHS PROTEIN SIGNATURE domain identified by eMATRIX, accession number PR00394D, p-value=1.090e-28, raw score of 6.56
  DOMAIN (496)..(739): Domain of unknown function 2 domain identified by PFam, accession name DUF2, E-value=5e-08, PFam score of 23.7
MRSDPDTSVNEIETKLSALLGSETTGEILFDLLCANGPEWNRFVTLEMKYGRIMLDTAKIIDEQDVPTHILSKLTFTLRNHPEGVVMKNFEVLQPLQNSLSGLPLWVSERILQQINQLTHYEPVIGIMGKTGAGKSSLCNALFAGEVSPVSDVAACTRDPLRFRLQIGEHFMTIVDLPGVGESGVRDTEYAALYREQLPRLDLILWLIKADDRALATDEHFYRQVIGEAYRHKMLFVISQSDKAEPTSGGNILSTEQKQNISRKICLLHELFQPVHPVCAVSVRLHPVVALLQQFRTDDERTHRYHYDSQHRLVDYTRTQYEEPLVESRYLYDPLGRRVAKRVWRRERDLTGWMSLSRKPQVTWYGWDGDRLTTIQNDRSRIQTIYQPGSFTPLIRVETATGELAKTQRRSLADALQQSGGEDGGSVVFPPVLVQMLDRLESEILADRVSEESRRWLASCGLTVEQMQNQMDPTEGTTAWYAEYDEWGNLLNEENPHQLQQLIRLPGQQYDEESGLYYNRHRYYDPLQGRYITQDPIGLKGGWNFYQYPLNPISDIDPLGLSMWEVARQMNAIASKLPEGFHIGINFSASHIISPTFVDECLNFRDSFTRRDLNLVLEVTERDLLNVDESLVQRLNILHENGFVIALDDFGTGYSGLSYLHDLHIDYIKIDHSFVGRVNADPESTRILDCVLDLARKLSISIVAEGVETKEQLDYLNQNYITFQQGYYFYKPVTYIDLVKIILSKP

SEQ ID NO: 52959 - protein, 482 aa, Homo sapiens
  DOMAIN (60)..(73): PROTEIN ZINC-FINGER METAL-BINDI domain identified by eMATRIX, accession number PD00066, p-value=8.200e-16, raw score of 13.92
  DOMAIN (14)..(92): Zinc finger, C2H2 type domain identified by PFam, accession name zf-C2H2, E-value=1.7e-24, PFam score of 94.8
  misc_feature (1)...(482): Xaa = X or * as defined in Table 2
MALTSGVHTGEKPYKCAQCEEAFSRKSELIIHQIIHTGEKPYECTECGKTFSRKSQLIIHQRTHTGEKPYKCTKCGKSFCQQSHLIGHQRIHTGEQPYLGLSVAERPKEYEDDRALKMAAPCGNSSREQPCCFLNKASEDAERAKPPSXEPGRLRTPXVAQPHXVPHFMATWVRKHPVHDRQFRLHGQIRELNWDVVRPEQFTGVATNCSGITYPQGGWLCPAELTRNVLELAQQQGLQIYYQYQLQNLSRKDDCWLLNFAGDQQATHSVVVLANGHQISRFSQTSTLPVYSVAGQVSHIPTTPELAELKQVLCYDGYLTPQNPANQHHCIGASYHRGSEDTAYSEDDQQQNRQRLIDCFPQAQWAKEVDVSDKEARCGVRCATRDHLPMVGNVPDYEATLVEYASLAEQKDEAVSAPVFDDLFMFAALGSRGLCSAPLCAEILAAQMSDEPIPMDASTLAALNPNRLWVRKLLKGKAVKAG

SEQ ID NO: 52960 - protein, 238 aa, Homo sapiens
  DOMAIN (96)..(117): RHS PROTEIN SIGNATURE domain identified by eMATRIX, accession number PR00394D, p-value=1.090e-28, raw score of 6.56
NHFLSVFSFLKCAYQASHWGHFQQTITFRHVESGFVELHHIPWDFVVTLYHCDHRGLPLALISTEGTTAWYAEYDEWGNLLNEENPHQLQQLIRLPGQQYDEESGLYYNRHRYYDPLQGRYITQDPIGAHIPRTSRLVIGIRPGTGDIVGPCQIARGLGITRTPQTFVEQIVHAAGQTDILRHIPGRAQANNAVRTNFFGFRSNRWLTFIVVLLRLLLAVPGEGRLHRQIFPCLPAQR

SEQ ID NO: 52961 - protein, 389 aa, Homo sapiens
  DOMAIN (305)..(326): RHS PROTEIN SIGNATURE domain identified by eMATRIX, accession number PR00394D, p-value=1.090e-28, raw score of 6.56
RRSHHAANLDIRIRMPQTRQVTLPDPELHPDSTLSMWPDNRIARDAHYLYRYDRHGRLTEKTDLIPEGVIRTDDERTHRYHYDSQHRLVHYTRTQYEEPLVESRYLYDPLGRRVAKRVWRRERDLTGWMSLSRKPQVTWYGWDGDRLTTIQNDRTRIQTIYQPGSFTPLIRVETATGELAKTQRRSLADALQQSGGEDGGSVVFPPVLVQMLDRLESEILADRVSEESRRWLASCGLTVEQMQNQMDPVYTPARKIHLYHCDHRGLPLALISKEGTTEWCAEYDEWGNLLNEENPHQLQQLIRLPGQQYDEESGLYYNRHRYYDPLQGRYITQDPIGLKGGWNFYQYPLNPVTNTDPLGLEVFPRPFPLPIPWPKSPAQQQQWYPTFCC

SEQ ID NO: 52962 - protein, 1589 aa, Homo sapiens; identical to SEQ ID NO: 34556
  DOMAIN (58)..(90): Nickel-dependent hydrogenases large subunit proteins domain identified by eMATRIX, accession number BL00507D, p-value=8.297e- 26, raw score of 14.28
  DOMAIN (610)..(794): Bacterial type II secretion system prote domain identified by PFam, accession name GSPII_E, E-value=1.7e-121, PFam score of 410.8

SEQ ID NO: 52963 - protein, 418 aa, Homo sapiens
  DOMAIN (225)..(246): RHS PROTEIN SIGNATURE domain identified by eMATRIX, accession number PR00394D, p-value=1.090e-28, raw score of 6.56
  misc_feature (1)...(418): Xaa = X or * as defined in Table 2
YPHADSPECWLSSSSERGKSSVTADLSRPRRLRPIPTCHGKPIACTTTKAKNAFRPIAGASATGRLANSPIIILPNAAIRQEFGITLDPEEVFTFQGVKLYEYRYFPDCVRSRNEAGILVEQILSTLFSVGEHFSLKRAPFFKVPSLRSFYAFGGLTTGVVRRNGNHGVNTPARKIHLYHCDHRGLPLALISKEGTTEWCAEYDEWGNLLNEENPHQLQQLIRLPGQQYDEESGLYYNRHRYYDPLQGRYITQDPIGLKGGWNFYQYPLNPVQYIDSMGLASKYGHLNNGGYGARPNKPPTPDPSKLPDIAKQLRLPYPIDQASSAHNVFKTFFRALSPYDYTLYCRKWVKPNLTCTPQDDSQYPGMDTKTASDYLPQTNWPVPSSIVSCTTGVVPXVVCQWVFAWPPDISHRRTGKW

SEQ ID NO: 52964 - protein, 163 aa, Homo sapiens
  DOMAIN (99)..(136): Purine and other phosphorylases family 1 proteins domain identified by eMATRIX, accession number BL01232E, p-value=8.435e- 34, raw score of 24.97
  DOMAIN (1)..(157): Phosphorylase family domain identified by PFam, accession name PNP_UDP_1, E-value=2.4e-37, PFam score of 137.5
RITDFGVKKIIRVGSCGAVLPHVKLRDVVIGMGACTDSKVNRIRFKGQAFGGIADFAMGRTAVDPGKALGINARVGNLVSADLFYSPDGEMFDVMEKYGILGVEMEAAGIYGVAAEFGAKALTICTVSDHIRTHEQTTAAERQTTFNDMIKIALESVLLGDKE

SEQ ID NO: 52965 - protein, 115 aa, Homo sapiens
  misc_feature (1)...(115): Xaa = X or * as defined in Table 2
HRRRIVIDDTGIFRPRNTAQQLRQRPIAMSASGVVQIILEGHWRTHSLRNGFHRGFRLXSSPKVGMQHGSRQVDHRTQRALRFFRQPGIDFLRPVFTPRRQRLAATNHFSRFVEH

SEQ ID NO: 52966 - protein, 775 aa, Homo sapiens
  DOMAIN (214)..(251): Purine and other phosphorylases family 1 proteins domain identified by eMATRIX, accession number BL01232E, p-value=8.435e- 34, raw score of 24.97
  DOMAIN (48)..(274): Phosphorylase family domain identified by PFam, accession name PNP_UDP_1, E-value=6.3e-80, PFam score of 278.9
  misc_feature (1)...(775): Xaa = X or * as defined in Table 2
GTLPGCGAMHTCPSGPATHLVRRRIVRLPACVVTRANVPTPSRPVNATIGAFHSGXMASQGRRLSAQYPWSPFQYAARPVPTVPGRLVFTGTSKAPKISVMGPGMGIPSCSISAKELITDFGVKKIIRVGSCGAVLPHVKLRDVVIGMGACTDSKVTRIRFKDHAFAAIADFDMVRNAVDAAKALGIDARVGNLFSADLFYSPDGEMFDVMEKYGILGVEMEAAGIYGVAAEFGAKALTICTVSDHIRTHEQTTAAESQTTFNDMIKIALESVLLGDKEEDRVIRFGKARATRYALLRPYRGIERIPVWRVDDTGKAHKFADIRLCWPQGSCLDVAKAREVIRGSQPLPAWCENWAQEVDARLTKEAQSALRPVINLTGTVLHTNLGRALQAEAAVEAVAQAMRSPVTLEYDLDDAGRGHRDRALAQLLCRITGAEDACIVNNNAAAVLLMLAATASGKEVVVSRGELVEIGGAFRIPDVMRQAGCTLHEVGTTNRTHANDYRQADFQFDDFVMAFTQNINGPTQNTRALHGGHKRPDFLPLLGAFHGAIDILAPGGLHGYSLPSSFFHALALSAAFPGKRCKLSVHLPFWGLKDGGPLLTAPLGGALVGIVGGVGGSNLTFPFHTNFLNVRFVIRRISHRHHHFYRIAKLLMNGAQGSNMLIAAVAGVPHQNGHFPFTVADRFAIVLSEGSIRVGKNSSSPGTFGCVLAKKLKSPRVANTQPTRFCARRRSGDNKLISQAHWKAPYGLPPQICQKNWLGLMPPLNRASHSVGLN

SEQ ID NO: 52967 - protein, 234 aa, Homo sapiens
  DOMAIN (68)..(86): METHIONINE--TRNA LIGASE domain identified by eMATRIX, accession number DM01195B, p-value=1.581e-18, raw score of 11.30
  DOMAIN (14)..(108): Putative tRNA binding domain identified by PFam, accession name tRNA_bind, E-value=6e-44, PFam score of 159.4
METVAYADFARLEMRVGKIVEVKRHENADKLYIVQVDVGQKTLQTVTSLVPYYSEEELMGKTVVVLCNLQKAKMRGETSECMLLCAETDDGSESVLLTPERMMPAGIGWRRRIAIRFDITPLRHLLACRQPLRAAFDHQFTLFNDMLADICHAFDKGAGTGKKIPMCRGRDAVGDIPWGIQLAAVYALCDLSPSNPAEISKILEAWRREASKSVPSAIVSCLEEVSALSTEELG

SEQ ID NO: 52968 - protein, 148 aa, Homo sapiens
RCHLANASPAAGSHAPSPDSLSKIRQEVGPPLPPLLAPLIATPPRTSQPLSPLISSSSPSSPASPVGQVSPFRETPVPPAMSPWPEDPRRASPPDPSPSPSAASASERVVPSPLQFCAATPKHALPVPGRLPPCASGHAMPCWRAKIK

SEQ ID NO: 52969 - protein, 323 aa, Homo sapiens
  misc_feature (1)...(323): Xaa = X or * as defined in Table 2
PVVQRARNASSCQPFSTSVWAIPSISATSVPMCGATHSILSPKKSTVSDRIGSMQISFFPLSRSAEKXESPCSSDAFHAIFSVLSGLALHSTTTSLCSSTSGQLVCCXXTSLPPTTYGMIACAAPVEXSPRCPVXPPASAIXRCNNVEALCSTPFERQPXEPAKSMPDHKPHECVYVVGEXDPAPHPNSREQIHPAHECLAGFPVTQESLFAPLEIVPAYCCEPGREPRSARSFPFAPRELTXVQLELGTGLXRETLDLVVSAGWAXARRISGAVTATPETGTLCQLDSGAECHYRETGVELPXRSPRPVGHGSSRHSRRWRT

SEQ ID NO: 52970 - protein, 1394 aa, Homo sapiens
  misc_feature (1)...(1394): Xaa = X or * as defined in Table 2
PENSSHRPKPIIPMIASTLINANQNSVSPYKRTFTRLTALMIIKKAAAQIHVGTSGNQYWRKLDFNSPGGSSPVENSDCSTNSRLSFSPENILIQNQDIVREAAVQGDGQKQRQPQATDLDSSGTHGSEMLPATEVTVSGGFSVEETSCGDTGRSGGEALAVANDSTSTPQNANGLWKLKSTTPGGALPECFGTTDTTFSSAFCRKHGETQDTSQSSLPGTLHCYTGIREGGDDTEVESEAFSCSEGSEQQDAPDDSQKNLGDTDAAVAEVRPSLEVGYLTSALQDFNISTFSELDRLSTSEVVMFLESCQLGDYSSGDSVSECSSKGTLSKEMNKELKASEIGEKYRKQPCEEETLGTCEEWIESEEDDYSLKNTSQLTQCSLETLSEVLTKIRQELQTNSEDCNGKDTGSLLLLNVNNNMTTENLKEKSPFRETTGSSSHASEPTPQAAALDTEGSSPISGMPQNENPQSRPEARSDAGRQTDGGEEDLPEPVEPSALCSDSVMEPSIEQSSNCEAETTFQCQIATVTSEVINVLINKDQNLVIEKGDNWTIISGVAVLPHVDQVTLCDIPGDIPISQDQGELEAGCIPVTSAEKSPEASHTGPAFQEAPCGNNLSCPQEDVSSSGQSTNFDKSRLRNRPVKPSIWISSQIYDQNFETQIVASDHTYYNSKLEPSGKNKNRSKISNKDQSNKPVKTSASSRVETHQSEVAQSFSGEKANTKTQRSQTQTILANADTSTPTDCSPDTLSKIRQEVGPPLPPLLAPLIATPPRTSQPLSPLISSSSPSSPASPVGQVSPFRETPVPPAMSPWPEDPRRASPPDPSPSPSAASASERVVPSPLQFCAATPKHALPVPGRLPPCASGHAAVGGPQENSVKILDTMYPELSARARTLNILKGNIQLTRGPPADCKNLPGPASAMIGFKTITSAATAFVKTGSSSGGDCNQDKSRDLGTQQDSSGKRTLSTSTLRSAKRLRLDTGSPEPETRGVTAEGIHKNLPGNLPPAEVATTNEERSCSSPAVSAVSQLPLSPKETVESHDKAIANALKKIAEFSFDLLPVIRSHVYVGNISKKPVMRDQEKEVVYEFSTTKKHLAECLLHSILSELKIQKISMDHNYIHALCRVYVGICRQLGDLERARLFCYSLLKEDFPESEKLTLFIANMWHDIFLSQSVINKAMQLVARQRAKGEDLNCLRAFLNWEKNAPGDDGFMVSKLLLTIQVCPKTXFQPSEKFGEDLSDNTWEYIFAIDLLCCHQKWIWTHDNIISKELWPVMDKWIKYRKGHANIAYTPDIIIASILRLIGRLGQLGLKEGFPSAVKNISSVIGMFIQHAHDEDIPWGIQLAAVYALCDLSPSNPAEISKILEAWRIEASKSVPSAIVSCLQEVSALSTEELG

SEQ ID NO: 52971 - protein, 23 aa, Homo sapiens
EYRLKTLYRKLRRHTTHVSSREI

SEQ ID NO: 52972 - protein, 103 aa, Homo sapiens
  DOMAIN (50)..(88): Ribosomal protein L34 proteins domain identified by eMATRIX, accession number BL00784, p-value=6.011e-09, raw score of 14.98
  misc_feature (1)...(103): Xaa = X or * as defined in Table 2
QKLLPNRMGHPVFVKSSQDPVLLSRIAWKDASTVTWVIEQDPVLRRRRRRTRRRRTRMRRRRGRXXSKRRRMRGRRGRRXCRRRRRRSSRSRPTRRQRNRNQV

SEQ ID NO: 52973 - protein, 113 aa, Homo sapiens
  misc_feature (1)...(113): Xaa = X or * as defined in Table 2
IGKLYWFMPPSANLALRELGIVLFLSVVGLKSGLSWIGYGALITAVPLITVGILARMLAKMNYLTMCGMLAGSMTDPPAXPRFQTNDREEQHDPQLPQREVGAWRHKPVQLAD

SEQ ID NO: 52974 - protein, 318 aa, Homo sapiens
  DOMAIN (36)..(77): Bacterial regulatory proteins gntR family proteins. domain identified by eMATRIX, accession number BL00043, p-value=8.393e-28, raw score of 22.96
  DOMAIN (18)..(77): Bacterial regulatory proteins, gntR family domain identified by PFam, accession name gntR, E-value=7.9e-28, PFam score of 95.0
  misc_feature (1)...(318): Xaa = X or * as defined in Table 2
RCYSLLSRAPHPGIYISIAERVXIRLNSANFTLNSLLPAEKKLAEEFAVSRMTIRKAIDLLVAWGLVVRRHGSGTYLVRKDVLHQTASLTGLGEVLKRQGKTVTSQVLIFEIMPAPPAIASQLRIQINEQIYFSRRVRFVEGIPLMLEDSYMPVKLFRNLSLQHLEGSKFEYIEQECGILIGGNYESLTPVLADRLLARQMKVAEHTPLLRITSLSYSESGEFLNYSVMFRNATQIQGWRSHFRRLHPKKSLTVPPERAPPVFGGLIMRKNHSQRIDSGVRERRRTAGWMKIISKRQRRRIGHGTCQHPAHGQVIHFG

SEQ ID NO: 52975 - protein, 93 aa, Homo sapiens
GDEMTTSTLQKAIDLVTKATEEDKAKNYEEALRLYQHPVEYFLHAIKYEAHSDKAKESIRAKCVQYLDRAEKLKDYLRSKEKHGKLCLKDRVT

SEQ ID NO: 52976 - protein, 82 aa, Homo sapiens
GAAAPVRSIWFQVCGPSRTNPSMMIDDLLTPCSPGDPGAMEMTWMDVPGDKLLEPVVCMVSDLTGEGRGLHRAQKIEGLGPE

SEQ ID NO: 52977 - protein, 437 aa, Homo sapiens
  DOMAIN (188)..(231): AAA-protein family proteins domain identified by eMATRIX, accession number BL00674C, p-value=2.400e-13, raw score of 22.60
  DOMAIN (159)..(358): ATPases associated with various cellular act domain identified by PFam, accession name AAA, E-value=8.7e-11, PFam score of 49.3
  misc_feature (1)...(437): Xaa = X or * as defined in Table 2
NHKAIDLVTKATEEDKAKNYEEALRLYQHAVEYFLHAIKYEAHSDKAKESIRAKCVQYLYRAEKLKDYLRSKEKHGKKPVKENQSEGKGSDSDSEGDNPEKKKLQEQLMGAVVMEKPNIRWNDVAGLEGAKEALKEAVILPIKFPHLFTGKRTPWRGILLFRPPGTGNSNRPKAGAPKATNSTFFSVSSSDVKSKRLGETEKLVXNLFELARQHKPSIIFIDEVDSLCGSRNENESQAARRIQNGSSLVQIAGGLGINNDGDSGFFGATNIPWVLDSAIRRKVXKTKFYIPLPEKACPRPDVSRLHLGSTPHNLRVATFHKLARKTEGYSGADISIIVRDSLMQPVRKVQSATHFKKVCGPSRTNPSMMIDDLLTPCSPGDPRAMEMTWMDVPGDKLLEPVVCMSDMLRSLATTRPTVNADDLLKVKKFSEDFGQES

SEQ ID NO: 52978 - protein, 172 aa, Homo sapiens
MLADFCGTTALPDNGVIDRLAGFFFPDNSGFTLVRNTDSCNLIGTDIGFRQHFYQRGALGGPDFHWVVFYPTWFWVDLLKFALRHANDIGIVIHYDRAGAGGAQLFVMFFQLISQKQTLFVFTKLLKCFIVSKLLPSGLDSKISLPCRNDRFRRVAVLYYQVTGIAGEYDVF

SEQ ID NO: 52979 - protein, 430 aa, Homo sapiens
  DOMAIN (118)..(140): Uroporphyrin-III C-methyltransferase proteins domain identified by eMATRIX, accession number BL00839D, p-value=3.935e- 11, raw score of 18.94
MVAGNNDQKAITETTEQLINDRSTIAVKWCWLVQVRACRAADTERTATNSAGRLVVYDRLVSDDIMNLSVRLSTGHLKPVASWTGKTWRQKNRAGVLYGFESGRDYSAKVIEHGMPGEMPVAIVENGTAVTQRVIDESYVSVKRVTGARRSTPKRWSNDLKLAGKTLAAIFYSEEPGNIEPVYMLEKVKIKTMPNGRSIILPWATTASNRRYLRIFAAKCELPPGSLRHVCLELTVYMARLYPVTYRPPGLVSSDNAVRPLENPRSRDGGMFAIASLLSRNGGIWRGWICYRAEARIEVKRPIHSLQRSIASSRLWPPAFWASARTSAEFVKFTLPAERPGARSCVSGRFSTAGIVLEGEFVDTGAGATLFPAMCCTFLLVAGIFHIGKPPLLPLDVLFWQTALGFSVVQWDGKQYQNLRSNTSPDADHA

SEQ ID NO: 52980 - protein, 194 aa, Homo sapiens
WSRQLSPNWQRLLMLKKTAPGVWDSKPFCRCVKVMARRCFVSILRPVLPGSSACSRVISIHNGRLSAFSHRAPMAPCRRRQTWMKSAKRIWQRYLNNNRMALITCWGIPLAVRWRRVLRRDCVPVANRWHFLACWIPGRQKRKTGRKKKLMVWTRKCWRRLTANARPSWQHSREVLQRSCLPPLKATTLMLCAC

SEQ ID NO: 52981 - protein, 118 aa, Homo sapiens
IGIFYVMTQIFSEAVSHCSGATCQQQFHAHRAANDIRCANHHGVEAEGINVVTLKQRDDTARGAGTQTRRALAQTTDVVRMETVHVFVRMNTFQHFDVINTRRYTAVEPECHRWCCRH

SEQ ID NO: 52982 - protein, 168 aa, Homo sapiens
  DOMAIN (122)..(154): Bacterial regulatory proteins araC family proteins. domain identified by eMATRIX, accession number BL00041, p-value=7.750e-19, raw score of 23.99
  DOMAIN (70)..(156): Bacterial regulatory helix-turn-helix protei domain identified by PFam, accession name HTH_AraC, E-value=1.6e-36, PFam score of 134.8
AVRLRGYRGNRRQQLGRRMESAGGFKLGMEPLNGGGRIPDLLGGQIQTASRSQALFEAIRDYIDERYASGLTRESVAQAFYISPNYLSHLFQKTGAIGFNEYLNHTRLEHAKTLLKGYDLKVKEVAHACGFVDSNYFCRLFRKNTERSPSEYRRQYHSQLTEKPTTPE

SEQ ID NO: 52983 - protein, 234 aa, Homo sapiens
  DOMAIN (194)..(207): Hexapeptide-repeat containing-transferases proteins domain identified by eMATRIX, accession number BL00101B, p-value=1.000e- 13, raw score of 8.91
  DOMAIN (175)..(210): Bacterial transferase hexapeptide domain identified by PFam, accession name hexapep, E-value=0.0024, PFam score of 24.5
  misc_feature (1)...(234): Xaa = X or * as defined in Table 2
RNEITPFRAMMIIRRMAHRFQTEEIKRISFIKRRVGNKDEINPGARWRRFHDDGITFLRLLDAGLTIPSGKTIVHPLARQRRGLVKIQFLRXLLAKLTRQPLLPLQPVTARLCLNPRLRRQRKIRMPAGTKWQRLCPLIGDRXRHRQRSAVYALSVRHNPVHHILRKNGDMYSFPITIGNNVWIESHVVINPGVTIGDNSVIGAGSIVTKDIPPNVVAAGVPCRVILEINDRDK

SEQ ID NO: 52984 - protein, 139 aa, Homo sapiens
  DOMAIN (93)..(125): Bacterial regulatory proteins araC family proteins. domain identified by eMATRIX, accession number BL00041, p-value=7.750e-19, raw score of 23.99
  DOMAIN (48)..(127): Bacterial regulatory helix-turn-helix protei domain identified by PFam, accession name HTH_AraC, E-value=0.0013, PFam score of 11.1
IRVPVLPDRRYQLSQRQSARGAGATVVPGDVLYVPAGGWNFPQWQAPATTFSVLFGKQQLGFSVVQWDGKQYQNLAKQHVARRGPRIGSFLKVKEVAHACGFVDSNYFCRLFRKNTERSPSEYRRQYHSQLTEKPTTPE

SEQ ID NO: 52985 - protein, 814 aa, Homo sapiens
  DOMAIN (581)..(629): Tetrahydrofolate dehydrogenase/cyclohydrolase proteins domain identified by eMATRIX, accession number BL00766C, p-value=1.000e- 40, raw score of 25.86
  DOMAIN (558)..(678): Tetrahydrofolate dehydrogenase/cyclohydro domain identified by PFam, accession name THF_DHG_CYH, E-value=1.1e-69, PFam score of 245.0
  misc_feature (1)...(814): Xaa = X or * as defined in Table 2
PDWQAFQSPPFPASLIIHPKPAKLPGWLCIVQWSLLAITRTPTPVRWAQQTTETVGLVVGDVSDPFFGAMVKAVEQVAYHTGNFLLIGNGYHNEQKERQAIEQLIRHRCAALVVHAKMIPDADLASLMKQMPADKQCESIPDQNNQTGTQYPRGKEPKLLRRLMHMNRKVGPRGPRRMLLRYLDVEFLSVALAVVHLGPQGTCSRLFLVARALVVAVSEMDKSLSAQAQIYFASSNGPVPDLAYQVDFPRLEIGLXFEYVDTGAETTLVPGDVLYVPAGGWNFPQWQAPATTFSVLFGKQQLGFSAVVQWDGKQYQNLAKQHVARRGPRIGSFLLQTLNEMQMQPQEQQTARLIVASLLNHCRDLLGSQIQTASRSQALFEAIRDYIDERYASALTRESVAQAFYISPNYLSHLFQKTGAIGFNENLSHTRLGHAXTLLKGYDLKVKEVAHACGFVDSNYFCRLFRKNTERSPSEYRRHRRLHDNRICQFKTPTDNPENPDRYLTFRRIDKETSSLPKKVAPSCKRLSVSRSSPKPSISIRRCMRLMLIEGRRSSFIHPDKDVDGFHPYNVGRLCQRAPRLRPCTPRGIVTLLERYNIDTFGLNAVVIGASNIVGRPMSMELLLAGCTTTVTHRFTKNLRHHVENADLLIVAVGKPGFIPGDWIKEGAIVMMSGINRGVATDASCFPLVPFANRVSGNRFVWQGREYQLQPNVEWDAHYLHGDGWLGEWQCVSHSDDSLCLVYEHRSGVYHYRVSQGVSFNGGYADGDALCHQSRGRDAAIWYRLASLFSVVAANADSGTGERLLAGAGAVAGG

SEQ ID NO: 52986 - protein, 41 aa, Homo sapiens
KAKPKKCARRFTDYCDLNKDKVISLPELKGCLGVSKEGRLV

SEQ ID NO: 52987 - protein, 155 aa, Homo sapiens
  DOMAIN (72)..(87): Thyroglobulin type-1 repeat proteins proteins domain identified by eMATRIX, accession number BL00484C, p-value=8.244e- 11, raw score of 17.01
  DOMAIN (31)..(94): Thyroglobulin type-1 repeat domain identified by PFam, accession name thyroglobulin_1, E-value=2.6e-16, PFam score of 67.6
GGRRPRIRHERDPTLGVVHRGRCKDAGQSKCRLERAQALEQAKKPQEAVFVPECGEDGSFTQVQCHTYTGYCWCVTPDGKPISGSSVQNKTPVCSGSVTDKPLSQGNSGRKDDGSKPTPTMETQPVFDGDEITAPTLWIKHLVIKDSKLNNTNIR

SEQ ID NO: 52988 - protein, 76 aa, Homo sapiens
MKAFLQDRTWNSSFLPCSCMILNFMKLFFQPYGVVLAPSKRNLSCHNPLEPGFLEKEISVPLQPFFFNGMWEGTWL

SEQ ID NO: 52989 - protein, 932 aa, Homo sapiens
  DOMAIN (788)..(833): Osteonectin domain proteins domain identified by eMATRIX, accession number BL00612E, p-value=1.478e-11, raw score of 13.12
  DOMAIN (626)..(691): Thyroglobulin type-1 repeat domain identified by PFam, accession name thyroglobulin_1, E-value=2.9e-16, PFam score of 67.4
  misc_feature (1)...(932): Xaa = X or * as defined in Table 2
MEHPPVLAVQRVALPSRSSEPELFLNPPTDEETEAHRGMYLDQGPRTKDWIPVAPGVREPSPLGPGPSSLWLLVVGGTVEEGSRKHRPTCKKDFTKSKTVDQAPTLCARHQMLNIQFLISDRDPQCNLHCSRTQPKPICASDGRSYESMCEYQRAKCRDPTLGVVHRGRCKDAGQSKCRLERAQALEQAKKPQEAVFVPECGEDGSFTQNTSCIHSSVYQIGENSSLTFLEKREESGHLQRDWFPLWFPRKARVIGRRVKEEATKKRVWEVQCHTYTGYCWCVTPDGKPISGSSVQNKTPHIQILFTKARLALWACDLCSCYPEILNNSVFESDGTVKMRLQGDQGKALGPASSAYAMGWEEEAKSPTLNAGDKDLENLLPPNAGAPKKMWKWNRXYHHPPENRDQWARWATALSLGKNEKVVGKGTQGCENCLQKGSFQLVFTSFGREHAAWHLSLLASECQSGIKKPNRGGFERCHGGRSDFQLSVHDGSKPTPTMETQPVFDGDEITAPTLWIKHLVIKDSKLNNTNIRNSVNFFHDLIKGLKEALDPGPLMVTLLPGDTAISTDIRWKCISFKFYHESDTLASSCMTVTVFSHVTLPVTGTQSLRGKEAVTTSDHEKVYSCDQERQSALEEAQQNPREGIVIPECAPGGLYKPVQCHQSTGYCWCVLVDTGRPLPGTSTRYVMPSCESDARAKTTEADDPFKDRELPGCPEGKKMEFITSLLDALTTDMVQAINSAAPTGGGRFSEPDPSHTLEERVVHWYFSQLDSNSSNDINKREMKPFKRYVKKKAKPKKCARRFTDYCDLNKDKVISLPELKGCLGVSKEGAAEKSPCGQWCAGAPGAEPMRRSSIPCRAVPPGGSLGSFPQAKXAGTNPFTGVCHGQCLSDTETSFLHNYHSFYYYLHLPTSQSPGFDKWHFPEVFLLRIYWV

SEQ ID NO: 52990 - protein, 1765 aa, Homo sapiens
  DOMAIN (503)..(524): POLYCYSTIC KIDNEY DISEASE PROTEIN SIGNATURE domain identified by eMATRIX, accession number PR00500B, p-value=6.380e-10, raw score of 7.74
  DOMAIN (303)..(492): Leucine Rich Repeat domain identified by PFam, accession name LRR, E-value=1.2e-28, PFam score of 108.7
  misc_feature (1)...(1765): Xaa = X or * as defined in Table 2
MNLNQEEIPDLPEKEFRRLVIKLIREGLEKGKAQCKEIQKMIQEVKREIFQEIESLKKKPPKIQKTLDILLKMQNALESLSDRTEQAEEINSELEDKVFKLTQSNKDKEKITRKYEQSLQEVWSYVKRPNLRIIGVPEEEENTKSLENILGGIIEENFPSFARDLDIQIPEAQRTTGKLIAKRSLLRHIVFRLSKVKMKERILRAVRQKHQATVSQKNKAGGITLPDFKLYYKATVSQKNKAGGITLPDFKLYYKATVSQKNKAGGITLPDFKLYYKATVTKTAWAGNRIVEILPEHLKEFQSLETLDLSSNNISELQTAFPALQLKYLELNRNKIKNVDGLTFQGLGALKSLKMQRNGVTKLMDGAFWGLSNMEILQLDHNNLTEITKGWLYGLLMLQELHLSQNAINRISPDAWEFCQKLSELDLTFNHLSRLDDSSFLGLSLLNTLHIGNNRVSYIADCAFRGLSSLKTLILQGNRIRSITKKAFTGLDALEHLHLNTSSLLCDCQLKWLPQWVAENNFQSFVNASCAHPQLLKGRSIFAVSPDGFVCDDFPKPQITVQPETQSAIKGSNLSFICSAASSSDSPMTFAWKKDNELLHDAEMENYAHLRAQGGEVMEYTTILRLREVEFASEGKYQCVISNHFGSSYSVKAKLTVNMLPSFTKTPMDLTIRAGAMARLECAAVGHPAPQIAWQKDGGTDFPAARERRMHVMPEDDVFFIVDVKIEDIGVYSCTAQNSAGSISANATLTVLETPSFLRPLLDRTVTKGETAVLQCIAGGSPPPKLNWTKDDSPLVVTERHFFAAGNQLLIIVDSDVSDAGKYTCEMSNTLGTERGNVRLSVIPTPTCDSPQMTAPSLDDDGWATVGVVIIAVVCCVVGTSLVWVVIIYHTRRRNEDCSITNTDETNLPADIPSYLSSQGTLADRQDGYVSSESGSHHQFVTSSGAGFFLPQHDSSGTCHIDNSSEADVEAATDLFLCPFLGSTGPMIXREMCMAQILLKHIIQVPLETALRRPHLDAYSSFGQPSDCQPRAFYLKAHSSPDLDSGGFMIALWYHGTLSPEPAFVLKARDDVGTCHSHRAGQHWLKYYLLQALAEGNVVPEPPHRVPPGAPPTGAARRELLSSNPQNGRSTDSLRSVPAKAADTQCQSVKAARREAVPCKVTGPELPKATGAYLLHQCDLDMRHGVKTDHSGALRIGGKYRAPVGQLKTISVATGLKTQLSYQKPFINPVTRRCIQSVAATALLTEESRKETFRGNLIVRKPHCKRTLEPLEKGKAGKIECLIGLASSVVYKDTLKKIVQVEISHPLVHAPYAKGITGRPTDPGDEAVPNPYTLLSQIPEKAEWFILLDLKDALFFIPVHPDSQFLFAFEDPSNSTSQLTWTVLPLAFRNGPHLFGQASTQDLSQLSYLDTLVLWHVDDLLLAACSETLCHQATQALLNFLTTCGYKVSKPKAQLCSQQVKYLGLKLPKGTRAPSEECIQPILAYPHPKTLKQLRAFLGITGFCRIWIPSILTAKGDLWLSDNHLLKYQVLLLEGPVLQLRTCATLNPATFLPDNEEKIEHNCQQVIAQTYATRGDLLEVPLTDPDLNLYTDGSSFVQKGLQKAGYAVVSDNGILESNPFTPGTSTQLAELVALTWALEFGEGKRVNINTGSKYAYLVLHAHASIWREREFLTSEGTPIKHQEAIRRLLLVVQKPEEVAVLHCWGHPKGKEREIEGNCQADIEAKRASRQDPPLEMLIERHLVWGNPLWETNPQYSAEEIEWGTS

SEQ ID NO: 52991 - protein, 296 aa, Homo sapiens
  DOMAIN (24)..(121): Immunoglobulin domain identified by PFam, accession name ig, E-value=4.3e-10, PFam score of 37.6
  misc_feature (1)...(296): Xaa = X or * as defined in Table 2
GSPFEVMPRDDVFFIVDVKIXDIGVYSCTAQNSAGSISANATLTVLETPSFLRPLLDRTVTKGETAVLQCIAGGSPPPKLNWTKDDSPLVVTERHFFAAGNQLLIIGDSDVSDAGKYTCEMSNTLGTERGNVRLSVIPTPTCDSPQMTVLHLLDDDGWGHCGLYVIIAVVCCVVGTSLVWVVIIYHTRRRNEDCSITNTDETNLPADIPSYLSSQGTLADRQDGYVSSESGSHHQFVTSSGAGFFLPQHDSSGTCHIDNSSEADVEAATDLFLCPFLGSTGPYVFEGKCVWAQNPF

SEQ ID NO: 52992 - protein, 981 aa, Homo sapiens
  DOMAIN (321)..(342): POLYCYSTIC KIDNEY DISEASE PROTEIN SIGNATURE domain identified by eMATRIX, accession number PR00500B, p-value=6.380e-10, raw score of 7.74
  DOMAIN (75)..(310): Leucine Rich Repeat domain identified by PFam, accession name LRR, E-value=2.2e-29, PFam score of 111.0
  misc_feature (1)...(981): Xaa = X or * as defined in Table 2
MSAPSLRARAAGLGLLLCAVLGRAGRSDSGGRGELGQPSGVAAERPCPTTCRCLGDLLDCSRKRLARLPEPLPSWVARLDLSHNRLSFIKASSMSHLQSLREVAGNRIVEILPEHLKEFQSLETLDLSSNNISELQTAFPALQLKYLELNRNKIKNVDGLTFQGLGALKSLKMQRNGVTKLMDGAFWGLSNMEILQLDHNNLTEITKGWLYGLLMLQELHLSQNAINRISPDAWEFCQKLSELDLTFNHLSRLDDSSFLGLSLLNTLHIGNNRVSYIADCAFRGLSSLKTLILQGNRIRSITKKAFTGLDALEHLHLNTSSLLCDCQLKWLPQWVAENNFQSFVNASCAHPQLLKGRSIFAVSPDGFVCDDFPKPQITVQPETQXKIKGSNLSFICSAASSSDSPMTFAWKKDNELLHDAEMENYAHLRAQGGEVMEYTTILRLREVEFASEGKYQCVISNHFGSSYSVKAKLTVNMLPSFTKTPMDLTIRAGAMARLECAAVGHPAPQIAWQKDGGTDFPAARERRMHVMPEDDVFFIVDVKIEDIGVYSCTAQNSAGSISANATLTVLETPSFLRPLLDRTVTKGETAVLQCIAGGSPPPKLNWTKDDSPLVVTERHFFAAGNQLLIIVDSDVSDAGKYTCEMSNTLGTERGNVRLSVIPTPTCDSPQMTAPSLDDDGWATVGVVIIAVVCCVVGTSLMWVVIIYHTRRRNEDCSITNTDETNLPADIPSYLSSQGTLADRQDGYVSSESGSHHQFVTSSGAGFFLPQHDSSGTCHIDNSSEADVEAATDLFLCPFLGSTGPMIXREMCMAQILLKHIIQVPLETALRRPHLDAYSSFGQPSDCQPRAFYLKAHSSPDLDSGGFMIALWYHGTLSPEPAFVLKARDDVGTCHSHRAGQHWLKYYLLQALSFHEECEEINPEIETQIQEIPGSRIRNTEPFKEPILPSSVNLESATPGPWTGSSPRPVGSWATQQEVSGG

SEQ ID NO: 52993 - protein, 138 aa, Homo sapiens
  DOMAIN (50)..(75): Mitochondrial energy transfer proteins domain identified by eMATRIX, accession number BL00215A, p-value=4.000e-15, raw score of 15.82
  DOMAIN (44)..(126): Mitochondrial carrier proteins domain identified by PFam, accession name mito_carr, E-value=1.3e-19, PFam score of 70.2
HFLLHSLENVEDVLYFWKHSTVLDIGECLTVPDEFSKQEKLTGMWWKQLVAGAVAGAVSRTGTAPLDRLKVFMQVHASKTNRLNILGGLRSMVLEGGIRSLWRGNGINVLKIAPESPIKFMAYEQVLKTRLTLRRTGQ

SEQ ID NO: 52994 - protein, 88 aa, Homo sapiens
  DOMAIN (29)..(54): Mitochondrial energy transfer proteins domain identified by eMATRIX, accession number BL00215A, p-value=4.000e-15, raw score of 15.82
  DOMAIN (23)..(54): Mitochondrial carrier proteins domain identified by PFam, accession name mito_carr, E-value=1.8e-07, PFam score of 28.5
VLDIGSSLTVPDEFSKQERADGMWWKQLVAGAVAGAVSRTGTAPLDRLKVFMQIKRAILGQQETLMCRSASWLAPWLVPQPNHHLPYG

SEQ ID NO: 52995 - protein, 374 aa, Homo sapiens
  DOMAIN (61)..(84): MITOCHONDRIAL CARRIER PROTEIN SIGNATURE domain identified by eMATRIX, accession number PR00926F, p-value=3.571e-18, raw score of 17.75
  DOMAIN (36)..(323): Mitochondrial carrier proteins domain identified by PFam, accession name mito_carr, E-value=6.1e-18, PFam score of 64.4
MRYRAGRWRNLARVWTAEGKNPDGAALEGIEKAGGTLKNWWLQQYSHDSADPGILVLLACGTISSTCGQIASYPLALVRTRMQAQGEGPGARPPNPSRRTPQPLETDDPTTGSLLFGHEIPVPRSWILDSYAPTIGSWDPSTQILDPRLLCPNHWTLKNWWLQQYSHDSADPGILVLLACGTISSTCGQIASYPLALVRTRMQAQGEGPGARPPNPSRRTPQPLETDDPTTGSLLFGHEIPVPRSWILDSYAPTIGSWDPSTQILDPRLLCPNHWTLKNWWLQQYSHDSADPGILVLLACGTISSTCGQIASYPLALVRTRMQAQGSRWSCHEQPYGEDHVVRNSANSHVTELGRGSCCPGQHLTAILSVEFPG

SEQ ID NO: 52996 - protein, 508 aa, Homo sapiens
  DOMAIN (421)..(444): MITOCHONDRIAL CARRIER PROTEIN SIGNATURE domain identified by eMATRIX, accession number PR00926F, p-value=3.571e-18, raw score of 17.75
  DOMAIN (223)..(505): Mitochondrial carrier proteins domain identified by PFam, accession name mito_carr, E-value=3.6e-75, PFam score of 260.6
  misc_feature (1)...(508): Xaa = X or * as defined in Table 2
RLAAAGADPAGSRGGRGSREAPTEAARCRASPPPRAGAMRGSPGDAERRQRWGRLFEELDSNKDGRVDVHELRQGLARLGGGNPDPGAQQGISSEGDADPNGGLDLEEFSRYLQEREQRLLLMFHSLDRNQDGHIDVSEIQQSFRALGISILLEQAEKNFAQAVDRDGTMTIDWQEWRDHFLLHSLENVEDVLYFWKHSTVLDIGECLTVPDEFSKQEKLTGMWWKQLAAGAVAGAVSRTGTVPLDRLKVFMQVHASKTNRLNILGGLXSMVLEGGIRSLWRGNGINVLKIAPESAIKFMAYEQIKRAIPGEXETLPVLERFVAGSLAGATAQTIIYPMEVLKTRLTLRRTGQYKGLAGLRRGGILEREGPRAFYRGYLPNVLGIIPYAGIDLAVYETLKNWWLQQYSHDSADPGILVLLACGTISSTCGQIASYPLALVRTRMQAQASIEGGPKLSMLGLLRHILSQEGMRGLYRGIAPNFMKVIPAVSISYVVYENMKQALGVTSR

SEQ ID NO: 52997 - protein, 896 aa, Homo sapiens
  DOMAIN (224)..(251): Protamine P1 proteins domain identified by eMATRIX, accession number BL00048, p-value=3.208e-17, raw score of 6.39
  DOMAIN (785)..(826): B-box zinc finger domain identified by PFam, accession name zf-B_box, E-value=0.00017, PFam score of 28.4
  misc_feature (1)...(896): Xaa = X or * as defined in Table 2
MDQSGLLALRAAVGAVVGSTLAVDIGILVKDWHPRPLGGKHCQLLGAFRCRQHRRGKEERRGETKEKKGERENERGKRRRIEGERDKYVKENEKQTCVQKERHSCTGNSPNHMATVQAERGALDSHGGWHPWDYCAVQQGRYHQLLLTKEEIEVQRSKKMCLLQAFLICCQKSHFLGPGCTRSMVPASASGESLKLLPLMVEDEGEPVTERERKREGERERGRERERRRRRKRKRRRKRRRKRRRRRRRRGXEFLSLGXNERGKRRRIEGERDKYVKENEKQTCVQKERHSCTGNSPNHMATVQAERGALDSHGGWHPWDYCAVQQGRYHQLLLTKEEIEVQRSKKMCLLQAFLICCQKSHFLGPGCTRSMVPASASGESLKLLPLMVEDEGEPVTEREQEEGGGERERERERKKEKEKEKEKEKEEKEKEKEKEEERIRVPLPRVELRLTNIAAKQVGNTILDVAAPADHPSESSCVYVRFVIKIPVAASFRFKKSYVTNNVESCEDGIHYFWKSHMHSENSCSCKLPCPPHLPAAERLGDALEPLLPTMRRQRQCQNTGDCDGRRQIGTRETEMHRDTSLVAVKTQVDTSREGMGEVEPNSCFWRDTHMASGVGAAFEELPHDGTCDECEPDEAPGAEEVCRECGFCYCRRHAEAHRQKFLSHHLAEYVHGSQAWTPPADGEGAGKEEAEVKVEQEREIESEAGEESESEEESESEEESETEEESEDESDEESEEDSEEEMEDEQESEAEEDNQEEGESEAEGETEAESEFDPEIEMEAERVAKRKCPDHGLDLSTYCQEDRQLICVLCPVIGAHQGHQLSTLDEAFEELRSKDSGGLKAAMIELVERLKFKSSDPKHSHGPSTTWDQRSCVMRAGVRRGKISALRLAWSMTHG

SEQ ID NO: 52998 - protein, 153 aa, Homo sapiens
  misc_feature (1)...(153): Xaa = X or * as defined in Table 2
WRQPRWPHHQACLWQRAGSSYSQHKDPHFTSFSTPRAVQNFDGFPCPFLRETTTLVLIPSVPLTDPGSFYRAWSFQCGPRSPRPLLGRTLSQKFLLRLRGRPRRPYMSTLTPFXSTRIFERAFCQVMGAESGGRIEKTTLCKRSLGPLMEPRV

SEQ ID NO: 52999 - protein, 115 aa, Homo sapiens
  DOMAIN (36)..(71): Troponin domain identified by eMATRIX, accession number PF00992A, p-value=9.859e-12, raw score of 16.67
  misc_feature (1)...(115): Xaa = X or * as defined in Table 2
MVPASASGESLKLLPLMVEDEREPVTEREREKGRGREREGEREKEREGERERERERGERKGERERRRGXQPPFHNRFSEGQGRSFLCSRRPRVSRRGHTSRGPARVKAAERRGLG

SEQ ID NO: 53000 - protein, 38 aa, Homo sapiens
  DOMAIN (5)..(31): kw SSR LIGASE CYCLO FORMYLTETRAHYDROFOLATE domain identified by eMATRIX, accession number DM01871C, p-value=5.255e-10, raw score of 20.79
  misc_feature (1)...(38): Xaa = X or * as defined in Table 2
PENGLIGLSXKIVLSLNIPVNENDMKVDEVLYEDSSTA

SEQ ID NO: 53001 - protein, 490 aa, Homo sapiens
  DOMAIN (332)..(353): kw SSR LIGASE CYCLO FORMYLTETRAHYDROFOLATE domain identified by eMATRIX, accession number DM01871A, p-value=7.273e-16, raw score of 16.71
  DOMAIN (291)..(490): 5-formyltetrahydrofolate cyclo-ligase domain identified by PFam, accession name 5-FTHF_cyc-lig, E-value=1.5e-09, PFam score of 45.1
  misc_feature (1)...(490): Xaa = X or * as defined in Table 2
MALKEIFCPVRETETCTINCGTRISPSILHVGLPYPSTPNVKPEREGCGGGVSGNSKQPGALETAESIGKKEGRREEGSRPESASSLSLLLSLAYDVDKSAQICTRIHSSVPLEAVYPGYIHQSIINQADLSALAPYDPCVCQIHKYHGAYNCLQYSVQNTLYSPTTEQYKRCQAPWVLPAIFTIPASGAAASAVPVRAQAQGGQAAGQRRRLATAPLTGEGEPDHGDRTRAGSQGPEARPRIHLGAARGGDRTRGRPGRRGRDWTRLGREMAAAAVSSAKRSLRGELKQRLRAMSAEERLRQSRVLSQKVIAHSEYQKSKRISIFLSMQDEIETEEIIKDICQRGKICFIPPVRFSRAITMDMVRIGSPEGNFFNFPKTSWEYSLRLGEGDVREEGLVPPGGLEILILPCPQALGLDQNHGQPRLGRGQGAYLXCLSXKRLFCSHSGKLKPPTPPGGWLFKEQICPPRSPVNENDMKVDEVLYEDSSTA

SEQ ID NO: 53002 - protein, 271 aa, Homo sapiens
MGQRNYSKCRAETAKDGEYRGEIKEDVQTHRKKAKNLEKGVDEWLTRINSVERSLNDLMELKTMAQELHDACTSFSSQFDQMEERVSVIEDRMNEMKFMATNDLMTELQKDSIKLDDDSERKVVKMILKLLEDKNGEVQNLAVKWVSPCLPGDFLKTLEDPDLNVRRVALVTFNSAAHNKPSLIRDLLDTVLPHLYNETKVRKELIREVEMGPFKHTVDDGLDIRKAAFECMYTLLDSCLDRLDIFEFLNHVEDGLKDHYDIKHTPLQVSL

SEQ ID NO: 53003 - protein, 122 aa, Homo sapiens
IKEDVQTHRKKAKNLEKGVDEWLTRINSVERSLNDLMELKTMAQELHDACTSFSSQFDQMEERVSVIEDRMNEMKFMATNDLMTELQKDSIKLDDDSERKVVKMILKLLEDKNGEVQNLAVK

SEQ ID NO: 53004 - protein, 1314 aa, Homo sapiens
  DOMAIN (17)..(49): REV protein (anti-repression transactivator protein) domain identified by eMATRIX, accession number PF00424A, p-value=7.882e- 11, raw score of 14.34
  misc_feature (1)...(1314): Xaa = X or * as defined in Table 2
SASASRCDPGSGSRREREEELQWRRRRRRRRRRRRRRRQRQRAAAPAAPAGGIEAVNMASASYHISNLLEKMTSSDKDFRFMATNDLMTELQKDSIKLDDDSERKVVKMILKLLEDKNGEVQNLAVKCLGPLVSKVKEYQVETIVDTLCTNMLSDKEQLRDISSIGLKTVIGELPPASSGSALAANVCKKITGRLTSAIAKQEDVSVQLEALDIMADMLSRQGGLLVNFHPSILTCLLPQLTSPRLAVRKRTIIALGHLVMSCGNIVFVDLIEHLLSELSKNDSMSTTRTYIQCIAAISRQAGHRIGEYLEKIIPLVVKFCNVDDDELREYCIQAFESFVRRCPKEVYPHVSTIINICLKYLTYDPNYNYDDEDEDENAMDADGGDDDDQGSDDEYSDDNDMSWKVTRAAAKCLDAVVSTRHEMLPEFYKTVSPALISRFKEREENVRADVFHAYLSLLKQTRPVQSWLCDPDAMEQGETPLTMLQSQVPNIVKALHKQMKEKSVKTRQCCFNMLTELVNVLPGALTQHIPVLVPGIIFSLNDKSSSSNLKIDALSCLYVILCNHSPQVFHPHVQALVPPVVACVGDPFYKITSEALLVTQQLVKVIRPLDQPSSFDATPYIKDLFTCTIKRLKAADIDQEVKERAISCMGQIICNLGDNLGSDLPNTLQIFLERLKNEITRLTTVKALTLIAGSPLKIDLRPVLGEGVPILASFLRKNQRALKLGTLSALDILIKNYSDSLTAAMIDAVLDELPPLISECDMHVSQMAISFLTTLAKEYPSSLSKISGSILNELIGLVRSPLLQGGALSAMLDFFQALVVTGTNNLGYMDLLRMLTGPVYSQSTALTHKQSYYSIAKCVAALTRACPKEGPAVVGQFIQDVKNSRSTDSIRLLALLSLGEVGHHIDLSGQLELKSVILEAFSSPSEEVKSAASYALGSISVGNLPEYLPFVLQEITSQPKRQYLLLHSLKEIISSASVVGLKPYVENIWALLLKHCXVCRREGTRNVVAECLGKTHSXLDPEKLFLPRLKGYLISGSSYARSSVVTAVKFTISDHPQPIDPLLKNCIGDFLKTLEDPDLNVRRVALVTFNSAAHNKPSLIRDLLDTDLPHLYNETKVIKELIREGQMGPFKHTVEDGLDIRKAAFERIYTLLDSRLDRLDKFEFLNHVEDGLKDHYDIKMLTFLMLVRLSTLCPSAVLQRLDRLFEPLRATCTTKVKANSVKQEFEKQDELKRSAMRAVAALLTIPEAEKSPLMSEFQSQISSNPELAGYLXKVSQKDSSSTNLESNGQLVQMFVHHRGPITYGPYNALKLTG

SEQ ID NO: 53005 - protein, 89 aa, Homo sapiens
KESQRSGNVAELALKATLVESSTSGFTPGGGGSSVSMIASRKPTDGASSSNCVTDISHLVRKKAENQAESRAAVEGTVEAGATVESTAC

SEQ ID NO: 53006 - protein, 51 aa, Homo sapiens
IVALFRSLVRHLRGTMAMESTATAAVAAELVSADKIEDAPAPSTSADKVES

SEQ ID NO: 53007 - protein, 374 aa, Homo sapiens
  misc_feature (1)...(374): Xaa = X or * as defined in Table 2
MATESTATAAIAAELVSANKIEDVPAPSTSADKVERIENGVLGNTLDGVHVEEEEGEKTEDESLVENNDSIDEEARKELREQVYDSMGEKEEAKKTEDKSFAKPETDKEQDCEMEKGGREDMDISESAEEPQEKVDLTLGWLTEISEGAKGGGAPEGPNEAEVTSGKPEQEVPDVEEEKSVSETDVQKECREKGGWEKHREVIVSIEEKPKEVSEEQPVVILEKQGTAVEVAAESLDPTVKPVDVGGDEPEEKGTVPGSLRPSPCRDPLPAGLGLWVQLSVXXGSGTVQQIYXSHXEENGCTKRAGEGGXRIVCXIQERNXGTEGTATRNYRKDRRCKGVSDYWECSXTGSESYSGGELYFRFHSXWRRLFSLL

SEQ ID NO: 53008 - protein, 39 aa, Homo sapiens
TRLTDAQVLFVFQAENQAESRAAVEGTVEAGATVESTAC

SEQ ID NO: 53009 - protein, 51 aa, Homo sapiens
ALFRSLVRHLRGTMAMESTATAAVAAELVSADKVEDVPAPSTSADKVESNH

SEQ ID NO: 53010 - protein, 360 aa, Homo sapiens
  misc_feature (1)...(360): Xaa = X or * as defined in Table 2
VSGVPNCLFFSQALFRSLVRHLRGTMAMESTATAAVAAELVSADKIEDVPAPSTSADKVESLDVDSEAKKLLGLGQKHLVMGDIPAAVNAFQEAASLLGKKYGETANECGEAFFFYGKSLLELARMENGVLGNALEGVHVEEEEGEKTEDESLVENNDNIDXNXRLGRGXXRKXXDXRNAKXFSPXKQVSSRKXGGGDWEPRACLGYAGFSKDHFXKARNKRSTALCCPGTSXTRRSXCXIXKLCASCGGVPVLPXPTGPVPGSPRPSPCRDPLPAGLGLWVQLSVXXGSGTVQQIYXSHXEQNGCTKRAGEGGXRIVCXIQERNXGTKGTATRNXREDRRCKGVSAXWECSXTGSESYS

SEQ ID NO: 53011 - protein, 819 aa, Homo sapiens
  DOMAIN (575)..(650): TPR Domain domain identified by PFam, accession name TPR, E- value=1.6e-08, PFam score of 41.8
  misc_feature (1)...(819): Xaa = X or * as defined in Table 2
VSGVPNCLFFSQALFRSLVRHLRGTMAMESTATAAVAADVVSADKIEDVPAPSTSADKVESLDVDSEAKKLLGLGQKHLVMGGIPAAVNAFQGAASLLGKKYGETANECGEAFFFYGKSLLELARMENGVLGNALEGVHVEEEEGEKTEDESLVENNDNIDEEAREELREQVYDAMGEKEEAKKTEDKSLAKPETDKEQDSEMEKGGREDMDISKSAEEPQEKVDLTLDWLTETSEEAKGGAAPEGPNEAEVTSGKPGQEVPDAEEEKSVSGTDVQEECREKGGQEKQGEVIVSIEEKPKEVSEEQPVVTLEKQGTAVEVEAESLDPTVKPVDVGGDEPEEKVVTSENEAGKAVLEQLVGQEVPPAEESPEVQTEAAEASAVEAGSEVSEKPGQEAPVLPKDGAVNGPSVVGDQTPIEPQTSIERLTETKDGSGLEEKVRAKLVPSQEETKLSVEESEAAGDGVDTKVAQGATEKSPEDKVQIAANEETQEREEQMKEGEETEGSEEDDKENDKTEEMPNDSVLENKSLQENEEEEIGNLELAWDMLDLAKIIFKRQETKEAQLYAAQAHLKLGEVSVESENYVQAVEEFQSCLNLQEQYLEAHDRLLAETHYQLGLAYGYNSQYDEAVAQFSKSIEVIENRMAVLNEQVKEAEGSSAEYKKEIEELKELLPEIREKIENAKESQRSGNVAELAFLKATLVESSTFQVSPPGGGGSSSLPXLPSRKPTDGASSSNCVTXYFPTFVRKKREPQRKESPGKDDAKKAKQEPEVNTGGSGDAVPSGNEVAENMEEEAENQLKRGAAVEGTVEAGATVESTAC

SEQ ID NO: 53012 - protein, 36 aa, Homo sapiens
FQNPTGLYCDTEYNRLQKQQTEKTKQKKTQFHPICN

SEQ ID NO: 53013 - protein, 37 aa, Homo sapiens
FFQNPTGLYCDTEYNRLQKQQTEKTKQKKTQFHPICN

SEQ ID NO: 53014 - protein, 43 aa, Homo sapiens
RSIMWFLQMAQLSTTISQAQRATAFHFFTSKRFLPAPLLVPLG

SEQ ID NO: 53015 - protein, 43 aa, Homo sapiens; identical to SEQ ID NO: 53014

SEQ ID NO: 53016 - protein, 12 aa, Homo sapiens
ALGLLYLVCWCV

SEQ ID NO: 53017 - protein, 60 aa, Homo sapiens
  misc_feature (1)...(60): Xaa = X or * as defined in Table 2
KAWWNLLRKSEPKSCGSXGGLSTSRERLVECSSPLGLGYCGXXLCHLQEPHYGSLHRMSS

SEQ ID NO: 53018 - protein, 1128 aa, Homo sapiens
  DOMAIN (13)..(52): kw TRANSCRIPTASE REVERSE II ORF2 domain identified by eMATRIX, accession number DM01354X, p-value=1.000e-40, raw score of 13.86
  DOMAIN (1019)..(1069): Thyroglobulin type-1 repeat domain identified by PFam, accession name thyroglobulin_1, E-value=2.2e-13, PFam score of 57.9
MAILPNVIYRFNAIPIKLPMTFFTELEKTTLKFIWNQKRARIAKSILSQKNKAGGITLPDFKLYYKATVTKTAWYWYQNRDIDQWNRTEPSEIMPHIYNYLIFDKPEKNKQWGKDSLFNKWCWENWLAICRKLKLDPFLTPYTKINSRWIKDLNVRPKTIKTLEENLGITIQDIGVGKDFMSKTPKAMATKAKIDKWDLIKLKSFCTAKETTIRVNRQPTTWEKIFATYSSDKGLISRIYNELKQIYKKKTNNPIKKWAKDMNRHFSKEDIYAAKKHMKKCSSSLAIREMQIKTTMRYHLTPVRMAIIKKSGNNRCWRGCGEIGTLLHCWWDCKLVQPLWKSVWRFLRDLELEIPFDPAIPLLGIYLKDYKSCCYKDTCTRSHPGYHIAFSHQVFLGFANIFLILDDLESSEYWSGLCMLCDEFVATVQCLGEKTYAQCGLAADGAHQNALNSNPSPHEAIISKAFPTDGVGPAHGGVGPVAWMIWFVGEPERWQESQTGSPTLRDGLADRPSLKGSSQQPQAEGEKKEAAQTPVEIALIWPDLNSGANLWQSCECQAQGLRSCLWPHSQGRHASDGRTQPQPTPAVEPTLEVKGSLRAGTYCMVDPEQPVLQGRRECSTWLLESKSFTCWLFDRDFLSAYSRETEPIEGVCVDRKREREREREIVLKELADAVIAAGKSNICRVPLLGPPAGPSHSIVNIPSGSYLGKENLVGKCALNVSVNVNVQFIADVVDGTEAKGPGGEWKRTSDKNHDFSIDAKKAFGKIQQRFMLKALNKLGIDGTYLKIIRDSGTPGDAAGPLLQERVNATTLPSAHIPMAPSTLNQGNDEKAGDQRRARACVKSNNLYTEGCESWKSEGVWVPTLHSSAWSVSCGGACTDKELRNLASRLKDWFGALHEDANRVIKPTSSNTAQGRFDTSILPICKDSLGWMFNKLDMNYDLLLDPSEINAIYLDKYEPCIKPLFNSCDSFKDGKLSNNEWCYCFQKPGELIAFGPLKVKGPVILTNSQPSPSSAADPAADILTWAFIPRCNEEGYYKATQCHGSTGQCWCVDKYGNELAGSRKQGAVSCEEEQETSGDFGSGGSVVLLDDLEYERELGPKDKEGKLRVHTRAVTEDDEDEDDDKEDEV

SEQ ID NO: 53019 - protein, 565 aa, Homo sapiens
  DOMAIN (480)..(495): Thyroglobulin type-1 repeat proteins proteins domain identified by eMATRIX, accession number BL00484C, p-value=3.647e- 12, raw score of 17.01
  DOMAIN (450)..(515): Thyroglobulin type-1 repeat domain identified by PFam, accession name thyroglobulin_1, E-value=3.1e-18, PFam score of 74.0
  misc_feature (1)...(565): Xaa = X or * as defined in Table 2
SRRTAGVRLDILCKDPIMWVSADGHSYQPQYPKAKRATEFHFFNFKALLARAAVGAARGIHIHRCGLTKRPDARRRRVAGAQGREPAISLPGDRAAGARATRTRGPGPAPKMPAIAVLAAAAAAWCFLQVESRHLDALAGGAGPNHGNFLDNDQWLSTVSQYDRDKYWNRFRDEVEDDYFRNWNPNKPFDQALDPSKDPCLKVKCSPHKVCVTQDYQTALCVSRKHLLPRQKEWGTWAQKHWGLDLXILVKCKPCSRGRSSAMGLAGSDGPLLTAFQVANLEFHACSTGQKSFATLCDGPCPCSSQSLEPPKHKGRKGVPCTDKELRNLASRLKDWFGALHEDANRVIKPTSSNTAQGRFDTSILPICKDSLGWMFNKLDMNYDLLLDPSEINAIYLDKYEPCIKPLFNSCDSFKDGKPFLNNEWCLLPSQNPGGLPCAQNEMNRIQKLSKGKSLLGAFIPRCNEEGYYKATQCHGSTGQCWCVDKYGNELAGSRKQGAVSCEEEQETSGDFGSGGSVVLLDDLEYERELGPKDKEGKLRVHTRAVTEDDEDEDDDKEDEVGYIW

SEQ ID NO: 53020 - protein, 145 aa, Homo sapiens
  misc_feature (1)...(145): Xaa = X or * as defined in Table 2
HGVQGAGCGEVAAVSIELGAGGPVWRAAPRACSRLQLLRGFGLEGQWFGESCCRRGASXEGSTRXPPPRRQPWPEWVMSWVPPETREPARISPAPAKQNXPPPAPKSPAAPAPQAAVAATPSPPGEISEAWDSLESFSKPAFFSQ

SEQ ID NO: 53021 - protein, 39 aa, Homo sapiens
FCLIGLFLFPQALSGFRQIHVIDMDTIDVSNLNRQFLFR

SEQ ID NO: 53022 - protein, 486 aa, Homo sapiens
  DOMAIN (98)..(142): Ubiquitin-activating enzyme proteins domain identified by eMATRIX, accession number BL00536B, p-value=4.343e-23, raw score of 18.17
  DOMAIN (299)..(455): Repeat in ubiquitin-activating (UBA) pro domain identified by PFam, accession name UBACT_repeat, E-value=2.6e-30, PFam score of 114.1
  misc_feature (1)...(486): Xaa = X or * as defined in Table 2
FVNNMADGEEPEKKRRRIEELLAEKMAVDGGCGDTETWKDRWNHVKKFLERSGPFTHPDFEPSTESLQFLLDTCKVLVIGAGGLGCELLKNLALSGFRQIHVIDMDTIDVSNSXIRQFLFRPKDIGRPKAEVAAEFLNDRVPNCNVVPHFNKIQDFNDTFYRQFHIIVCGTGTLSCARRWINGMLISLLNYERMVSXDPSSIVPLIDGGTEGFKENARVILPGMTACIECTLELYPPQVNFPMCTIASMPRLPEHCIEYVGMLQWPKEQPFGEGVPLDGDDPEHIQWIFQKSLERASQYNIRGVTYRLTQGVVKRIIPAVASTNAVIAAVCATXEVFKIATSAYIPLXIITWVFNDVDGLYTYTFEGRKGKENCPACSQLPQNISVFLHQAKLQEVLGIILTNSASLQNEILPAITATLGGEKIGTLYLQSVTSIEERNRANFFQTIERNWGLLDGPKTGRLLDVTTPQTVLFQTSILLLKGKSPT

SEQ ID NO: 53023 - protein, 573 aa, Homo sapiens
  DOMAIN (72)..(96): Serpins proteins domain identified by eMATRIX, accession number BL00284A, p-value=4.500e-21, raw score of 15.64
  DOMAIN (47)..(350): Serpins (serine protease inhibitors) domain identified by PFam, accession name serpin, E-value=2.2e-121, PFam score of 412.9
MGPAWLWLLGTGILASVHCQPLLAHGDKSLQGPQPPRHQLSEPAPAYHRITPTITNFALRLYKELAADAPGNIFFSPVSISTTLALLSLGAQANTSALILEGLGFNLTETPEADIHQGFRSLLHTLALPSPKLELKVGNSLFLDKRLKPRQHYLDSIKELYGAFAFSANFTDSVTTGRQINDYLRRQTYGQVVDCLPEFSQDTFMVLANYIFFKAKWKHPFSRYQTQKQESFFVDERTSLQVPMMHQKEMHRFLYDQDLACTVLQIEYRGNALALLVLPDPGKMKQVSHKAMVDMSEKGTEAGAASGLLSQPPSLNTMSDPHAHFNRPFLLLLWEVTTQSLLFLGKVVNPVAGLFNRLPLLLWSSPHSLFLLHAPWQILSEEVRIEVPADKYGFTAGKRTEARSLSVACSSGSWKTQICMQEVYQGTLSGTTSVKEQEKQVCTKGKLQRNCNSNVRLHRMLCNGDMPNEIEEERAFVPPHQPITVTFFGPVNLILDSQTPSSCFQYLSLSRFTESSLSASHVAPLENRGKIPQCHVLGQEKMKTDLEHEHGGLARKQVCVAETSAEIVKGIKR

SEQ ID NO: 53024 - protein, 88 aa, Homo sapiens
  DOMAIN (24)..(48): Serpins proteins domain identified by eMATRIX, accession number BL00284A, p-value=4.500e-21, raw score of 15.64
  DOMAIN (1)..(88): Serpins (serine protease inhibitors) domain identified by PFam, accession name serpin, E-value=2.4e-36, PFam score of 125.5
  misc_feature (1)...(88): Xaa = X or * as defined in Table 2
XITPTITNFALRLYKELAADAPGNIFFSPVSISTTLALLSLGAQANTSALILEGLGFNLTETPEADIHQGFRSLLHTLALPSPKLELK

SEQ ID NO: 53025 - protein, 464 aa, Homo sapiens
  DOMAIN (399)..(424): Serpins proteins domain identified by eMATRIX, accession number BL00284E, p-value=4.462e-18, raw score of 19.15
  DOMAIN (49)..(433): Serpins (serine protease inhibitors) domain identified by PFam, accession name serpin, E-value=6.5e-86, PFam score of 293.0
  misc_feature (1)...(464): Xaa = X or * as defined in Table 2
NGSGLALATGNRDPGLCPLSAPSCPWRXKSAGASTQQAYSSQSQHPAYHRITPTLTNFALRLYKELAADAPGNIFFSPVSISTTLCLLCLGAQANNSALILEGLGFNLTETPEADIHQGFRSLLHTLVLPSPKLELKVGNSLFLDKRLKPRQHYFDSIKELYRAFAFSAHFTDSVTTGRQINDYLXRRTYWPGVDLPFRSLARDTFMVLANFILFSKAKVKATLSSRVPDPKSRPVFLVDERTSFQVPMMHQKEMHRFLYDQDLACTVLQIEYRGNALALLVLPDPGKMKQVEAALQPQTLRKWGQLLLPSLLDLHLPRFSISGTYNLEDILSPNWFSPTYTLNKITSLQSVGGXLNKSISKVSHKSMVDMNEKGDQRPGLLQASSPSPHLXYTMSDPHAHFNRPFLLLLWEVTTQSLLFLGKVVNPVVWVTMVGGQELSYLILDQTDRPEPACILGLLCGSVN

SEQ ID NO: 53026 - protein, 75 aa, Homo sapiens; identical to SEQ ID NO: 48748
  DOMAIN (24)..(36): ABC transporters family proteins domain identified by eMATRIX, accession number BL00211A, p-value=3.647e-10, raw score of 12.23

SEQ ID NO: 53027 - protein, 641 aa, Homo sapiens
  DOMAIN (384)..(424): PROTEIN LIPOPROTEIN MEMBRANE TRA domain identified by eMATRIX, accession number PD01632B, p-value=3.000e-33, raw score of 23.36
  DOMAIN (283)..(491): Secretory protein of YscJ/FliF family domain identified by PFam, accession name YscJ_FliF, E-value=1.4e-94, PFam score of 327.6
MATHVETDSPFAIPVEGSGEGYFLLHIFYFRSVFSASPISARLRTVFTPAGFQTSEFLIRSPFPTGNDGTRVAHTFAFRRSHTSDVTHNWLGNVLFDVRSCFFFSATADLTDHHDRFGLRIFFEHFENVDKVRARDRVTADTDTGRLTETVIRGLFNRFIGQCTGTGNDTHFTRFVNVTRLDTDFAFTRSDNAWAVRADHTNACFIQLHFHGQHIQRRDAFSDGDNQFDACVDGFQNGVFAERCWYVDNRSGSASGSNGFTHGVEHRQAETSLEETNAELNRLRANPKIPLIVAGSAAVAVMVALILWAKAPDYRTLFSNLSDQDGGAIVSQLTQMNIPYRFSEASGAIEVPADKVHELRLRLAQQGLPKGGAVGFELLDQEKFGISQFSEQVNYQRALEGELSRTIETIGPVKGARVHLAMPKPSLFVREQKSPSASVTVNLLPGRALDEGQISAIVHLVSSAVAGLPPGNVTLVDQGGHLLTQSNTSGRDLNDAQLKYASDVEGRIQRRIEAILSPIVGNGNIHAQVTAQLDFASKEQTEEQYRPNGDESHAALRSRQLNESEQSGSGYPGGVPGALSNQPAPANNAPISTPPANQNNRQQQASTTSNSGPRSTQRNETSNYEVDRTILRAQGVIPALR

SEQ ID NO: 53028 - protein, 657 aa, Homo sapiens
  DOMAIN (338)..(360): TRANSFORMING PROTEIN P21 RAS SIGNATURE domain identified by eMATRIX, accession number PR00449A, p-value=2.241e-09, raw score of 13.20
  DOMAIN (39)..(246): ABC transporter domain identified by PFam, accession name ABC_tran, E-value=1.5e-25, PFam score of 98.3
  misc_feature (1)...(657): Xaa = X or * as defined in Table 2
CAVCHISFQDTPVLVSSNVTMQFGSKPLFENISVKFGGGNRYGLIGANGSGKSTFMKILGGDLEPTLGNGSLDPNERIGKLRQDQFAFEEFTVLDTVIMGHKELWKVKQERDRIYALPEMSEEDGYKVADLEVKYGEMAGYSAEARAGELLLGVGIPVEQHYGPMSEVAPGWKLRVLLAQALFADPDILLLDEPTNNLDIDTIRWLEQVLNENNSTMIIISHDRHFLNMVCTHMADLDYGELRVYPGNYDEYMTAATQARERLLADNAKKKAQIAELQSFIDKIKLEEVKASSRQNPFIRFEQDKKLFRNALEVEGLTKGFDNGPLFKNLNLLLEVGEKLAVLGTNGVGKSTLLKTLVGNLQPDSGTVKWSENARIGYYAQDHEYEFENDLPVFEWMSQCKQXGDDEQAVRSIFGRLLFSQDVIKKPAKVLSAPFCKDSILEAIDAGIKLIITITEGIPTLDMLTVKVKLDEAGVRMIGPNCPGVITPGECKIGIQPGHIHKPGTGELNITTGGIVKARDTQIALNDKSKGDVRVDGQNSLLETFNMYVGTSGTGTLTLTNNGTLNVEGGEVYLGVFEPAVGTLNIGAAHGEAAADAGFITNATKVEFGLGEGVFVFNHTNNSDAGYQVDMLITGDDKDGKVIHDARHTVFNAGEYL

SEQ ID NO: 53029 - protein, 184 aa, Homo sapiens
AQQSAVRLTEIGPRMTLQLIKVQEGVGEGKVMFHSFVSKTEEDLQAILEAKEKKLRLKAQRQAQQAQNVQRKHEQREAHRKKSLEGMKKARVGGSDEKASGIPSRTASLELGEDDDEQEDDAIEYFCQAVGEAPSEDLFPEAKQKRLAKPHWSSGWIERPRLGPEMWPSVSFHKGVVSPALPLQ

SEQ ID NO: 53030 - protein, 191 aa, Homo sapiens
  DOMAIN (97)..(127): Fibrinogen beta and gamma chains C-terminal domain proteins domain identified by eMATRIX, accession number BL00514G, p-value= 3.455e-18, raw score of 15.98
  DOMAIN (92)..(162): Fibrinogen beta and gamma chains, C-term domain identified by PFam, accession name fibrinogen_C, E-value=1e-14, PFam score of 53.7
  misc_feature (1)...(191): Xaa = X or * as defined in Table 2
ILFFDKGMPAQTPSLQKRWEKMXLVLWXGDREGIKAIISEESWGARAPIFLLRMMEDQGLYSIRMGGARGLPGKSLALXGAGRGFYSGERTWTLSLPSGNCAPYQRGGWWYHACAHSNLNGVWHHGGHYRSRYQDGVYWAEFRGGAYSLRKAAMPHLAPEAVTLCSFGPLGPRGHWSAGAPSCSGHTFFVA

SEQ ID NO: 53031 - protein, 59 aa, Homo sapiens
  misc_feature (1)...(59): Xaa = X or * as defined in Table 2
AAADPLRHLRRGAFIKAGRHAGPSLPVCLQATAHXMDLARLALVLVVRTSASTKSSTRE

SEQ ID NO: 53032 - protein, 256 aa, Homo sapiens
  misc_feature (1)...(256): Xaa = X or * as defined in Table 2
LLSRISKVSSKLPVRGGAGSLCTGDQRKRRKFLETVELQISLKNYDPQEGQSAFSGHPSRLXVPSPPLSSLVCVLGGPSKHLXRRLRPVGYPPTMDIEGAXKKLNQELKNLVKKAGPRKYDCVFWPQESLDSSKIPPNPSGPGFKXRAGKVPFPCLTHNGKHGLAQSGIEVEVPTFLSFQMKKGVYVWAVAVWSRERXQTNELVYNIHLACQLSWVSLLKEKNWQNVPGPYIIKSTMGQSPSSHILRHIRINSITS

SEQ ID NO: 53033 - protein, 125 aa, Homo sapiens
SVSRVPTRSLRTSTWRLAQDQTQDTQLITVDEKLDITTLTGVPEEHIKTRKVRIFVPARNNMQSGVNNTKKWKMEFDTRERWENPLMGWASTWSYDIEERKVPKPKSKSYGANFSWNKRTRVSTK

SEQ ID NO: 53034 - protein, 61 aa, Homo sapiens
KLASACCAFQVSSLILFLWICLCFFLLGWSYDIEERKVPKPKSKSYGANFSWNKRTRVSTK

SEQ ID NO: 53035 - protein, 202 aa, Homo sapiens
  misc_feature (1)...(202): Xaa = X or * as defined in Table 2
ILAFACSKMAAVSMSVVLRQTLWRRRAVAVAALSVSRVPTRRSLRTSTWRLAHDQTQDTQLITSXXKIGISLTFNWPFPEEHIKNLEKSGIFVPCSPITCQSGVNNTKKWKMEFDTRERWENPLMGWASTGLIPLSNMVLNLPVLKEDAVSFAEKNGWELWTLEERKVPKPKSQVFMGANFSWNKRTRVSTKIGLALTISPA

SEQ ID NO: 53036 - protein, 265 aa, Homo sapiens
  misc_feature (1)...(265): Xaa = X or * as defined in Table 2
MNKVNPTQQDKEDHPELIITSIGDKRQLTLEAASGVCHRGTQTRVKEESKKFLISMSFRGGKPVHKVVERACVCTCLHHTSVPATHNTQRRHTTPTTRKNGRKRRGKKEREKRKDREHNTGRRTKRKKTRNIGGQRTQQKQKQSEDKARREPGGGRKQGRGREDGTRQRRGGRTRNREEGAQRGRNGRRGEGRRTEEETHMAXAPDITATQQTEQQGHGTRQRDTTLRRHTAEDAQPSEHASADQAHTKKTEXSVSRTNGQYLLT

SEQ ID NO: 53037 - protein, 80 aa, Homo sapiens
  DOMAIN (32)..(61): Speract receptor repeat proteins domain proteins domain identified by eMATRIX, accession number BL00420A, p-value=9.345e- 11, raw score of 20.42
  DOMAIN (17)..(76): Collagen triple helix repeat (20 copies) domain identified by PFam, accession name Collagen, E-value=6.6e-11, PFam score of 49.7
  misc_feature (1)...(80): Xaa = X or * as defined in Table 2
LSYGYDEKSTGGISVPGPMGPSGPRGLPGPPGAPGPQGFQGPPGEPGEPGASGPMGPRGPPGPPGKNGDDGEAGKPGRPX

SEQ ID NO: 53038 - protein, 1518 aa, Homo sapiens
  DOMAIN (1229)..(1277): 352 FIBRILLAR COLLAGEN CARBOXYL-TERMINAL domain identified by eMATRIX, accession number DM01418A, p-value=1.000e-40, raw score of 20.83
  DOMAIN (95)..(1170): Collagen triple helix repeat (20 copies) domain identified by PFam, accession name Collagen, E-value=2.5e-207, PFam score of 702.2
  misc_feature (1)...(1518): Xaa = X or * as defined in Table 2
AATALLTHGQEEGQVEGQDEDIPPITCVQNGLRYHDRDVWKPEPCRICVCDNGKVLCDDVICDETKNCPGAEVPEGECCPVCPDGSRVTHRPKKPPGVEGPKGDTGPPRPKGTPGPPGRDGIPGQPGLPGPPGPPGPPGPPGLGGKLLLPKLSYGYDEKSTGGISVPGPMGPSGPRGLPGPPGAPVSIQDVFICLLGLWSFGGKTGMRAGEMLRDLLGPQGFQGPPGEPGEPGASGPMGPRGPPGPPGKNGDDGEAGKPGRPGERGPPGPQGARGLPGTAGLPGMKGHRGFSGLDGAKGDAGPAGPKSPTMNEFLTHYSPDLQGEPGSPGENGAPGQMGPRGLPGERGRPGAPGPAGARGNDGATGAAGPPGPTGTAGPPGFPGAVGAKGEAGPQGPRGSEGPQGVRGEPGPPGPAGAAGPAGNPGADGQPGAKGANGAPGIAGAPGFPGARGPSGPQGPGGPPGPKGNSGEPGAPGSKGDTGAKGEPGPVGVQGPPGPAGEEGKRGARGEPGPTGLPGPPGERGGPGSRGFPGADGVAGPKGPAGERGSPGPAGPKGSPGEAGRPGEAGLPGAKGLTGSPGSPGPDGKTGPPGPAGQDGRPGPPGPPGARGQAGVMGFPGPKGADCEYXGEPGKAGERGCPGPPGAVGPAGKDGEAGAQGPPGPAGPAGERGEQGPAGSPGFQGLPGPAGPPGEAGKPGEQGVPGDLGAPGPSGARGERGFPGERGVQGPPGPAGPRGANGAPGNDGAKGDAGAPGAPGSQGAPGLQGMPGERGAAGLPGPKGDRGESGPSGPAGPTGARGAPGDRGEPGPPGPAGFAGPPGADGQPGAKGEPGDAGAKGDAGPPGPAGPAGPPGPIGNVGAPGAKGARGSAGPPGATGFPGAAGRVGPPGPSGNAGPPGPPGPAGKEGGKGPRGETGPAGRPGEVGPPGPPGPAGEKGSPGADGPAGAPGTPGPQGIAGQRGVVGLPGQRGERGFPGLPGPSGEPGKQGPSGASGERGPPGPMGPPGLAGPPGESGREGAPGAEGSPGRDGSPGAKGDRGETGPAGPPGAPGAPGAPGPVGPAGKSGDRGETGPAGPTGPVGPVGARGPAGPQGPRGDKGPPGEQGPSGASGPAGPRGPPGSAGAPGKDGLNGLPGPIGPPGPRGRTGDAGPVGPPGPPGPPGPPGPPSAGFDFSFLPQPPQEKAHDGGRYYRADDANVVRDRDLEVDTTLKSLSQQIENIRSPERSRKNPARTCRDLKMCHSDWKSGEYWIDPNQGCNLDAIKVFCNMETGETCSVPHISPQCGPRRIWYISREPQGTRRHVWFGKRHDRLNSSSSMAARGSDPLPDVDIQADLSCGLMSHPRPSQNITYHCKKQGGPNLDPADSGNLKEAPCSSRGSNEDEIPRRGANSRFTLQRHLSIGCTSHNREPWGKTVIEYKTTKTSRLPIIDVAPLEVGAQNQEFGFDVAPVCFLENSLHPNLGSLPPQPTFPPNPETDKQPKLNPLKSQKNGRQFSHGTLENILFLCTHLSHLRFHL

SEQ ID NO: 53039 - protein, 101 aa, Homo sapiens
  misc_feature (1)...(101): Xaa = X or * as defined in Table 2
MQEGCLAILKTQQLSFSSGEHTICAAAVVVKNNNSGSHKNVPCPAPSPPLTSCRPCVYYLSSDVLSARCIVVFSSQGFEISPCTEISRQISPRLPXQLIXT

SEQ ID NO: 53040 - protein, 85 aa, Homo sapiens
GGGGVRRRRGTRRSEPGDSRSAMAPIGLKAVVGEKIMHDVIKKVKKKGEWKVLVVDQLSMRMLSSCCKMTDIMTEGITSEHALCT

SEQ ID NO: 53041 - protein, 617 aa, Homo sapiens
  DOMAIN (60)..(107): Sec1 family domain identified by eMATRIX, accession number PF00995A, p-value=1.000e-40, raw score of 20.59
  DOMAIN (118)..(617): Sec1 family domain identified by PFam, accession name Sec1, E -value=4.6e-145, PFam score of 495.3
  misc_feature (1)...(617): Xaa = X or * as defined in Table 2
GGGGVRRRRGTRRSEPGDSRSAMAPIGLKAVVGEKIMHDVIKKVKKKGEWKVLVVDQLSMRMLSSCCKMTDIMTEGITIVEDINKRREPLPSLEAVYLITPSEKSVHSLISDFKDPPTAKYRAAHVFFTDSCPDALFNELVKSRAAKVIKTLTEINIAFLPYESQVYSLDSADSFQSFYSPHKAQMKNPILERLAEQIATLCATLKEYPAVRYRGEYKDNALLAQLIQDKLDAYKADDPTMGEGPDKARSQLLILDRGFDPSSPVLPXIXLFQGMSYXSCLPIENDVYKYETSGIGGGHGVKGGASGTEDDDLWIALRHKHIAEVSQEVTRSLKDFSSSKRMNTGEKTTMRDLSQMLKKMPQYQKELSKYSTHLHLAEDCMKHYQGTVDKLCRVEQDLAMGTDAEGEKIKDPMRAIVPILLDANVSTYDKIRIILLYIFLKNGITEENLNKLIQHAQIPPEDSEIITNMAHLGVPIVTDSTLRRRSKPERKERISEQTYQLSRWTPIIKDIMEDTIEDKLDNKHYPYISTRSSASFSTTAVSARYGHWPXGTRPPGEYRSGPRVFIIFHPLGGVSLNEMRCALRRXPRANGKWGGAXXGSTHILQPHRNLPGHTEET

SEQ ID NO: 53042 - protein, 626 aa, Homo sapiens
  DOMAIN (248)..(288): Sec1 family domain identified by eMATRIX, accession number PF00995B, p-value=1.000e-40, raw score of 17.37
  DOMAIN (118)..(610): Sec1 family domain identified by PFam, accession name Sec1, E -value=1.2e-204, PFam score of 693.3
  misc_feature (1)...(626): Xaa = X or * as defined in Table 2
GGGGVRMLCGTRRSEPGDSRSAMAPIGLIAVVGEKIMHDVMLNDLNMGEWKALLVDQLSMRMLSYCCLMTDIMTEGITIVEDINKRRXPLPSLEAVYLITPSEKSVHSLISDFKDPPTAKYRAAHVFFTDSCPDALFNELVKSRAAKVIKTLTEINIAFLPYESRVYSLDSADSFQSFYSPHKAQMKNPILERLAEQIATLCATLKEYPAVRYRGEYKDNALLAQLIQDKLDAYKADDPTMGEGPDKARSQLLILDRGFDPSSPVLHELTFQAMSYDLLPIENDVYKYETSGIGEARVKEVLLDEDDDLWIALRHKHIAEVSQEVTRSLKDFSSSKRMNTGEKTTMRDLSQMLKKMPQYQKELSKYSTHLAPCLRTCMKHYQGTVDKLCRVEQDLAMGTDAEGEKIKDPMRAIVPILLDANVQTYXQIRIILLYIFLKNGITEENLNKLIQHAQIPPEDSEIITNMAHLGVPIVTDSTLRRRSKPERKERISEQTYQLSRWTPIIKDIMEDTIEDKLDTKHYPYISTRSSASFSTTAVSARYGHWHKNKAPGEYRSGPRLIIFILGGVSLNEMRCAYEVTQANGKWEVLIGSTHILTPTKFLMDLRHPDFRESSRVSFEDQAPTME

SEQ ID NO: 53043 - protein, 16 aa, Homo sapiens
VDFFFFLSNEIFYLLK

SEQ ID NO: 53044 - protein, 72 aa, Homo sapiens
  misc_feature (1)...(72): Xaa = X or * as defined in Table 2
LHLPLFLGAIRSGQYGLWNLFRVLGWTCSLGIYLGWRVSXNFGRGTKALKVLSTISEXRNHHCHPXNNIFVY

SEQ ID NO: 53045 - protein, 387 aa, Homo sapiens
  DOMAIN (172)..(209): CDP-alcohol phosphatidyltransferases proteins domain identified by eMATRIX, accession number BL00379, p-value=1.610e-15, raw score of 24.64
  misc_feature (1)...(387): Xaa = X or * as defined in Table 2
GAGAPAAGQAGLTSTSAVRARPVSPARQSQDPAASLSLHLSLPPAPGAGCARWRRRGPQAAMAAGAGAGSAPRWLRALSEPLSAAQLRRLEEHRYSAAGVSLLEPPLQLYWTWLLQWIPLWMAPNSITLLGLAVNVVTTLVLISYCLTATEEAPYWTYLLCALGLFIYQPLDAIDGKQARRTNSCSPLGELFDHGCDSLSTVFMAVGASIAARLGTYPDWFFSRSFYLGCLVFYCAHWQTYVSGMLRFGKVDVTEIQIALVIVFVLSAFGGATMWGDYTIPILEIKLKILPVLGFLGGVIFSCSNYSHVILHGGVGKNGSTIAGTSVLSPGTPHMGLIIILAIMIYXKVRQLMVFXKSIPCLXYPQCLGCVFAKVSQKISGSSHDQK

SEQ ID NO: 53046 - protein, 363 aa, Homo sapiens
  DOMAIN (102)..(124): CHROMOSOME CONDENSATION REGULATOR RCC1 SIGNATURE domain identified by eMATRIX, accession number PR00633H, p-value=9.416e- 10, raw score of 15.10
  DOMAIN (106)..(191): Regulator of chromosome condensation (RCC1) domain identified by PFam, accession name RCC1, E-value=1.2e-05, PFam score of 25.0
  misc_feature (1)...(363): Xaa = X or * as defined in Table 2
CPGRRRRRRPGRSRARATALPTPGPRKRGGPAGRKRERPERCSSSSGGSSSSGDEDGLELDGAPGRGKRAAQPVAAGKVGGAAVVVAEPEHTKKHVKLETLLITTEGKLWSWGRNEKAQLGHGDTKRVEAPRLTEGLSHEVIVCTCARNHTLALTETGSVFAFGENKMGQLGLGNXTDAVPSPVQIMYNSLPITKMACGYGWLGYTEQKDEMVPRLVKLFDFPGHGASQIYAGYTCSFAVSEVGGLFFWGATNTSHESTMYPKAVQDLCSWRIWSLACGKSSIIVAADESTISWGPSPTFGELGYRDHKPKSSTAAQEVKTLHGIFSEPVAMGYSHSLVIARDESETEKEKIKKLPEYSPQTL

SEQ ID NO: 53047 - protein, 470 aa, Homo sapiens
  DOMAIN (147)..(181): Regulator of chromosome condensation (RCC1) proteins domain identified by eMATRIX, accession number BL00625B, p-value=6.034e- 17, raw score of 17.69
  DOMAIN (111)..(322): Regulator of chromosome condensation (RCC1) domain identified by PFam, accession name RCC1, E-value=1.1e-18, PFam score of 70.5
  misc_feature (1)...(470): Xaa = X or * as defined in Table 2
MSLGLASERLWAGLGLPALPLADEGGECGETLFVWRSQKLEGSKCKGQLLIFGATNWDLIGRKEVPKQQAAYRNLGQNLWGPHRYGCLAGVRVRTVVSGSCAAHSLLITTEGKLWSWGRNEKGQLGHGDTKRVEAPRLIEGLSHEVIVSAACGRNHTLALTETGSVFAFGENKMGQLGLGNQTDAVPSPAQIMYNGQPITKMACGAEFSMIMGLQRKPLFLWGALNMGQLGTQLRMGKFHSPGAQRIEYDCELVPRRVAIFIEKTKDGQILPVPNVVVRDVACGANHTLVLDSQKRVFSWGFGGYGRLGHAEQKDEMVPRLVKLFDFPGRGASQISCWLHTCSLCCQXNGWSVFLGGHQHLPXIYHVPQKQCRTSAAGESGTLACGKSSIIVAADESTISWGPSPTFGELGYGDHKPKSSTAAQEVKTLDGIFSEQVAMGYSHSLVIARDESETEKEKIKKLPEYNPRTL

SEQ ID NO: 53048 - protein, 80 aa, Homo sapiens
  misc_feature (1)...(80): Xaa = X or * as defined in Table 2
MLLCSLSEAICFFLDVSLCGPALPGQQEAGGLPVGRLLLCQAPGAGPAWPGRGDSAWRPPXSXCPLXAALDNSXXLXCCC

SEQ ID NO: 53049 - protein, 63 aa, Homo sapiens
HKAEAEHMSYHEIVDPGRRFRPMPAVRTFALTSGLAVILDFLLQMSAFVARVDDFVLPLPPFL

SEQ ID NO: 53050 - protein, 982 aa, Homo sapiens
  misc_feature (1)...(982): Xaa = X or * as defined in Table 2
MAEAGLRGWLLWALLLRLAQSEPYTTIHQPGYCAFYDECGKNPELSGSLMTLSNVSCLSNTPARKITGDHLILLQKICPRLYTGPNTQACCSAKQLVSLEASLSITKALLTRCPACSDNFVNLHCHNTCSPNQSLFINVTRVAQLGAGQLPAVVAYEAFYQHSFAEQSYDSCSRVRVPAAATLAVGTMCGVYGSALCNAQRWLNFQGDTGNGLAPLDITFHLLEPGQAVGSGIQPLNEGVARCNESQGDDVATCSCQDCAASCPPXPAPRPSTPPSTWRQMPGSLVLIIILCSVFAVVTILLVGFRVAPARDKSKMVDPKKGTSLSDKLSFSTHTLLGQFFQGWGTWVASWPLTILVLSVIPVVALAAGLVFTELTTDPVELWSAPNSQARSEKAFHDQHFGPFFRTNQVILTAPNRSSYRYDSLLLGPKNFSGILDLDLLLELLELQERLRHLQVWSPEAQRNISLQDICYAPLNPDNTSLYDCCINSLLQYFQNNRTLLLLTANQTLMGQTSQVDWKDHFLYCANAPLTFKDGTALALSCMADYGAPVFPFLAIGGYKGKDYSEAEALIMTFSLNNYPAGDPRLAQAKLWEEAFLEEMRAFQRRMAGMFQVTFMAERSLEDEINRTTAEDLPIFATSYIVIFLYISLALGSYSSWSRVMVDSKATLGLGGVAVVLGAVMAAMGFFSYLGIRSSLVILQVVPFLVLSVGADNIFIFVLEYQRLPRRPGEPREVHIGRALGRVAPSMLLCSLSEAICFFLGALTPMPAVRTFALTSGLAVILDFLLQMSAFVALLSLDSKRQEASRLDVCCCVKPQELPPPGQGEGLLLGFFQKAYAPFLLHWITRGVVVPSQLLLFLALFGVSLYSMCHISVGLDQELALPKLKKPSVETVSSGQVLENPPSSGEEFGHLAALSSKWHPKPALGTWALTWWTSPPGDRVPGAFHPDEEDEGDCVRKCCQSAINSTTSLSSSFCPTSPAMPA

SEQ ID NO: 53051 - protein, 35 aa, Homo sapiens
ACDHALCSGRITNVFYEQYLTILPEGLFMLSLCLV

SEQ ID NO: 53052 - protein, 1344 aa, Homo sapiens
  DOMAIN (901)..(917): OESTROGEN RECEPTOR SIGNATURE domain identified by eMATRIX, accession number PR00543D, p-value=1.355e-09, raw score of 10.87
  misc_feature (1)...(1344): Xaa = X or * as defined in Table 2
MAEAGLRGWLLWALLLRLAQSEPYTTIHQPGYCAFYDECGKNPELSGSLMTLSNVSCLSNTPARKITGDHLILLQKICPRLYTGPNTQACCSAKQLVSLEASLSITKALLTRCPACSDNFVNLHCHNTCSPNQSLFINVTRVAQLGAGQLPAVVAYEAFYQHSFAEQSYDSCSRVRVPAAATLAVGTMCGVYGSALCNAQRWLNFQGDTGNGLAPLDITFHLLEPGQAVGSGIQPLNEGVARCNESQGDDVATCSCQDCAASCPPXPAPRPSTPPSTWRQMPGSLVLIIILCSVFAVVTILLVGFRVAPARDKSKMVDPKKGTSLSDKLSFSTHTLLGQFFQGWGTWVASWPLTILVLSVIPVVALAAGLVFTELTTDPVELWSAPNSQARSEKAFHDQHFGPFFRTNQVILTAPNRSSYRYDSLLLGPKNFSGILDLDLLLELLELQERLRHLQVWSPEAQRNISLQDICYAPLNPDNTSLYDCCINSLLQYFQNNRTLLLLTANQTLMGQTSQVDWKDHFLYCANAPLTFKDGTALALSCMADYGAPVFPFLAIGGYKGKDYSEAEALIMTFSLNNYPAGDPRLAQAKLWEEAFLEEMRAFQRRMAGMFQVTFMAERSLEDEINRTTAEDLPIFATSYIVIFLYISLALGSYSSWSRVMVDSKATLGLGGVAVVLGAVMAAMGFFSYLGIRSSLVILQVVPFLVLSVGADNIFIFVLEYQRLPRRPGEPREVHIGRALGRVAPSMLLCSLSEAICFFLGALTPMPAVRTFALTSGLAVILDFLLQMSAFVALLSLDSKRQEASRLDVCCCVKPQELPPPGQGEGLLLGFFQKAYAPFLLHWITRGVVVPSQLLLFLALFGVSLYSMCHISVGLDQELALPKDSYLLDYFLFLNRYFEVGAPVYFVTTLGYNFSSEAGMNAICSSAGCNNFSFTQKIQYATEFPEQSYLSLPASSWVDDFIDWLTPSSCCRLYISGPNKDKFCPSTVNSLNCLKNCMSITMGSVRPSVEQFHKYLPWFLNDRPNIKCPKGGLAAYSTSVNLTSDGQVLASRFMAYHKPLKNSQDYTEALRAARELAANITADLRKVPGTDPAFEVFPYTITNVFYEQYLTILPEGLFMLSLCLVPTFAVSCLLLGLDLRSGLLNLLSIVMILVDTVGFMALWGISYNAVSLINLVSAVGMSVEFVSHITRSFAISTKPTWLERAKEATISMGSAVFAGVAMTNLPGILVLGLAKAQLIQIFFFRLNLLITLLGLLHGLVFLPVILSYVGPDVNPALALEQKRAEEGGGSSHGGPLAQITPPESPQLTTSMSTTALKVLSKVLVPSATSCPTMGGSSDTARGPV

SEQ ID NO: 53053 - protein, 60 aa, Homo sapiens
  misc_feature (1)...(60): Xaa = X or * as defined in Table 2
ASSESDSTPCRXMAYSWPPNSNSSHCIKELPLFMGKIPAASXDGGPQGLAIFPPGVIVGI

SEQ ID NO: 53054 - protein, 51 aa, Homo sapiens
FHIRDHFVPQRSRTTRFRPSFRCMVRRYAKGLGRILKPSLAFPGTDCSSKC

SEQ ID NO: 53055 - protein, 151 aa, Homo sapiens
  misc_feature (1)...(151): Xaa = X or * as defined in Table 2
PARRGRDECXVLAPFRATRPPSRRTRXSKATYPTPSNDQTRTIRTSRERASMPRSAEPKRPTIPRLHPSPRGIVTVSSRPRSHALPVSHIHSCHSRTAISDNQVPAFLQVYGEEVRKRAGEVTQAITGFPRYRLFFKMLRCHRSIQVTAST

SEQ ID NO: 53056 - protein, 51 aa, Homo sapiens
  misc_feature (1)...(51): Xaa = X or * as defined in Table 2
RCRSGPAPRSAPGARPASPSPPAAGTCRXRPAGHCPAGAAGLLSLCPRCST

SEQ ID NO: 53057 - protein, 109 aa, Homo sapiens
  misc_feature (1)...(109): Xaa = X or * as defined in Table 2
QQNPTNCLPPASRXSKTXRARSTAGPTRPHLHHPAAPAPGSPACAGEGRLQRHSPNPLYFNWKKQRFAAKPHFRRPQSSLNPQQWLLAGLLQEESSSLGTDTAPLHSLG

SEQ ID NO: 53058 - protein, 369 aa, Homo sapiens
  DOMAIN (50)..(69): Eukaryotic  RNA-binding region RNP-1 proteins domain identified by eMATRIX, accession number BL00030A, p-value=1.000e- 12, raw score of 14.39
  DOMAIN (50)..(227): RNA recognition motif. domain identified by PFam, accession name rrm, E-value=1.9e-20, PFam score of 81.4
  misc_feature (1)...(369): Xaa = X or * as defined in Table 2
FCLDDLSSAINEHLSARGRRRRSIVKVSLHPAVIGLKSKFLKKPDQLRKLFIGGLSFETTDESLRSHFEQWGTLTDCVVMRDPNTKRSRGFGFVTYATVEEVDAAMNARPHKVDGRVVEPKRAVSREDSQRPGAHLTVKKIFVGGIKEDTEEHHLRDYFEEIILNSMGKLEVVEIHXLDRGQWPRKRGFAFVTFDGHDSVDKIVIQKYHTVNGHNCEVRKALSKQEMASASSSQRGRVGSGNFWCGRTNGFGGNDNFGRGGNFSWSVVAFGGSRGGVWIWVAVGDGYNGFGNDGSHFGGGGSYNDFGDFHNQSSKFWTPXRGGNLGGQKLWPPMGGGGQYFAKPTKPKVAYGRFPAAASSYGKWPEDFN

SEQ ID NO: 53059 - protein, 189 aa, Homo sapiens
  misc_feature (1)...(189): Xaa = X or * as defined in Table 2
MGKMSPGHVRDFHGSCHHNRPGGPGGKSGFMGQALGPGGCVQPRDLVLCVSATPAMAERGQCGAQAVASEGGSPRPWQLPCGVEPADFRRYMETPGCPGRNLPAGAGPLXRTSAGAVWKGNVRSESPPQSLYWGTASGAVRRGPPSSRNQNGRSTDSLHCMPGKDTQPNPXKQPGGRLHPAKPQGRSCP

SEQ ID NO: 53060 - protein, 52 aa, Homo sapiens
GPGNPGRRFRASATRRIGPSPSLSPPPPPAAVGAISERWWIAWQTVKQILDV

SEQ ID NO: 53061 - protein, 132 aa, Homo sapiens
  misc_feature (1)...(132): Xaa = X or * as defined in Table 2
VGVCEKRGAPGPPLAPGPARGPVAAAVPPGPGASRARPXDAAAAAGGRGPPEQXTXKAWGLHPGTGSLRGHPAPMXPLLRAFPRSPLHPLPPPHPLPRRAASNPGTSKCRTAAGTRQWGGRQSQLQRCQCLR

SEQ ID NO: 53062 - protein, 135 aa, Homo sapiens
  misc_feature (1)...(135): Xaa = X or * as defined in Table 2
MGKMSPGHVRDFHGRPSHHRPRGPGGKSGFVGKVQGPHAVCSLGTWCLVSQPLHPGXKGPMYSSGVASEGGSPKPWQLPRGVEPMGAQKSRTEVWEPLPRFQKIYGNTWMPRIPMCCARDPGGAKGGCSNPSQRR

SEQ ID NO: 53063 - protein, 236 aa, Homo sapiens
  DOMAIN (115)..(151): Synapsins proteins domain identified by eMATRIX, accession number BL00415Q, p-value=4.223e-09, raw score of 2.23
  misc_feature (1)...(236): Xaa = X or * as defined in Table 2
GPRHADPANFSARNLSRPXDAPGRVQDPRPQAPQLPPGLGAPSRVRRPPPRRPVDRTLPGGPRPPAAAAGPTGGRGSPRAGGTAAATGPRAGPGARGAAGSAPFLTDPNMGRPPPPATTTPPGAATAPGPREEAPGKFRVSPPGPSGAGGPPTRASPTPTAAGGGGGDSEGEGPILLVADAGPDSARSPPGLPGCVLSAAPRSRRDPDAVGGLAASAAARRLNTTWKLPQLGASTL

SEQ ID NO: 53064 - protein, 52 aa, Homo sapiens
KMVDRLANSEANTRRISIVENCFGAAGQPLTIPGRVLIGEGVLTKLCRKKSK

SEQ ID NO: 53065 - protein, 249 aa, Homo sapiens
  DOMAIN (171)..(184): 0 kw ZK63212 YDR313C ENDOSOMAL III. domain identified by eMATRIX, accession number DM01970B, p-value=4.508e-15, raw score of 8.60
  DOMAIN (150)..(216): FYVE zinc finger domain identified by PFam, accession name FYVE, E-value=3.2e-27, PFam score of 101.5
  misc_feature (1)...(249): Xaa = X or * as defined in Table 2
KMVDCLANSEANTRRISIVENCFGAAGQPLTIPGRVLIGEGVLTKLCRKKPKARQFFLRNDIVVXGNIVIQKKKYIKQHIIPLENVTIDSIKDEGDLRNGWVIKTPTKSFAVYAATATEKSEWMNHINKCVTDLLSKSGKTPSNEHAAVWVPDSEATVCMRCQKAKFTPVNRRHHCRKCGFVVCGPCSEKRFLLPSQSSKPVRICDFCYDLLSAGDMATCQPARSDSYSQSLKSPLNDMSDDDDDDDMQ

SEQ ID NO: 53066 - protein, 384 aa, Homo sapiens
  DOMAIN (5)..(57): ELEMENT TRANSPOSABLE INSERTION PROTEIN TRANSPOSITION DNA domain identified by eMATRIX, accession number PD02455C, p-value= 5.966e-24, raw score of 29.23
  DOMAIN (8)..(88): Integrase core domain identified by PFam, accession name rve, E-value=9.2e-19, PFam score of 68.9
ARRGDVPSDQGSHYTSRQFRQLLWRYRIRQSMSRRGNCWDNSPMERFFRSLKNEWVPATGYVSFSDAAHAITDYIVGYYSALRPHEYNVAVAGDHPAAVQVTMTLVNDTGFDPVFSGSIGDSWRQQLCTPSYCCERASSRAIVPPAYLTVHLHRLQKRSPTKQRISVAAAASVHGLAPLHLPRRPTRPLFFPDISRFKDPDAALPEIALYVGGKLFQSIFLCTTFVNTLASGLASHASVSRLLYVMGRDNVFPERVFGYVHPKWRTPALNVIMVGIVALSALFFDLVTATALINFGALVAFTFVNLSVFNHFWRRKGMNKSWKDHFHYLLMPLVGALTVGRQYAPHNLHRRFPLPELTPLPLMIQEKIFHETLTLRRANITGNP

SEQ ID NO: 53067 - protein, 145 aa, Homo sapiens
  misc_feature (1)...(145): Xaa = X or * as defined in Table 2
DRTNIMVGYHQTNQKTDTGKTPTRRPVLVDHNRLPEGSRGRLAVAVAGDHPAAVQVTMTLVNDTGFDPVFSGSIAESWGQHSGTPSYCXDWEAATMLRAFPLAKKGETKDLRQFPNIDNAYMELGTNRADAVLHDTPNILYFMQF

SEQ ID NO: 53068 - protein, 29 aa, Homo sapiens
CTNLKLRKRPSQTLRSRLKQSQWEQNPVS

SEQ ID NO: 53069 - protein, 391 aa, Homo sapiens
  misc_feature (1)...(391): Xaa = X or * as defined in Table 2
MGAEPSLLTSLGTLWSGERFQCMRAKIWERSRKGRRFSTDVISPTKDSFAGPFQPISDTLVQHQRIYGLKVCVLPDPCKIRILKPNPQCVGKWEEEVAENEIQVFGGERFDINKYSKSPPPPTPQPLYLTAGFASCRNHRKSEELREGKGESPGKSKPFHLQANFTVALVTTLQGDKHSQEAFIRPVAKAKTTCTYLSNVCEMKDFKRINCPDPFHKMAPKAKKEAPAPPKAEAKAKGFKGPRRQVLKGVHNHKKRKRKKERSRTFTHLSRRPGRPLRIRRQPKYPSGRAAPRRNKLDHYAIIKFPLTTESAMKKIEDNNTLVFIVELLKATTKNQIKQGCXRSLYDIDVGQGSTPWISAWMGEKKGICSDLAPDLPIAFGMFANKIWGFI

SEQ ID NO: 53070 - protein, 258 aa, Homo sapiens
  DOMAIN (197)..(237): Interleukin-1 proteins domain identified by eMATRIX, accession number BL00253D, p-value=2.286e-11, raw score of 25.67
  DOMAIN (198)..(258): Interleukin-1 domain identified by PFam, accession name interleukin-1, E-value=6.2e-09, PFam score of 36.0
  misc_feature (1)...(258): Xaa = X or * as defined in Table 2
RVEWRWYNVLPCLDVHSGPVDRRSHVMTAAEKPPFCPAWGQAVSQQSCALEPRTGEEGGKGIQGPASGLFPTGEEISVVPNRWLDASLSPVILGVQGGSQCLSCGVGQEPTLTLEVRLGASSLGTQPQMLSLLKPGSPQPWCCGTPXQDSVDGSFASSLRILAKALLCGPGFCPSLTLPSFCRKPVTIMELYLGAKESKSFTFYRRDMGLTSSFESAAYPGWFLCTEPEADQPVRLTQLPENGGWNAPITDFYFQQCD

SEQ ID NO: 53071 - protein, 26 aa, Homo sapiens
  misc_feature (1)...(26): Xaa = X or * as defined in Table 2
KRDHFXSRLQQVSRSVRWSSSATDSR

SEQ ID NO: 53072 - protein, 157 aa, Homo sapiens
RKIVSARKTGRPRPSAPGWRGNTDARHRWPLHYFLISAPAVTGERRVPRALLPSWKQDFRGCVTACRRRAGTWTPPRPRGSGSRAMAGNCGARGALSAHTLLFDLPPALLGELCAVLDSWDSALGWRGLGESGGTGPGPAGEAQRRRGGPARASPLH

SEQ ID NO: 53073 - protein, 46 aa, Homo sapiens
RRYCPRSWFPLARHLGCRTHQEFPAHGCVSPLRVSALSLASRNLVG

SEQ ID NO: 53074 - protein, 622 aa, Homo sapiens
  DOMAIN (378)..(401): TYROSINE KINASE CATALYTIC DOMAIN SIGNATURE domain identified by eMATRIX, accession number PR00109D, p-value=8.085e-13, raw score of 17.04
  DOMAIN (212)..(467): Eukaryotic protein kinase domain identified by PFam, accession name pkinase, E-value=1.1e-20, PFam score of 78.6
  misc_feature (1)...(622): Xaa = X or * as defined in Table 2
ACRRRAGTWTPPRPRGSGSRAMAGNCGARGALSAHTLLFDLPPALLGELCAVLDSCDGALGWRGLAERLSSSWLDVRHIEKYVDQGKSGTRELLWSWAQKNKTIGDLLQVLQEMGHRRAIHLITNYGAVLSPSEKSYQEGGFPNILFKETANVTVDNVLIPEHNEKGVLLKSSISFQNIIEGTRNFHKDFLIGERGEIFGGYQEGKIQTLTYAVKLFKQEKKMQCKKHWKRFLSELEVLLLFHHPNILELAAYFTETEKFCLIYPYMRNGTLFDRLQCVGDTAPLPWHIRIGILIGISKTIHYLHNVQPCSVICGSISSANILLDDQFHPKLTDFSMAHFRSPLEHQSCCINMPSSSRKHLWYMPEEYIRQGKLSIKTDVYSFGIVIMEVLTGCRVVLDDPKHIQLRDLLRELMEKRGLDSCLSFLDKKVPPCPRNFSAKLFCLAGRCAATRAKLRPSMDEVXRALESTQASLYFAGDPPTSLKALRGPSPLFLEKVTSIPVEDDEKPNNNLLPSXXKALRMKRWPQKTPFECSQPEVWFLSLEQKAREARENEEACNMPSSSCEESWFPKYIVPSQDLRPLXGKXKILSSQASGHSCRTKPVESSCSSKFSWDEYEQYKKE

SEQ ID NO: 53075 - protein, 519 aa, Homo sapiens
  DOMAIN (401)..(478): Domain present in Hsp70 regulators domain identified by PFam, accession name BAG, E-value=2.8e-29, PFam score of 110.7
  misc_feature (1)...(519): Xaa = X or * as defined in Table 2
RWERGGKRFRAADPMSALRRSGYGPSDGPSYGRYYGPGGGDVPVHPPPPLYPLRPEPPQPPISWRVRGGGPAETTWLGEGGGGDGYYPSGGAWPEPGRAGGSHQEQPPYPSYNSNYWNSTARSRAPYPSTYPVRPELQGQSLNSYTNGAYGPTYPPGPGANTASYSGAYYAPGYTQTSYSTEVPSTYRSSGNSPTPVSRGIYPQQDCQTEAPPLRGQVPGYPPSQNPGMTLPHYPYGDGNRSVPQSGPTVRPQEDAWASPGAYGMGGRYPWPSSAPSAPPGNLYMTESTSPWPSSGSPQSPPSPPVQQPKDSSYPYSQSDQSMNRHNFPCASVHQYESLGDQXTMDDSRILLDSPSPSIVPEPSACMGNAHPVTHPNNQDQSSSLPEECVPSDESTPPSIKKIIHVLEKVQYLEQEVEEFVGKKTDKAYWLLEEMLTKELLELDSVETGGQDSVRQARKEAVCKIQAILEKLEKKRIMKGFITKWKPVTNLTKEHLIWLITLFLKCLLMTRSNTFQLFL

SEQ ID NO: 53076 - protein, 66 aa, Homo sapiens
  misc_feature (1)...(66): Xaa = X or * as defined in Table 2
TPVPRALRSPAGLEGSHLSSISTMMPAVMSVGKVTENGGSPQGIKSPSKPPGPNRIGXRNQVSVHT

SEQ ID NO: 53077 - protein, 1685 aa, Homo sapiens
  DOMAIN (1531)..(1544): PROTEIN ZINC-FINGER METAL-BINDI domain identified by eMATRIX, accession number PD00066, p-value=7.000e-14, raw score of 13.92
  DOMAIN (65)..(1566): Zinc finger, C2H2 type domain identified by PFam, accession name zf-C2H2, E-value=2.2e-68, PFam score of 240.6
RQVRPAGLEGSDLSSINTMMSAVMSVGKVTENGGSPQGIKSPSKPPGPNRIGRRNQETKEEKSSYNCPLCEKICTTQHQLTMHIRQHNTDTGGADHSCSICGKSLSSASSLDRHMLVHSGERPYKCTVCGQSFTTNGNMHRHMKIHEKDPTSATATAPGRGDFASAKSSKRKLSHDAESEREDPAPAKKMVEDGQSGDLEKKADEVFHCPVCFKEFVCKYGLETHMETHSDNPLRCDICCVTFRTHRGLLRHNALVHKQLPRDAMGRPFIQNNPSIPAGFHDLGFTDFSCRKFPRISQAWCETNLRRCISEQHRFVCDTCDKAFPMLCSVALHKQTHVAADQGQEKPQATPLPGDALDQKGFLALLGLQHTKDVRPAPAEEPLPDDNQAIQLQTLKCQLPQDPGCTNLLSLSPFEAASLGGSLTVLPATKDSIKHLSLQPFQKGFIIQPDSSIVVKPISGESAIELADIQQILKMAASAPPQISLPPFSKAPAAPLQAIFKHMPPLKAKPLVTPRTVVGHLHAPASHQRPAGFPWLYQPQPAATAPEAPQRLTGGGLQRPPAAVQVRDPAPRGHAALPAAQPRAELPGQPEMKTQLEQDSIIEALLPLSMEAKIKQEITEGELKAFMTAPGGKKTPAMRKVLYPCRFCNQVFAFSGVLRAHVRSHLGISPYQCNICDYIAADKAALIRHLRTHSGERPYICKICHYPFTVKANCERHLRKKHLKATRKDIEKNIEYVSSSAAELVDAFCAPDTVCRLCGEDLKHYRALRIHMPTHCGRGLGGGHKGRKPFECKECSAAFAAKRNCIHHILKQHLHVPEQDIESYVLAADGLGPAEAPAAEASGRGEDSGCAALGDCKPLTAFLEPQNGFLHRGPTQPPPPHVSIKLEPASSFAVDFNEPLDFSQKGLALVQVKQENISFLSPSSLVPYDCSMEPIDLSIPKNFRKGDKDLATPSEAKKPEEEAGSSEQPSPCPAPGPSLPVTLGPSGILESPMAPAPAATPEPPAQPLQGPVQLAVPIYSSALVSSPPLVGSSALLSGTALLRPLRPKPPLLLPKPPVTEELPPLASIAQIISSVSSAPTLLKTKVADPGPASTGSNTTASDSLGGSVPKAATTATPAATTSPKESSEPPAPATGPEAASPTEQGPAGTSKKRGRKRGMRSRPRANSGGVDLYSSGEFASIEKMLATTDTNKFSPFLQTAEDNTQDEVAGAPADHHGPSDEEQGSPPEDKLLRAKRNSYTNCLQKITCPHCPRVFPWASSLQRHMLTHTDSQSDAGDCSRRGRSGYDLTSRDREQPSEGATELRQVAGDAPVEQATAETASRCTGKSTGVGRAMSRRRSMALRRALGTPTRKRTRRATRAWTWTSPPSSWTSSWRRATARQAAGGAASQEQKLSSDTCGKSFKFLGTLSRHRKAHGRPGGPRTRREMAPALQRRGPSPPLNRRRSPPRPRQRWWSRPRVPGRPRPEKLAEETEGPSDGESAAEKRSSEKSDDDKKPKTDSPKSVASKADKRKKVCSVCNKRFWSLQDLSRHMRSHTGERPYKCQTCERTFTLKHSLVRHQRIHQKARHAKHHGKDSDKEERGEEDSENESTHSGNNAVSENEAELAPNASNHMAVTRSRKEGLASATKDCSHREEKVTQGGRLSLARVTLTQRARRPWGRTCWSRAARGLPTQSWPQLMAPPSSS

SEQ ID NO: 53078 - protein, 90 aa, Homo sapiens
GSQYLLTDPPLLINHLILTNSSSRPGPFAYFCACYLLILSSKGRGCIHLAETRTKKDINRIGNSQLVLKLKCSELWSVPPLTETNNPPSC

SEQ ID NO: 53079 - protein, 73 aa, Homo sapiens
FLQIYWRIMQCCQHWMQSGATVKKGKPELRKKVHPAVVCLFLQIYVGEIIANGWPRHLDANPGGHKVCKTPFA

SEQ ID NO: 53080 - protein, 46 aa, Homo sapiens
WFSRFPKGRRSSANEPSQRPAPSAPAAGHTAARTCASPRLCSPGLR

SEQ ID NO: 53081 - protein, 43 aa, Homo sapiens
  misc_feature (1)...(43): Xaa = X or * as defined in Table 2
NCPMCWPGQSPRVPSTXGRRNPPPKRRSVSAESXRHWPQSPSP

SEQ ID NO: 53082 - protein, 53 aa, Homo sapiens
  misc_feature (1)...(53): Xaa = X or * as defined in Table 2
QEPMRMCTMLANSSPSSSQATPPGLXSWNQPSLPARTLSRHEWTSCLGSSANL

SEQ ID NO: 53083 - protein, 55 aa, Homo sapiens
LFPHDGIKHKGKENPPKGPPPPTHPQTPPRPADAPLVATKSTLDQAWALLAVATS

SEQ ID NO: 53084 - protein, 27 aa, Homo sapiens
  misc_feature (1)...(27): Xaa = X or * as defined in Table 2
XCRSSAVTRYPSSKRCGSIKGSPRVFE

SEQ ID NO: 53085 - protein, 785 aa, Homo sapiens
MVGSRRISGVIPLPFTRRAGIFSDPRANMQPLWAPVPPATFVPTSLPPVPTARPPTSASCHCQQVPCAGLEVALPGNRTICWLSLWPSWQLDEDAQSPALESSSIRQFPTAPRSGYPGTLCPSFLFGPRPRTCEYHSKPVLCAPSSRASPSSATTLSTRTLWGPGAGSHPFGVHNTRLSPDLCPGKIVLRALKESGAGMPEQHKDPRVQENPDDQRTVPEVTGDARSAFWPLRDNGGPSPFVPRPGPLQTDLHAQSSEIRYNHTSQTSWTSSSTKRNAISSSYSSTGGLPGLKQRRGPASSRCQLTLSYSKTVSEDRPQAVSLGHTRCEKGADTAPGQTIAPTASRPHINTSLHVEDKAISDCRPSRPSHTLSSLATGASGGPPVSKAPTMDAQQDRPKSQDCLGLVAPLASAAEVPATAPVSGKKHRPPGPLFSSSDPLPANSSHSRDSAQVTSMIPAPFTAASRDAGMRRTRSAPAAAAAAPPPSTLNPTSGSLLNEWMEAPHISWPQPQLQHVPRGQNVRYNQRSQTSRTRSCPQTKCQLQLPQLYGRPPGSKAEEGPASSHCQLALSSSNTVSEDGPQAVSSGHRCENKAGTAPGQTLAPRGGSPRSQASRPHINTALHVEDKAISDCRPSRPSHTLSSLATGASGGPPVSKAPTMDAQQDRPKSQDSLGLLAPLASAAEVPSTAPVSGKKHRPPGPLFSSSDPLPATSYHSRDTAQARTTSQSLLPAADSAQPKSLHEIGVWHLPQGAFLQPLLPLPQMKLALTHWLSVTGTVRSPTGSV

SEQ ID NO: 53086 - protein, 400 aa, Homo sapiens
MPEQDKDPRVQENPDDQRRVPEVTGDARSAFRPLRDNGGLSPPFVPGPGPLQTDLHTQRLGYRVTVEDLDREKEAAFQRINSALQVEDKAISDCRLSRPSHTLSSLATGTSGLPAVSKAPSMDAQQERHKSQDCLGLLAPLAPAAEVPSTAPMSGKKHRPPGPLFSSSDPLPATSSHSQDSAQVTSLIPAPFPAASMDAGMRRTSPGTSAPAAAAAPPPSTLNPTLGSLLEWIEALHISGPQPQLQQVPRGQNQRSQTSRTSSCPKRKCHLQLLQLYGRPPGTKAEEGPASSHCQLTLSSSNTVSEDGPQAVSSGHTHCEKTADTAPGQTLAPRGGFPRSQASRPCRHKFPLLPRRRGEPLMLPPPLELGYRVTAEDLDREKEVAFQRIKSALQVEDKAI

SEQ ID NO: 53087 - protein, 587 aa, Homo sapiens
YHSKPVLCAPSSRASPSSATTLSTRTLWGPGAGSHPFGVHNTRLSPDLCPGKIVLRALKESGAGMPEQHKDPRVQENPDDQRTVPEVTGDARSAFWPLRDNGGPSPFVPRPGPLQTDLHAQSSEIRYNHTSQTSWTSSSTKRNAISSSYSSTGGLPGLKQRRGPASSRCQLTLSYSKTVSEDRPQAVSLGHTRCEKGADTAPGQTIAPTASRPHINTSLHVEDKAISDCRPSRPSHTLSSLATGASGGPPVSKAPTMDAQQDRPKSQDCLGLVAPLASAAEVPATAPVSGKKHRPPGPLFSSSDPLPANSSHSRDSAQVTSMIPAPFTAASRDAGMRRTRSAPAAAAAAPPPSTLNPTSGSLLNEWMEAPHISWPQPQLQHVPRGQNVRYNQRSQTSRTRSCPQTKCQLQLPQLYGRPPGSKAEEGPASSHCQLALSSSNTVSEDGPQAVSSGHRCENKAGTAPGQTLAPRGGSPRSQASRPHINTALHVEDKAISDCRPSRPSHTLSSLATGASGGPPVSKAPTMDAQQDRPKSQDSLGLLAPLASAAEVPSTAPVSGKKHRPPGPLFSSSDPLPATSYHSRDTAQ

SEQ ID NO: 53088 - protein, 587 aa, Homo sapiens
  misc_feature (1)...(587): Xaa = X or * as defined in Table 2
GSVAWSPFSPSPSSLCLWDLPVAPTLWGPGAGSHPFGVHNTRLSPDLCPGKIVLRALKESGAGMPEQDKDLRVQENPDDQRRVPEVTGDARSAFLAPAGQWSPLSLCAQSRASADIPPCPEVRNQIXPDIPDHLDELMHQPKCHLQLLQLCGRLAGAKVEEGASGAKEQGRDAXAGQGTPESQQNPDDQRTVPEVTGDARSTVRPLRDSGGLSPFVPRPGPLQTDLHAQSSEIRYNQTSQTSWTSSSTKRNAISSSYSSTGGLLGLKQRRGPASSRCQLTLSYSKTVSEDRPQAVSSGHTRCEKAADTAPGQTLAPRGGSPRSQGSRPRRRKIALLPHRXGELQVEDKAILDCRPSWPSHTLSSLATGASGEPPVSKAPTMDAQQDRPKSQDCLGLVAPLASAAEIPSTAPVSGKKHRPPGPLFSSSDPLPATSSHSRDSAQVTSLIPAAFTAASMDVGMRRTRPGTSAPAAAAAAPPPSTLNPTSGSLLNEWMEALHISGPQPQLQQVPRGQNVRYNQRSQTSRTRSCPQTKCQLELPQLYGRPPGTKGCRHEKNVLCSKLFEGFGFIFVGFFFFAYMGILQLLII

SEQ ID NO: 53089 - protein, 548 aa, Homo sapiens
  misc_feature (1)...(548): Xaa = X or * as defined in Table 2
RQPSTSGSSRSCPCARRSWWARTARSGWWWELLGARRSPQTLHCPQATLITLPCPRPSSTTSGSAMTXRGPWRSPGCTTSFCPTSRPVERNIDQTDLHAQRSEIRYNQTSQISWTSSCTNRNAISSSYSSTGGLPGLKRRRGPASSHCQLTLSSSKTVNSDKFDANDPILKDQTQEWSGSATFTSDGKIRLFYTDYSGKHYGKQSLTTAQVNVSKSDDTLKINGVEDHKTIFDGDGKTYQNVQQFIDEGNYTSGDNHTLRDPHYVEDKGHKYLVFEANTGTENGYQGEESLFNKAYYGGGTNFFRKESQKLQQSAKKRDAELANGALGIIELNNDYTLKKVMKPLITRGSSRPSIREDENGRSQKPVHPEGDMTMNIKKIVNQATVLTFTTALLAGGATQAFAKENNQKAYKETYGVSHITRHDMLQIPKQQQNEKYQVPQFDQSTIKNIESAKGLDVWDSWPLQNADGTVAEYNGYHVVFALAGSPKDADDTSIYMFYQKVGDNSIDSWKNAGRVFKDSDKFDANDPILKDQTQEWRGEAFDACHLP

SEQ ID NO: 53090 - protein, 178 aa, Homo sapiens
GSVAWSPFSPSPSSLCLWDLPVAPAPGLSGRPSYKHPHTRHQWCQDNSKKVFRDPARPVFHPGDSVFNFTAQIVLRALKESGAGMPEQHKDPRVQENPDDQRTVPEVTGDARSAFWPLRDNGGPSPFVPRPGPLQTDLHAQSSEIRYNHTSQTSWTSSSTKRNAISSSYAIAGPPTLK

SEQ ID NO: 53091 - protein, 798 aa, Homo sapiens
  misc_feature (1)...(798): Xaa = X or * as defined in Table 2
MDKYLLHGPPRPPPAIASRCLARVPGCAYSSIMVALSLVPLCAHMPTPSGLEVALPGNRTICWLSLWPSWQLDEDAQSPALESSSIRQFPTAPRSGISPLCAPHSCLGQGRGPASHPTSTQTLDISGVKTTPRRFSVILQDLCSILGDSCLQFHLHRVPQQVSAVLLRVSGASPSPATTLSTRTLWGPGAGSHPFGVHNTRLSPDLCPGKIVLRALKESRAGMPEQDKDPRVQENPDDQRTVPEVTGDARSAFWPLRDNGGPSPFVPRPGPLQTDLHAQSSEIRYNHTSQTSWTSSNTKRNAISSSYSSTGGLPGLKQRRGPASSRCQLTLSYSKTVSEDRPQAVSSGHTRCEKGADTSPGQTIAPTGGSPRSQDSRPRRRKIPLLPRRRGEPLMLPPPLELGYRVTAEDLHLEKETAFQRINSALHVEDKAIPDCRPSQPSHTLSSLATGASGGPPVSKAHTMDAQQHRPKSQDCLGLLAPLASAAEVPSTAPVSGKKHRPPGPLFSSSDPLPATSYHSRDSAQVTSLIPAPFTAASSDAGMRRTRPGTSAPAAAAAAPPPSTLNPTSGSLLNEWMEAPHISWPQPQLQHVSRGQNVRYNQRSQTSRTRSCPPRKCQLQLPQLYGRPPATKAEEGPASSHCQLAHSSSNTVSEDGPQAVSSGHTRCEKKAGASRWASRFXSTHYGCTAGQTQVPRLPGPTGPPSICCRGLLYSSRVWEEAQTTRTPVLLLRSPSCHLFPLRGLSPGHLADSCPLHTCKQGCRHQKNVSCSKLFEGKVLYIQSSKETEYPRHHQSSKT

SEQ ID NO: 53092 - protein, 1130 aa, Homo sapiens
MDKYLLHDPPRPPPAIASRCLARVPGCAYSSIMVALSLVPLCAHMPTPSGLEVALPGNRTICWLSLWPSWQLDEDAQSPALESSSIRQFPTAPRSGYPGTLCPSFLFGPRPRTCEYHSKPVLCAPSSRASPSSATTLSTRTLWGPGAGSHPFGVHNTRLSPDLCPGKIVLRALKESGAGMPEQDKDPRVQENPDDQRTVPEVTGDARSAFWPLRDNGGPSPFVPRPGPLQTDLHAQSSEIRYNHTSQTSWTSSSTKRNAISSSYSSTGGLPGLKQRRGPASSRCQLTLSYSKTVSEDRPQAVSLGHTRCEKGADTAPGQTIAPTGGSPRSQDSRPRRRKIPLLPRRRGEPLMLPPPLELGYRVTAEDLHLEKETAFQRINSALHVEDKAIPDCRPSRPSHTLSSLATGASGGPPVSKAPTMDAQPDKLKSQDCLGLVAALASATEVSSTAPMSGKKHRPPGPLFSSSDPLPATSSHSQDSAQVTSMIPAPFTAASRDASMRRTRPGTSAPAAAAAAPPPSTLNPTSGSLLNEWMKAPHISWPQPQLQHVPRGQNVRYNQRSQTSRTRSCPQTKCQLQLPQLYGRPPGTKAEEGPASSHCQLALSSSNTVSEDGPQAVSSGHRCENKAGTAPGQTLAPRGGSPRSQASRPHINTSLHVEDKAISDCRPSRPSHTLSSLATGASGGPPVSKAPTMDAQQDRPKSQDSLGLLAPLASAAEVPSTAPVSGKKHRPPGPLFSSSDPLPATSYHSRDTAQVTSLIPATFTAASRDAGMRRTRSAPAAATAAPPPSTLNNTSGSLLNAVDGGPSHFLASATAAARAQRSEVRYNQRSQTSRTRSCLKRNASSSSSSHSSTEGLQELKRRRGPASSHCQLAHSSSNTVSEDGPQAVSSGHRCENKAGTAPGQTLAPRGGSPRSQASRPHINSALYVEDKAISDCRPSRPSHTLSSLATGASGGPPVSKAPTMDAQQDRPKSQDCLGLVAPLASAAEVPSTAPVSGKKHRPPGPLFSSSDPLPANSSHSRDSAQVTSLIPATFTAASRDAGMRRTRPGTSAPAAAAAALPPSTLNPTSGSLLNAVDGGPSHFLASATAAARAQRSEVRYNQRSQTSRTRSCLKRNASSSSHSSTEGLQE

SEQ ID NO: 53093 - protein, 122 aa, Homo sapiens
WKMRHETRYNVLVSRGVGCHRLFFLNGVFEHLGRAFVQRRKVDTEHQLLRAAVPANQEHRGLTQSQHVDGHSLLLLTLPNSFLCQIQEPSLGSGSGALSGNVRIRPQAQEAPEEPSVLTLLW

SEQ ID NO: 53094 - protein, 72 aa, Homo sapiens
SLLVPGLTCTQRQRRCRGQRWTVQTCLTCQRSQRFLNDPGHLLWGDEPEAQLGSQADRLPEEKMQTKGSSNQ

SEQ ID NO: 53095 - protein, 118 aa, Homo sapiens
MAGPVKDREAFQRLNFVYQVSLRQGPHGDGARRPRVTAPLPQAAHCVLAQDPENQALARFYLHTERTIAKRLVLRRDPSVKEELLCRGCSSLLVPGLTCTPAPRDRCRGQRWTGTDLP

SEQ ID NO: 53096 - protein, 89 aa, Homo sapiens
  DOMAIN (19)..(56): S-100/ICaBP type calcium binding protein domain identified by eMATRIX, accession number BL00303A, p-value=9.735e-22, raw score of 21.77
  DOMAIN (20)..(63): S-100/ICaBP type calcium binding domain identified by PFam, accession name S_100, E-value=4.6e-20, PFam score of 80.1
RRPTRPQEEGGSESSTMTELETAMGLIIDVFSRYSGSEGSTQTLTKGELKVLMEKELPGFLQLSGPGLGHQHTLLLLFRSASWSRLVPQ

SEQ ID NO: 53097 - protein, 118 aa, Homo sapiens
  DOMAIN (28)..(71): S-100/ICaBP type calcium binding domain identified by PFam, accession name S_100, E-value=0.054, PFam score of 9.4
IFSALPAPRRKVGLNLAPVTEPRDQPWAMIIDVFSRYSGSRGQPRQTLTKGELKVLMEKELPGFLQSGKDKDAVDKLLKDPGRPMGDAQGGTFSEVHPCSVAAITSACHKYFEKAGLK

SEQ ID NO: 53098 - protein, 62 aa, Homo sapiens
DCGSELQAPPPPSLPGPLCPSIMPAPPYASPPMMPMMGPPFRGMMPVGLAPGPMLLQYNTCS

SEQ ID NO: 53099 - protein, 171 aa, Homo sapiens
  DOMAIN (90)..(123): PROLINE-RICH PROTEIN 3 domain identified by eMATRIX, accession number DM00215, p-value=3.898e-09, raw score of 19.43
SVWWNSNGLQSNMPKFYCDYCDTYLTHDSPSVRKTHCSGRKHKENVKDYYQKWMEEQAQSLIDKTTAAFQQGKIPPTPFSAPPPAGAMIPPPPSLPGPPRPGMMPAPHMGGPPMMPMMGPPPPGMMPVGPAPGMRPPMGGHMPMMPGPPMMRPPARPMMVPTRPGMTRPDR

SEQ ID NO: 53100 - protein, 150 aa, Homo sapiens
  DOMAIN (60)..(73): PROTEIN ZINC-FINGER METAL-BINDI domain identified by eMATRIX, accession number PD00066, p-value=3.077e-15, raw score of 13.92
  DOMAIN (15)..(150): Zinc finger, C2H2 type domain identified by PFam, accession name zf-C2H2, E-value=2.6e-19, PFam score of 77.6
  misc_feature (1)...(150): Xaa = X or * as defined in Table 2
WFLIHDRTHTGEKPYKCNECVKAFHRSTCLHAHKRTHTGEKPYECNQXGKAFNSSHSFQIHERTHTGEKPYECKECGKAFKGPSSVRRHERTHSTKKPYECKHCGKALSYLTSFHNHLGMHTGEISHTCKICGKAFYSPSVIQTHEXTHT

SEQ ID NO: 53101 - protein, 555 aa, Homo sapiens
  DOMAIN (457)..(510): S-adenosyl-L-homocysteine hydrolase proteins domain identified by eMATRIX, accession number BL00738H, p-value=2.301e- 17, raw score of 23.08
  DOMAIN (85)..(437): Zinc finger, C2H2 type domain identified by PFam, accession name zf-C2H2, E-value=3.9e-42, PFam score of 153.4
PDDRLNFQEKKASPEIKSCDSFVCGEVGLGNSSFNMNIRGDIGHKAYEYQEYGPKPCKCQQPKKAFRYHPSFRTPQRDHTGEKPYACKECGKTFISHSSIQRHVVMHSGDGPYKCKFCGKAFHCLSLYLIHERTHTGEKPYECKQCGKSFSYSATHRIHERTHIGEKPYECQQCGKAFRSASQLQIHGRTHTGEKPYECKQCGKAFGSASHLQMHGRTHTGEKPYECKQCGKSFGCASRLQMHGRTHTGEKPYKCKQCGKAFGCPSNLRRHGRTHTGEKPYKCNQCGKKWKDQNIEYEYQNPRRNFRSLIEGNVNEIKEDSHCGETFTQVPDDRLNFQEKKASPEAKSCDNFVCGEVGIGNSSFNMNIRGDIGHKAYEYQDYAPKPYKCQQPKKAFRYHPSFRTQERNHTGEKPYACKECGKTFISHSGIRRRMVMHSGDGPYKSSFLRSHPKVPGHGRRFAMNPTLLNKEDERGNKNVVTREHLDRMKNSCIVCNMGHSNTEIDVNVVMGNYERLERDARMTIRKKRKRYSDIRFRIMGRYTVRVEVLTAVNSE

SEQ ID NO: 53102 - protein, 883 aa, Homo sapiens
  DOMAIN (548)..(586): RNA polymerases M / 15 Kd subunits proteins domain identified by eMATRIX, accession number BL01030, p-value=3.620e-09, raw score of 23.44
  DOMAIN (6)..(741): Zinc finger, C2H2 type domain identified by PFam, accession name zf-C2H2, E-value=1.6e-145, PFam score of 496.8
MGEKPYQCKECGKAFAYTSSLRRHERTHSGKKPYECKQYGEGLSYLISFQTHIRMNSGERPYKCKICGKGFYSAKSFQTHEKTHTGEKRYKCKQCGKAFNLSSSFGYHERIHSGAKPYECKQCGKAFRSASQLRVHGGTHTGEKPYECKECGKAFRSTSHLRVHGRTHTGEKPYECKECGKAFRYVKHLQIHERTEKHIRMPSGERPYKCSICEKGFYSAKSFQTHEKTHTGEKPYECNQCGKAFRCCNSLRYHERTHTGEKPYECKQCGKAFRSASHLRMHERTHTGEKPYECKQCGKAFSCASNLRKHGRTHTGEKPYECKQCGKAFRSASNLQMHERTHTGEKPYECKECEKAFCKFSSFQIHERKHRGEKPYECKHCGNGFTSAKILQIHARTHIGEKHYEFLFDIMKGLTLGRNPINIHERAHTGEKPYECRECGKAFKCPISVRRHERTHSRKKPYECKHRGKVLSYLTSFQNHLGMHTGEISHKCKICGKGFYSPRSLQRHEKTHTAEKPYECKQCGKAFSSSSSFWYHERTHTGEKPYECKQCGKAFRSASILQMHAGTHPEEKPYECKQCGKAFRSAPHLRIHGRTHTGEKPYECKECGKAFRSAKNLRIHERTQTHVRMHSVERPYKCKICGKGFYSAKTHTGEKPYECKQCGKTFRSTSHLRKHGRTHTGEKPYECQECGKAFRSMKNLQSHERTQTHVRIHSGERPYKCKLCGKGFYCPKSLQRHEKTHTGEKLYECKQRSVVPSVVPVPFDIMKGLTLERSPINASNVGKPSELCQSFECMVGLTLKRNPMNVSSVGSLLDVPRDFKCMEGLTLERNRINVSNVGKLLDVPQTFEGMEGLTLERNPINVTNVVKSLDVLHNFKCMEGLTA

SEQ ID NO: 53103 - protein, 760 aa, Homo sapiens
  DOMAIN (37)..(76): PROTEIN ZINC FINGER ZINC-FINGER METAL-BINDING NU domain identified by eMATRIX, accession number PD01066, p-value=6.553e-29, raw score of 19.43
  DOMAIN (205)..(648): Zinc finger, C2H2 type domain identified by PFam, accession name zf-C2H2, E-value=3.3e-86, PFam score of 299.8
MFGVHGTFLGIESRPPLLSLSPSLLYTCEMFQDPVACEDVAVNFTQEEWALLDISQRKLYREVMLETFRNLTSIGKKWSDQNIEYEYQNPRRSFRSLIEKKVNEIKDDSHCGETFTQVPDDRLNFQEKKASPEVKSCDSFVCAEVGIGNSSFNMSIRGDTGHKAYEYQEYGPKPYKCQQPKNKKAFRYRPSIRTQERDHTGEKPYACKECGKTFISHSGIRRHMVMHSGDGPYKCKFCGKAVHCLRLYLIHERTHTGEKPYECKQCGKSFTYSATHRIHERTHTGEKPYECQQCGKAFHSSSSFQAHKRTHTGGKPYECKQCGKSFSWCHSFQIHERTHTGEKPCECSKCNKAFRSYRSYLRHKRSHTGEKPYQCKECRKAFTYPSSLRRHERTHSAKKPYECSFQYHERTHTGEKPYECKQCGKAFRCAPHLRRHGRTHSAEKPYECKECGKAFRSASHLQIHERTQTHIRIHSGERPYKCKTCGKGFYSPKSFQRHEKTHTAEKPYECKQCGKAFSSSSSFPYHERTHTGEKPYECKQCGKAFRSASILQMHAGTHPEEKPYECKQCGKAFRSAPHLRIHGRTHTGEKPYECKECGKAFRSAKNLRIHERTQTHVRMHSVERPYKCKICGKGFYSAKSFQIHEKSYTGGKPYECGLQLPRTAAESVDSEKLQGPGKQETHVQLLSLYCLRRVLDCSREFCRRRRNIWKLKNGSSSPSLLVADFGLVLGLLGDICRLEVDNINIPILIMPVTTMILRGV

SEQ ID NO: 53104 - protein, 239 aa, Homo sapiens
  DOMAIN (121)..(138): Zinc finger C2H2 type, domain proteins. domain identified by eMATRIX, accession number BL00028, p-value=6.400e-10, raw score of 16.07
  DOMAIN (117)..(141): Zinc finger, C2H2 type domain identified by PFam, accession name zf-C2H2, E-value=0.0011, PFam score of 25.7
MKEHIERNPVTIKNVVKPSINTVPLEDMKAHTGEKPYERQKCELNQRLRDYAFQYHESNSGVVSADSETKSGHSGCLIKEMKNATKTHNGITGGIIFNANHWRETNTIYTRIHIGEKSCDYKKCGKAFNQYSSLRRHESHTGEKPYERQKCELNQRLRDYAFQYHESNSGVVSADSETKSGHSGCLIKEMKNATKTHNGITGGIIFNANHWRETNTIYTRIHINKQEKYQATHVSYAAN

SEQ ID NO: 53105 - protein, 36 aa, Homo sapiens
  misc_feature (1)...(36): Xaa = X or * as defined in Table 2
MHRRLVASPXSVYVRQSVHMLVCFPMASDKXLNKYL

SEQ ID NO: 53106 - protein, 67 aa, Homo sapiens; identical to SEQ ID NO: 40358

SEQ ID NO: 53107 - protein, 281 aa, Homo sapiens
MPRAEPRATLGEQEKAGLPLGAWRLYLLRHFRKQTELRRSGSRDVTGALLVAAAVASEAVGSLRVAEGGPNTLLLQVLRSWPWCNKELKTMEERKVKRRSPKSFSAHCTQVVNVQKKMSIPVSKSTGFSNPASQVNFTSRPKVKKEVMKEKTKPQGLEEGQRHSSQLPIQHSFLTDVSRCSRKMERGLLSLLNDFHSWKTFKHFGNECSIEQMEHVSGELQEKLARLNLELYGELEELPEDKRKTASDSNLDRLLSDLEELNSSIQKLHLADAQDVPNTFR

SEQ ID NO: 53108 - protein, 176 aa, Homo sapiens
  DOMAIN (49)..(59): 1 HERPESVIRUS GLYCOPROTEIN H domain identified by eMATRIX, accession number DM01803C, p-value=4.840e-09, raw score of 7.00
SIRRHCGQRCLVRIRIWPLKLPPRLAVREGLRCGTLRDVMPPSMSGVVVGPPGPPPGPCGDTTSGPAPGTFGQASAPVSPPRRGHGEYLCSSPTPVFFPGLWQPPRAGFTAPERSWSCRGPRWQLRAAWAGRLSSSPVSALLTFKVIILSTGLLFGPLGGWKILSSLPEIFANLAT

SEQ ID NO: 53109 - protein, 124 aa, Homo sapiens
PIKLEIDEEKNLLIKFDPSYRNDLNNWVAEEILAIKYVEHPQIDSLDLRGEVHYPNLSFETKELDFGCILNDTELIRYVTITNCSPLVVKFRWFFLVNDEENQIRLFMGFSVFHVLAIHEYFPF

SEQ ID NO: 53110 - protein, 1319 aa, Homo sapiens
FALAPEAGFYSLGQQPSTRISGSGCVHPVRVWPFSIEPAIGTLNVGESMQLEVEFEPQSVGDHSGRLIVCYDTGEKVFVSLYGAAIDMNIRLDKNSLTIEKTYISLANQRTITIHNRSNIIAHFLWKVFATQQEEDREKYSKVTAVFSIAASSNSRFALYESSYNSQRSPSEWACDDLIKEEKDETDEFFEECITDPLLREHLSVLSRTFANQRRLVQGDSKLFFNNVFTVEPLGWSERKEMAEIRDVQKKDTKVLFDQLAVDGEEGDVWPNSSAEITVYFNPLEAKLYQQTIYCDILGREIRLPLRIKGEGMGPKIHFNFELLDIGKVFTGSAHCYEAILYNKDSIDALFNMTPPTSALGACFVFSPKEGIIEPSGVQAIQISFSSTILGNFEEEFLVNVNGSPEPVKLTIRGCVIGPTFHFNVPALHFGDVSFEKNLRSIKQLTMKNKLFKISGENIGGYVYMLASVKVLNKMPNAKAIKKKVELDLCFPHEATEHTEMCWFPHTLICSLNNTSLIPMTYKLRIPGDGLGHKSISYCEQHVDYKRPSWTKEEISSMKPKEFTISPDCGTIRPQGFAAIRVTLCSNTVQKYELALVVDVEGIGEEVLALLIAARCVVPALHLVNTEVDFGHCFLKYPYEKTLQLADQDDLPGFYEVQPQVCEEVPTVLFSSPTPSGVISPSSTIHIPLVLETQVTGEHRSTVYISIFGSQDPPLVCHLKRAGEGPVIYVHPNQVDFGNIYVLKDSSRILNLCNQSFIPAFFQAHMGECQPFPDVALTVSHLSHSASCAATQHSTTVIRFTLRKKQLFVISQRAAALNTLLEGARKRMRWELECMSAETSQPHRHQQDQTPLTGTCCTPPLTGGSAQSIFRLITGNITMTKPSLKAKDSPKSQPPKRHKDDRVVSSLTRAHKKSLWTIEPNEGMVPPETDVQLALTANLNDTLTFKDCVILDIENSSTYRIPVQASGTGSTIVSDKPFAPELNLGAHFSLDTHYYHFKLINKGRRIQQLFWMNDSFRPQAKLSKKGRVKKGHAHVQPQPSGSQEPRDPQSPVFHLHPASMELYPGQAIDVILEGYSATPRIVKEKLVCHAIIGAQKGKSLVMAVNITCEFVAPLIQLSTKQLIYRLEKKPNSILKPDYQPLAVKNISTLPVNLLLSTSGPFFICETDKSLLPATPEPIKLEIDEEKNLLIKFDPSYRNDLNNWVAEEILAIKYVEHPQIDSLDLRGEVHYPNLSFETKELDFGCILNDTELIRYVTITNCSPLVVKFRWFFLVNDEENQIRYPQHRTLTELCFSFVFSFRLFMGFSVFHVLAIHEYFPF

SEQ ID NO: 53111 - protein, 157 aa, Homo sapiens
WYAEQSAHEATAQLSTPMAIRRAVVMPPEQRNRTKKEYSLRIPFGLPGDRMCFFTHRNDDPTGNEVTPPSLAADLGQQFGGDATDRQPWMIHQMLIHQGSEQLCFVEHGINMLRLGEILHLAATRHEAHFLAFRQFFNHQRSCFALNLARQDRITDF

SEQ ID NO: 53112 - protein, 62 aa, Homo sapiens
DVNSETCGLDLLALLGLGISSFVLITGCANMLLMAALWGLYMSLVNVGHVSPAHHVHMSCLC

SEQ ID NO: 53113 - protein, 125 aa, Homo sapiens
  misc_feature (1)...(125): Xaa = X or * as defined in Table 2
RQRHPDQRPGRSLFHGHGMCPTTPLQQQVDSQHNGDNNSESAPXQRRADSIHRSSLHIKKRPPSEDVSRCFLCIDLAFRQGFTFNKKGIRVRIPFGLPGDRMCFFTHRNDDRPAMKLLPFAGNKV

SEQ ID NO: 53114 - protein, 168 aa, Homo sapiens
  misc_feature (1)...(168): Xaa = X or * as defined in Table 2
AFCRFSILVGSAFISETDMCLLCPFPIGKAISVRLQYFKHETKQSICLGNQKSPLVCPFFGEQGLDSSSSLDLPSSPNPAPTLCPCVQPPRGPVSVSVPVSVMGSRLAPLLSAXLFVSVILGRMVILKNPGVLGQRQAGPSPGAPGLPSPSVRAPLGHKCSERSPSAT

SEQ ID NO: 53115 - protein, 85 aa, Homo sapiens
  DOMAIN (23)..(50): Protamine P1 proteins domain identified by eMATRIX, accession number BL00048, p-value=4.150e-09, raw score of 6.39
  misc_feature (1)...(85): Xaa = X or * as defined in Table 2
RRRRRRKQRRKQPWSSPARGAXPGPRRPSLRAAGTRRRRKRRASWTRCSNTCPGRCRTCSRSNQASCPSLLHLLLLLFGSFFSFY

SEQ ID NO: 53116 - protein, 446 aa, Homo sapiens
  DOMAIN (289)..(325): C1q domain proteins domain identified by eMATRIX, accession number BL01113B, p-value=6.754e-15, raw score of 18.26
  DOMAIN (273)..(319): C1q domain identified by PFam, accession name C1q, E-value= 2.9e-08, PFam score of 36.2
MPSYKGCGETQRHATNGTAAPPRRSSCRGDAIKLPHAEKKEGRPPASTSYPLRLGTRSARSSSHCWCTSWEDPPEATAGEEKRHPKSPAVCCGEGTVLTASTVTWRAEPARGEIWARLCPRDRPGSRAAAVIWERPCCDRLIADRTGPPNSSEPHCRAATIPLPTWPLPEGQTLTLKALAKMAAPALLLLALLLPVGAWPGLPRRPCVHCCRPAWPLWTLCPGEKGEAGVRGRAGRSGKEGAAGCPGPAGPQSARRGSVGPPGAACRRAYAAFSVGRREGLHSSDHFQAVPFDTELVNLDGAFDLAAGRFLCTVPGVYFLSLNVHTWNYKETYLHIMLNRQAAVVLYAQPSERSVMQAQSLMLLLRRATPVWSVPEELPAVLPGQDELGSLQLHAHHPLADGLVRHELQPGLAGSSRTGHLVFRTDHGLRQHASHGCPVGPLHVPG

SEQ ID NO: 53117 - protein, 83 aa, Homo sapiens
  DOMAIN (21)..(70): kw TRANSCRIPTASE REVERSE II ORF2 domain identified by eMATRIX, accession number DM01354Z, p-value=2.537e-18, raw score of 9.06
VGSTRGIVEGLIFILGEGGECYYPRSLFTVANFTVGKRVKTLNCPSTDKWINKMCHIHTVEYYSDIKRNEIPMRATCRQTLKA

SEQ ID NO: 53118 - protein, 148 aa, Homo sapiens
  DOMAIN (70)..(109): kw TRANSCRIPTASE REVERSE II ORF2 domain identified by eMATRIX, accession number DM01354X, p-value=6.077e-35, raw score of 13.86
  misc_feature (1)...(148): Xaa = X or * as defined in Table 2
TPIHNCFKENKIPRNPTYKEHEGPLQGELQTTSQGNKRGYKQMEEHSMLMGGRINIMKMAILPKVIYRFTIPIKLPMTFFTELEKTTSKFIWNQKRARIAKSILSRKNKAGAHHATXLQTILQGYSNQNSMVLVPKQRYRPMEQSPQK

SEQ ID NO: 53119 - protein, 310 aa, Homo sapiens
  DOMAIN (129)..(174): kw TRANSCRIPTASE REVERSE II ORF2 domain identified by eMATRIX, accession number DM01354N, p-value=1.000e-40, raw score of 13.17
  misc_feature (1)...(310): Xaa = X or * as defined in Table 2
MGRNQSRKAENSKNQSASSTPKDHSASPATEQSWMGNDFDELTELGFRKSVMTNFSQLKEDVRTHHKEAKNLEKRLDKWLTRINSIEETLNDLMELKTMARELRDTCTSFSSRFDQVEEGEIQTTIREYYEHLYANKLENLEEMDKFLDTYTLPRLNQEEVESLNRPITGSEIEAIINSLPTKKIPGPDRFTAXRRPXMTXWSXKPWHENYVTHAQASVADSIKWKKGKYKHHQRILXTPLRKXTRKSRRNGXIPGHIHSPKTKPGRSXIPEXTNNRFXNXGNNXXPTNQKNSRARQIHSQILPEVQRGA

SEQ ID NO: 53120 - protein, 124 aa, Homo sapiens
  misc_feature (1)...(124): Xaa = X or * as defined in Table 2
PNARKLRTLKKDHSPDXXRRKLRKIKXMQXKMIKGISQRSHRNTNYHQRTLXTPLHKXTGKSRRNGXIPGHIHPPKSKPGRSQIPEYTNNKIXNXGSNXXPINQKKSRTGRIHSQILPEVQRGA

SEQ ID NO: 53121 - protein, 84 aa, Homo sapiens
  misc_feature (1)...(84): Xaa = X or * as defined in Table 2
TRRSRRNGXIPGHIHPPKTKPGRSRIPEXTNNRLXNXGSSXXPTNQKKPRTRETDSRILPEVQRGAGTIPSETIPNNRKRGTPP

SEQ ID NO: 53122 - protein, 125 aa, Homo sapiens
  misc_feature (1)...(125): Xaa = X or * as defined in Table 2
TRKSRRNGXIPGHIHPSKTKPGRSXIPEETNNKFXNXGSNXXPTNQKKPRTRQVHSRILPEPISHGMGKSWKQSLXKPAQDKAVPSLIAPIQHIIGSSGQGNQARERNKGYSNRKRGSQIVSVCR

SEQ ID NO: 53123 - protein, 43 aa, Homo sapiens
  misc_feature (1)...(43): Xaa = X or * as defined in Table 2
NDDTFRKPHRLSPKSPXAADKQLQQSLRIQNQCAKLRSIPIHH

SEQ ID NO: 53124 - protein, 127 aa, Homo sapiens
  misc_feature (1)...(127): Xaa = X or * as defined in Table 2
GLSRQFSPHSVNKAAGEVPTGRGPPQLSKANVARLPLSIPPLWAGHLWKKGGSPSQGIIDKTLISLGQSTXGKGQLWVQLQRTXAFLPAGSEESSGSPSTAPNSAKGQTPSSSGSLTRASSSSLYLW

SEQ ID NO: 53125 - protein, 37 aa, Homo sapiens
  misc_feature (1)...(37): Xaa = X or * as defined in Table 2
NEGKNLKGSQRERNTNYHQRTQXTPLHKXTRKSRRNG

SEQ ID NO: 53126 - protein, 47 aa, Homo sapiens
  DOMAIN (14)..(44): kw TRANSCRIPTASE REVERSE II ORF2 domain identified by eMATRIX, accession number DM01354R, p-value=8.763e-16, raw score of 8.50
QNQRQKPHDYLNRCRKWHFDKIQQPSMLKTLNKLGNDGTYLRIIRDI

SEQ ID NO: 53127 - protein, 214 aa, Homo sapiens
  DOMAIN (10)..(49): Ribosomal L29e protein family domain identified by PFam, accession name Ribosomal_L29e, E-value=3e-09, PFam score of 44.2
  misc_feature (1)...(214): Xaa = X or * as defined in Table 2
YRFSGPTIRSIQNHTTHNQGRKWHKKGIKKPRAQRYESLKGPEVXPSGQGVTCLLRADWLSPLLGSGTYVGPKFLRNTRFAKKHNKKGLKKMQANNAKAMSARAEAIKALVKPKEVKPKIPKGCSRRKLRFDFAYIAHPKLWGRRCFVARFCQGASGCSGPKGKAKVPKAKVKVSPKAKAKAKAKDQTKAQAAAPALVPAQAPKRTQAPTKASE

SEQ ID NO: 53128 - protein, 122 aa, Homo sapiens
QMYCVFNRNEDACRYGSAIGVLAFLASAFFLVVDAYFPQISNATDRKYLVIGDLLFSGVLASLAYQRYKAGVDDFIQNYVDPTPDPNTAYASYPGASVDNYQQPPFTQNAETTEGYQPPPVY

SEQ ID NO: 53129 - protein, 99 aa, Homo sapiens
MESGAYGAAKAGGSFDLRRFLTQPQVVARAVCLAKGESQQESGAGIYPDSVSLCCPAHFQVNVELPSSPSPSWISDPSYPHPTFSRSLTGEQGIILYEE

SEQ ID NO: 53130 - protein, 233 aa, Homo sapiens
GGGSGGDGDMESGAYGAAKAGGSFNLRRFLTQPQVVARAVVLVFALIVFSCIYGEGYSNAHESKQMYCVFNRNEDACRYGSAIGVLAFLASAFFLVVDAYFPQISNATDRKYLVIGDLLFSALWTFLWFRVGFCFLTNQWAVTKPKTVLVGADSVRAAITFSFFSIFSWGVLASLGYQRYKAGVDDFIQNYVDPTPDPNTAYASYPGASVDNYQQPPFTQNAETTEGYQPPPV

SEQ ID NO: 53131 - protein, 71 aa, Homo sapiens
RSQCRHSGPLRVAMKFPARSTRGATNKKAESRQPSENSVTDSNSDSEDESGMNFLEKRALNIKQNKAMVGI

SEQ ID NO: 53132 - protein, 110 aa, Homo sapiens
PVHLGSTCHQCRQKTIDTKTNCRNPRLLGACRGQFCGPCLQNRYGEEVRDALLDPNWHCPHCRGICNCSFCRQRDGRCATGVLVYLAKYHGFGNVHAYLKSLKQEFEMQA

SEQ ID NO: 53133 - protein, 111 aa, Homo sapiens
  DOMAIN (15)..(55): Calponin family repeat proteins domain identified by eMATRIX, accession number BL01052C, p-value=8.200e-38, raw score of 18.51
  DOMAIN (99)..(111): Calponin family domain identified by PFam, accession name calponin, E-value=0.00011, PFam score of 20.1
HEGSVPKINRSMQNWHQLENLSNFIKAMVSYGMNPVDLFEANDLFESGNMTQVQVSLLALAGKAKTKGLHSGVDIGVKYSEKQERNFDDATMKAGQCVIGLQMGTNKCASQ

SEQ ID NO: 53134 - protein, 263 aa, Homo sapiens
  DOMAIN (127)..(143): CALPONIN SIGNATURE domain identified by eMATRIX, accession number PR00889E, p-value=2.125e-14, raw score of 12.18
  DOMAIN (130)..(155): Calponin family domain identified by PFam, accession name calponin, E-value=2.9e-09, PFam score of 34.9
TMSSTQFNKGPSYQLFAEIKNQLLFKCDPQKQAALCSWIEGLTRLSFSPDFQKSLKEGIVLCTLMNKLGSVPKINRLMQNWHQLENLSNFIKAMVGYDMNPMDLFEANDLFESRNMTQNRILPPLDHSTISLQMGANKRSSQVGMTAPGTPQHIYNTKLGAHKCDNSSMSLHMGDTQSANHSVQGFGLGQQIYYPKYCPQGPAASGAPLDAGNCPGPGEAPEDPPCSQEEATTEAPEHAGSLHHRPVWVWGIFLYFRLSFFFL

SEQ ID NO: 53135 - protein, 134 aa, Homo sapiens
  DOMAIN (57)..(106): kw TRANSCRIPTASE REVERSE II ORF2 domain identified by eMATRIX, accession number DM01354Z, p-value=6.566e-21, raw score of 9.06
QHIRETPGAQVHSCGKWNPQALWRTAWQLLTDTKHTLGKPPSMPHLVIYPLEISCHTKTCTRMLIASFFIITKTWKRPRCPSVDKWKNKPWCIHTGLLSSTVPPGEPGCPIPELSGLLMGLQTTSSRCSVRQVW

SEQ ID NO: 53136 - protein, 66 aa, Homo sapiens
WGGHWTTARAEYVLLVVHCVLIQAHAAGLGEAGCRLLSPGAWGTKGPEQATQEGGSEQGSHGHQYL

SEQ ID NO: 53137 - protein, 77 aa, Homo sapiens
LLIFRHIMEHLEGVINKPEAEMSPQELQLHYFKMHDYDGNNLLDGLELSTAITHVHKEVGLAVAWGTVSQKGFPLLI

SEQ ID NO: 53138 - protein, 102 aa, Homo sapiens
  DOMAIN (85)..(98): EF-hand calcium-binding domain proteins domain identified by eMATRIX, accession number BL00018, p-value=7.600e-12, raw score of 7.41
PQEHIMEHLEGVINKPRGRRCRPQELQLHYLQKCMDYDGNNLLDGFRTLPQPSTHVHKEEGSEQAPLMSEDELINIIDGVLRDDDKNNDGYIDYAEFAKSLQ

SEQ ID NO: 53139 - protein, 273 aa, Homo sapiens
MAAEDKLLLPQLPELFETSKQLLDDVEVVTEPAGSRIVQKKVFKGLDLLEKAAEMLSQLDLVAELELPKTKNSAENHTANFSMAYPSLIAMASQRQAKRERHKQKELEHRLSAIKSAVETGQADDERVREYYLLHLQSLEEIESIDQEIKILRERDSSREASTSNSSRQERPPVKPFILTRNMAQVKVFGAGYPSLATMTVSDWYKQHWKYGALPDQGIAKATPEEFRKAAQQQEGQEEKEEEDDEQTLYRVREWDDWKGIHPRDYGSQQSMG

SEQ ID NO: 53140 - protein, 57 aa, Homo sapiens
  misc_feature (1)...(57): Xaa = X or * as defined in Table 2
XEYAKAAPEEFRKAAQQQEEQEEKEEEDDEQTLHRAREWDDWKDTHPRGYGNRQNMG

SEQ ID NO: 53141 - protein, 212 aa, Homo sapiens
VAELELPKTKNSAENHTANFSMAYPSLIAMASQRQAKRERHKQKELEHRLSAIKSAVETGQADDERVREYYLLHLQSLEEIESIDQEIKILRERDSSREASTSNSSRQERPPVKPFILTRNMAQVKVFGAGYPSLATMTVSDWYKQHWKYGALPDQGIAKATPEEFRKAAQQQEGQEEKEEEDDEQTLYRVREWDDWKGIHPRDYGSQQSMG

SEQ ID NO: 53142 - protein, 354 aa, Homo sapiens
  DOMAIN (168)..(187): GONADOTROPHIN RELEASING HORMONE RECEPTOR SIGNATURE domain identified by eMATRIX, accession number PR00529C, p-value=7.506e- 10, raw score of 11.03
RGNSRLRYSHEDELQLPRLPELFETGRQLLDEVEVATDPAGFRIVQEKVFKGLDLLERAAEMLSQSTLFGRECRFWKDLSPTHLITFWGPAFQGALPLKQVNPSKRLRIILQRAREHFINYLTQCHCYHVGQSFELPKTMNNSAENHTANSSMAYPMLGAMASQRQAKIQRYKQKKELEHRLSAMKSAVESGQADDERVREYYLLHLQRWVDISLEEIESIDQEIKILRERDSSREASTSNSSRQERPPAKPFILTRNMAQAKVFGAGYPSLPTLWTVSDWYEQHRKYGSITGFRGIAKSAPEGISGKAAQQQEEQEEKEEEDDEPNNFHRAREWDDWKDTPSLGAYGNRQNMG

SEQ ID NO: 53143 - protein, 142 aa, Homo sapiens
  DOMAIN (57)..(70): Thioredoxin family proteins domain identified by eMATRIX, accession number BL00194, p-value=7.300e-14, raw score of 12.16
  DOMAIN (36)..(116): Thioredoxin domain identified by PFam, accession name thiored, E-value=1.7e-28, PFam score of 98.8
GIRQLLQLSRASMAARKSWTALRLCATVVVLDMVVCKGFVQDLDESFKENRNDDIWLVHFYAPWCGHCKKLEPIWNEAGLEMKSIGSPVKAGKMDATSYSSIASEFGVRGYPTIKLALIRPLPSQQMFEHMHKRHRVFFVYV

SEQ ID NO: 53144 - protein, 370 aa, Homo sapiens
  DOMAIN (52)..(64): THIOREDOXIN FAMILY SIGNATURE domain identified by eMATRIX, accession number PR00421C, p-value=8.286e-10, raw score of 13.60
  DOMAIN (41)..(88): Thioredoxin domain identified by PFam, accession name thiored, E-value=9.1e-09, PFam score of 33.5
MWKMNCSLLQSKQMCNQLPPGSTRDGSWKFRQDPRLGKNACDCDSCIASEFGVRGYPTIKLLKGDLAYNYRGPRTKDDIIEFAHRVSGALIRPLPSQQMFEHMQKRHRVFFVYVGGESPLKYVTLKEMPAVLVFKDETYFVYDEYEDGDLSSWINRERFQNYLAMDGFLLYELGDTDLNASSLRERKLILPEDIPLYVGKLVALAVIDEKNTSVEHTSELTVPTVVVLNTSNQQYFLLDRQIKNVEDMVQFINNILDGTVEAQGGDSILQRLKRIVFDAKSTIVSIFKSSPLMGCFLFGLPLGVISIMCYGIYTADTDGGYIEERYEVSKSENENQEQIEESKEQQEPSSGGSVVPTVQEPKDVLEKKKD

SEQ ID NO: 53145 - protein, 164 aa, Homo sapiens
  DOMAIN (61)..(113): Ribosomal protein L31e proteins domain identified by eMATRIX, accession number BL01144, p-value=9.069e-26, raw score of 25.07
  DOMAIN (55)..(149): Ribosomal protein L31e domain identified by PFam, accession name Ribosomal_L31e, E-value=1.4e-45, PFam score of 164.8
LPISSLRTQTLFSSPLFPQHFEHYLALVSVLPFQLGRGRTAPAKKGGEKRKGHSAINEVVIQEYTINIHKRIHGVRFKKRAPRALREIPKFAIKEVETLSVRIDSRFNKALCAKGIRNVPYRIRVQLSRKRNEDEDSPNKRYTLVTYVPVSTFKNVQTVHVHEN

SEQ ID NO: 53146 - protein, 128 aa, Homo sapiens
  DOMAIN (25)..(77): Ribosomal protein L31e proteins domain identified by eMATRIX, accession number BL01144, p-value=9.069e-26, raw score of 25.07
  DOMAIN (19)..(113): Ribosomal protein L31e domain identified by PFam, accession name Ribosomal_L31e, E-value=1.4e-45, PFam score of 164.8
IGKGTNELMYGEKRKGHSAINEVVIQEYTINIHKRIHGVRFKKRAPRALREIPKFAIKEVETLSVRIDSRFNKALCAKGIRNVPYRIRVQLSRKRNEDEDSPNKRYTLVTYVPVSTFKNVQTVHVHEN

SEQ ID NO: 53147 - protein, 107 aa, Homo sapiens
  DOMAIN (32)..(92): Ribosomal protein L31e domain identified by PFam, accession name Ribosomal_L31e, E-value=0.026, PFam score of -1.3
MELCLDAFAQKGGVPYPSLWIGLPSMLMSLPGFLDDYTSLYACVQGTVISVFGCAFGPSGNVPYRIRVRLSRKRNEDEDSPNKLYTLVTYVPVTTFKNLQTVNVDEN

SEQ ID NO: 53148 - protein, 121 aa, Homo sapiens
  DOMAIN (17)..(69): Ribosomal protein L31e proteins domain identified by eMATRIX, accession number BL01144, p-value=1.000e-40, raw score of 25.07
  DOMAIN (12)..(106): Ribosomal protein L31e domain identified by PFam, accession name Ribosomal_L31e, E-value=6.1e-66, PFam score of 232.5
  misc_feature (1)...(121): Xaa = X or * as defined in Table 2
RXGGEKKKGRSAINEVVTREYTINIHKRIHGVGFKKRAPRALKEIRKFAMKEMGTPDVRIDTRLNKAVWAKGIRNVPYRIRVRLSRKRNEDEDSPNKLYTLVTYVPVTTFKNLQTVNVDEN

SEQ ID NO: 53149 - protein, 1267 aa, Homo sapiens
  DOMAIN (494)..(507): GLIADIN domain identified by eMATRIX, accession number DM00406, p-value=1.000e-08, raw score of 7.73
MEAAGPAGCKKPSSDTLSRLGDPLQGWSQAENSHPHSDGCADGAALEGGGGSCHSQGKGQKMSLSVLEGMGFRVGQALGERLPRETLAFREELDVLKFLCKDLWVAVFQKQMDSLRTNHQGTYVLQDNSFPLLLPMASGLQYLEEAPKFLAFTCGLLRGALYTLGIESVVTASVAALPVCESWGDRAMHTTEARAGRFPGATSVALMLLVTHTAQGCGPVGGRKQPNLATGVSVQDGGERLRAVQRDAGLRHGRPYWHLCQVNKSGAALCPAMCTERSVFLGSRAGSARSVGQSGPYAAPSHPARICSIWGLLGFAARCLTWCCPPGPLPKRLLPLVSSSLLATVLPARGNLVLRRRLIYIGPRFMIGPGSGLVWQLLVGQAAGAVRPPSEATPSLCAPSCLRSRPPAPSCPAAMHKHYKVHFAKDAQSPNGHYFWDPELGHRKGCCHQWRQDSAALRAHGPCRPSPQSHWQLAYHSHQVGGSGWRRGLLPSVLQQQRQPQSQPSPPSPLRQRLCPIHEAQKGLPATSTVPKEPASAPQAPTLPTTAPAMARSGPALPSAAGVLLKPSEPTDARPLPAPAACGSFTAYSSDILTEDDVYCSCLAKTLCHVPVPVTVGFYAPFGCRLHMMLDKITALMQQEAAQRESEELQHVQWRPRAVSGWGVPQLLWYLVFLQPIITEVHLRRRNVQFLFIRFSAWQYAGTDKLWAGLVTTLCEGIRRHYGALPFSVYSVLGNKPATRQDCCQSEWHCRRRVCLGLLALLAALGLGVGLLYLSLGGHALGHGSPSGSLLKVFGGAATTLSGSGLLMAVYSVGKHLFVSQRKKIERLVSREKFGSQLGFMCEVKKEVELLTDFLCFLEIYQRRRLRVVLEVTGLDTCYPERVVGVLNAINTLLSDSHAPFIFILVVDPSILAACLESAGNMKGTADNGYLFLNRTVTLPFSVPIMGRRTKLQFLHDAVQSRDDLLYREMTRKPWLPGDAGGESAQLLAVQAQAGTERGQGRIDDEAARRIQEALFCLHDERDCLYEYVPDNVVSMRRIVNTVPITVRLLQQQQQQGDFGGPTPRQAVAWVVLANQWPCRLSWALQCLEDRQQTGGAPEGRARLWDVFRDNSRELHTMTKALQNVLDLDGDPELFERFLGADFPFTVAEAQSLLRCTVNLDHSIRRRMGLIRAVSALKPPSPPKSPTRDTPHAAHRANSASRAPPSGRASGQAGEGHHTGDLAHRGKLWPVACALFRPGQSSPGYLPYESLQGHWLVTDTEATASAP

SEQ ID NO: 53150 - protein, 177 aa, Homo sapiens
GGGMADTVLFEFLHTEMVAELWAHDPDPGPGVSAGLRGEEAGATKGQKMSLSVLEGMGFRVGQALGERLPRETLAFREELDVLKFLCKDLWVAVFQKQMDSLRTNHQGTYVLQDNSFPLLLPMGSGLQVYLEEAPKFLAFTCGLLRSALYTLGIESVVTASVAALPVCKFQVVIPKS

SEQ ID NO: 53151 - protein, 67 aa, Homo sapiens
GDLPWEINPLSSCSLLHEKDPPTTSGPQTDQPKKHHTNFKSGPTGNRTVQLTWQPLPEPLELWPKAL

SEQ ID NO: 53152 - protein, 98 aa, Homo sapiens; identical to SEQ ID NO: 31006
  DOMAIN (36)..(53): Zinc finger, CCHC class domain identified by PFam, accession name zf-CCHC, E-value=4.6e-05, PFam score of 30.3

SEQ ID NO: 53153 - protein, 234 aa, Homo sapiens
  DOMAIN (164)..(181): Zinc finger, CCHC class domain identified by PFam, accession name zf-CCHC, E-value=5e-05, PFam score of 30.1
MTDTQVNEQTIETANPSDLAPPPQAAPHQAKPGPNSSSTSTLPPYNASITSPLHTQSGLQFLSTQRDQKAILFSICILLPNPLPTLEKAPKIRFRPQTPQQDLINLAFKVYNNREEAAKRQCISGLQLLASALRETPATSPAHKNFKTPKPQWPGIPPGPPPPGSCFKCRKSGHWAKECPQPRIPPKPCPICAGPHSKSDCPACPKATPRAPGTLPQGSLTDSFPDLLGLVAED

SEQ ID NO: 53154 - protein, 154 aa, Homo sapiens; identical to SEQ ID NO: 40549

SEQ ID NO: 53155 - protein, 168 aa, Homo sapiens
MALGEHSQKSGSGDNRPWARASTVLASGLTQHSDSGGGHRAACVTPSPAVGGSGERERERERERYARYVWEKASEAIGQCHSSAAKPRRSGKESESLGPEFQGLWEWLPGELDSSISSGKMKGIEIKRMERLKCGAKIERRKRLRDSEERLRDSGEENKKRPLTGFKI

SEQ ID NO: 53156 - protein, 352 aa, Homo sapiens; identical to SEQ ID NO: 31174
  DOMAIN (306)..(317): GUANYLIN PRECURSOR SIGNATURE domain identified by eMATRIX, accession number PR00774C, p-value=5.418e-09, raw score of 11.76
  DOMAIN (288)..(305): Zinc finger, CCHC class domain identified by PFam, accession name zf-CCHC, E-value=0.00037, PFam score of 27.3

SEQ ID NO: 53157 - protein, 136 aa, Homo sapiens; identical to SEQ ID NO: 30815

SEQ ID NO: 53158 - protein, 70 aa, Homo sapiens
LTSFLHCCLSHHYHGAQIHPRHFLHLICRCHCHQYCHHAYLDPCPQDSHHLHWCWQPLPEPLELRPRLSD

SEQ ID NO: 53159 - protein, 287 aa, Homo sapiens
  DOMAIN (200)..(243): 1 kw MIND INHIBITOR DIVISION CONTROL domain identified by eMATRIX, accession number DM01756B, p-value=4.822e-15, raw score of 22.91
  DOMAIN (165)..(270): ParA family ATPase domain identified by PFam, accession name ParA, E-value=3.6e-23, PFam score of 90.4
MKLMETLNQCINAGHEMTKAIAIAQFNDDSPEARKITRRWRIGEAADLVGVSLRLSEMPRKQGDYRTRIWKFEDGLSNVLVIQLNKLIICVMCLDLALKGLRVLLVEGNDPQGTASMYHGWVPDLHIHAEDTLLPFYLGEKDDVTYAIYFTCWPGLDIIPSCLALHRIETELMGKFDEGKLPTDPHLMLRLAIETVAHDYDVIVIDSAPNLGIGTINVVCAADVLIVPTPAELFDYTSALQFFDMLRDLLKNVDLKGFEPDDPTGNRTVQLTWQPLPQPLELWPKAL

SEQ ID NO: 53160 - protein, 212 aa, Homo sapiens
  DOMAIN (116)..(132): kw ANNEXIN ANTIGEN PROLINE TUMOR domain identified by eMATRIX, accession number DM00250A, p-value=6.164e-09, raw score of 10.52
  misc_feature (1)...(212): Xaa = X or * as defined in Table 2
MIQLLNWGLLCCHLSANPLGKKWLYAAQISEVKWIGFSDALYGKYERKRQGKVIAKDFDIVKPIDQETIAFKRELIIHSSQEEGKMPYHAEPQYREYSGQLQAGHQNFRFSDLQTQGFTPVPPTPPCPHSQVFGLGLRVTPLVPFRLNYNTSSPVSPAFRWQIVGLLGFHNYGASEAIGQHQSSVTKPRRSGKESVREPWARVPGALGVAAX

SEQ ID NO: 53161 - protein, 292 aa, Homo sapiens
  DOMAIN (93)..(140): Bacterial regulatory proteins luxR family proteins. domain identified by eMATRIX, accession number BL00622, p-value=8.313e-27, raw score of 32.69
  DOMAIN (90)..(155): Bacterial regulatory proteins, luxR family domain identified by PFam, accession name GerE, E-value=2.8e-20, PFam score of 80.8
  misc_feature (1)...(292): Xaa = X or * as defined in Table 2
MPGDKYGDGITLIKYIKRHFPSLSIIVLTMNNNPAILSAVLDLDIEGIVLKQGAPTDLPKALAALQKGKKFTPESVSRLLEKISAGGYGDKRLSPKESEVLRLFAEGFLVTEIAKKLNRSIKTISSQKKSAMMKLGVENDIALLNYLSSVTLSQIRRVSVLSGICTDCRMRRKRLIRPTIPIISTNYIKVGQIRRVSVASGICAECRMRGKRFIVLGIPGFLDLSGYNAASGKRQSLHACSRVTWQNRLRLKRFPSIHGPFNEASQEAARRKSIEKELEWVRQGTKGRQSKX

SEQ ID NO: 53162 - protein, 188 aa, Homo sapiens
  DOMAIN (127)..(181): Ribosomal protein S12e proteins domain identified by eMATRIX, accession number BL01189B, p-value=1.000e-40, raw score of 13.49
  DOMAIN (55)..(185): Ribosomal protein S12e domain identified by PFam, accession name Ribosomal_S12e, E-value=1.8e-40, PFam score of 147.9
MPSVRTGDPIILHAHTLNPAVWLAWAVEGEGSLTLNIWICPWQIEPLRHLAYTPGSDATSLTVPTRVISPLCVDSWLFTDPLMKTHAPERTFLSFPAAAKRQAHLCVLASNCDKPMYVKLVKAHCAEHQINLIKGDDNKKLGEWEGPCTIDREGKPCKVVGCSCAVVKDYGKESQAKDVIEQYFKCKK

SEQ ID NO: 53163 - protein, 180 aa, Homo sapiens
  DOMAIN (117)..(171): Ribosomal protein S12e proteins domain identified by eMATRIX, accession number BL01189B, p-value=1.000e-40, raw score of 13.49
  DOMAIN (5)..(179): Ribosomal protein S12e domain identified by PFam, accession name Ribosomal_S12e, E-value=9.8e-79, PFam score of 275.0
  misc_feature (1)...(180): Xaa = X or * as defined in Table 2
PTAMVEEGIAAGGVMDVNTAVQEVLKTALIHDGLARGIREAAKALDKYVYQSQYCGFLQPEQNCHPREEGMEFMVLAQKFXMASVLPETXEKRQAHLCVLASNCDEPMYVKLVEALCAEHQINLIKVDDNKKLGEWVGLCKIDREGKPRKVVGCSCVVVKDYGKESQAKDVIEEYFKCKK

SEQ ID NO: 53164 - protein, 52 aa, Homo sapiens
MGPLNTCFYQEVPEDWPPHPHDGPSHVGIPRSLPKALRQGAKPILCVLASNL

SEQ ID NO: 53165 - protein, 102 aa, Homo sapiens
  DOMAIN (79)..(102): Src homology domain 2 domain identified by PFam, accession name SH2, E-value=0.076, PFam score of 9.0
MVAHNQVAADNAVSTAAEPRRRPEPSSSSSSSPAAPARPRPCPAVPAPAPGDTHFRTFRSHADYRRITRASALLDACGFYWGPLSVHGAHERLRAEPVGTFL

SEQ ID NO: 53166 - protein, 118 aa, Homo sapiens
  misc_feature (1)...(118): Xaa = X or * as defined in Table 2
TPTMCLRSHPLPLALVSVILSFPQPSFSSSLINSSWSSPRSSLSSSSSRSPSSGRVNLHPPQTPSSHXSHLSSRSCCSAPLLTYHSSSLLLVCSVPFPFFPGFPGENPLFVLSGSAPS

SEQ ID NO: 53167 - protein, 334 aa, Homo sapiens
  DOMAIN (203)..(281): Src homology domain 2 domain identified by PFam, accession name SH2, E-value=5.1e-08, PFam score of 26.8
MCLRVIFTIGAVSVILSFLSLFFIILDQLQLVIPQSSLSSSSNLEDPYSESYYAAARRPDSASTEPPPAGKSSAEYRAHFLAVSTEAERIRADLVLRARPLGPAHPRTLWPTPPAGPFCRMVAHNQVAADNAVSTAAEPRRRPEPSPSSSSSSPAATARPRPCPAVPAPAPGDTHFRTFRSHADYRRITRASALLDALGFYWGPLSVHGAHEPLRAEPVGTFPVRDSRQRNCFFALSVKMASGPTSIRVHFQAGRFHLDGSRESFDCLFELLEHYRGGSRADLLGATLRQRRVRPLQELCRQRIRRPPVGRENLARIPLNPVLRDYLSSFPFQI

SEQ ID NO: 53168 - protein, 167 aa, Homo sapiens
  DOMAIN (50)..(60): Eukaryotic  RNA-binding region RNP-1 proteins domain identified by eMATRIX, accession number BL00030B, p-value=8.105e- 09, raw score of 7.03
  DOMAIN (18)..(82): RNA recognition motif. domain identified by PFam, accession name rrm, E-value=3.4e-16, PFam score of 67.2
MASNVTNKTDPRSMNSRVFIGNLNTLVVKKSDVEAIFSKYGKIVGCSVHKGFAFVQYVNERNARAAVAGEDGRMIAGQVLDINLAAEPKVNRGKAGVKRSAAEMYGSVTEHPSPSPLLSSSFDLDYDFQRDYYDRMYSYPARVPPPPPIARAVVPSKRQRVSGNTST

SEQ ID NO: 53169 - protein, 69 aa, Homo sapiens
GTRGTLRSRAPRPRYICMNNLNDPPNWNIRPNSRADGGDGSMWNYALLAPMLGMAAFRWIWSRESQKEV

SEQ ID NO: 53170 - protein, 1116 aa, Homo sapiens
  DOMAIN (278)..(301): Guanine-nucleotide dissociation stimulators CDC24 family sign domain identified by eMATRIX, accession number BL00741B, p-value= 5.655e-13, raw score of 14.27
  DOMAIN (61)..(333): RhoGEF domain identified by PFam, accession name RhoGEF, E- value=0.0058, PFam score of -14.9
CLQQGPGGNQHCSHREEAPAVAACQEPPGHSEPESVLPLGAPPSEEDGRQQVGSSRLRHIMAEMIATEREYIRCLGYVIDNYFPEMERMDLPQGLRGKHHVIFGNLEKLHDFHQQHFLRELERCQHCPLAVGRSFLRHLIGQKQFPESPSGERPGLTSSHAPCPWMPHYLPEGPACPVLRIPCEAFNWKHVECTDPVVSPPKQSPLLFQEEQFGMYVIYSKNKPQSDALLSSHGNAFFKVIPLGPPPTACPALSQAGADPLTRPLQDKQRELGDKMDLASYLLRPVQRVAKYALLLQDLLKEASCGLAQGQELGELRAAEVVVCFQLRHGNDLLAMDAIRGCDVSASDAGSSGKLGEFEAAANIKADLPDFMAVWLLFRLVTKLTHLDGDSDLCHHRRRIFLDEIHLCVPLQVNLKEQGQLRCRDEFIVCCGRKKYLRHVFLFEDLILFSKTQKVEGSHDVYLYKQSFKPGGCEHHLHSNHPPPQTFSHTELQLQSLLSVEGIRVTGGKSVQVCSNLSSYLLRRKNLTEGCWTRRFQGLMASFFLVTASGSLGEISLVPKTGWEASAPWPPMPLVGQELRIQEMASMGIGNQPFMDVKPRDRTPDCAVISDRAPKCAVMSDRVPDSIVKGTESQMRGSTAVSSSDHAAPFKRPHSTISDSSTSSSSSQSSSILGSLGLLVSSSPAHPGLWSPAHSPWSSDIRACVEEDEPEPELETGTQAAEPPARCSDHRKQEPSGPLPEDGFCCQPEVLGLAALVCLPWAFSSPHKEKAPASRSEKAPSWGHASPKPLSHGRDPPKPMDTWCPVVMCAVMCAAMCADPALSGSVTGREALVSHPQVARQSLDSVAHNLYPLLFKASYLLEQAEVTRAVLGRWPLEEFRLGALLGPGADHPQDLRDRTCRACLEALVRGLADHVLQDRSRRRLRVADLTGIRDVQVQRCPCGRALGRWGRTQLLARTCCELQAEPLAAGRPVEVLADLFVTEGNFEAVVQALRPAGPAPLRVHCPSFRADSLSPSQLLHVLRLAGPGALRKLEVVHNVRLHAGHVQQLLAQVGFPRLASLTLPTKAFDAPPTYASTPDGEDPLLASIARELSKMAQLTELSVAFSTLTGKIPTLL

SEQ ID NO: 53171 - protein, 117 aa, Homo sapiens
  misc_feature (1)...(117): Xaa = X or * as defined in Table 2
EAAELDAMCTATRQWSRAGQGVTGRPCQGRLPRCGLRSTITPKPIPGGHRKKPLLGALGKHTLSYVERWHWEGHSGIXTRDRQNFERRLTVPPSRQPFAPTDETRCGDDRISFCNYV

SEQ ID NO: 53172 - protein, 1127 aa, Homo sapiens
  DOMAIN (251)..(274): Guanine-nucleotide dissociation stimulators CDC24 family sign domain identified by eMATRIX, accession number BL00741B, p-value= 5.655e-13, raw score of 14.27
  DOMAIN (61)..(305): RhoGEF domain identified by PFam, accession name RhoGEF, E- value=0.00059, PFam score of 1.0
CLQQGPGGNQHCSHREEAPAVAACQEPPGHSEPESVLPLGAPPSEEDGRQQVGSSRLRHIMAEMIATEREYIRCLGYVIDNYFPEMERMDLPQGLRGKHHVIFGNLEKLHDFHQQHFLRELERCQHCPLAVGRSFLRHLIGQKQFPESPSGERPGLTSSHAPCPWMPHYLPEGPACPVLRIPCEAFNWKHVECTDPVVSPPKQSPLLFQEEQFGMYVIYSKNKPQSDALLSSHGNAFFKDKQRELGDKMDLASYLLRPVQRVAKYALLLQDLLKEASCGLAQGQELGELRAAEARANIKADLPDFMAVWLLFRLVTKLTHLDGDSDLCHHRRRIFLDEIHLCVPLQVNLKEQGQLRCRDEFIVCCGRKKYLRHVFLFEDLILFSKTQKVEGSHDVYLYKQSFKSLLSVEGIRVTGGKSVQVCSNLSSYLLRRKNLTEGCWTRRFQGLMASFFLVTASGSLGEISLVPKTGMGSLSTLAPHAPRGAGVHQACRQGHGYGGLGPALTHPAEGTGPVADMEPPARCSDHRKQEPSGPLPEDGFCCQPEVLGLAALVCLPWAFSSPHKEKAPASRSEKAPSWGHASPKPLSHGRDPPKPMDTWCPVVMCAVMCAAMCADPALSGSVTGREALVSHPQVARQSLDSVAHNLYPLLFKASYLLEQAEVTRAVLGRWPLEEFRLGALLGPGADHPQDLRDRTCRACLEALVRGLADHVLQDRSRRRLRVADLTGIRDVQVQRCPCGRALGRWGRTQLLARTCCELQAEPLAAGRPVEVLADLFVTEGNFEAVVQALRPAGPAPLRVHCPSFRADSLSPSQLLHVLRLAGPGALRKLEVVHNVRLHAGHVQQLLAQVGFPRLASLTLPTKAFDAPPTYASTPDGEDPLLASIARELSKMAQLTELSVAFSTLTGKIPTLLGPLQTPLRVLDLANCALNHTDMAFLADCAHAAHLEVLDLSGHNLVSLYPSTFFRLLSQASRTLRILTLEECGIVDSHVGMLILGLSPCHRLRQLKFLGNPLSARALRRLFTALCELPELRCIEFPVPKDCYPEGAAYPQDELAMSKFNQQKYDEIAEELRAVLLRADREDIQVSTPLFGSFDPDIQETSNELGAFLLQAFKTALENFSRALKQIE

SEQ ID NO: 53173 - protein, 100 aa, Homo sapiens
  DOMAIN (6)..(37): HMG14 and HMG17 proteins domain identified by eMATRIX, accession number BL00355, p-value=2.528e-25, raw score of 5.97
  DOMAIN (1)..(84): HMG14 and HMG17 domain identified by PFam, accession name HMG14_17, E-value=1.1e-15, PFam score of 65.6
HEKVTKQEPTRRSARLSAKPAPPKPEPKPRKTSAKKEPGAKISRGAKGKKEEKQEAGKEGTAPSENGETKAEEIHISRSTVNVSTSRGTPPSTLHRKLNL

SEQ ID NO: 53174 - protein, 152 aa, Homo sapiens
  DOMAIN (48)..(79): HMG14 and HMG17 proteins domain identified by eMATRIX, accession number BL00355, p-value=2.528e-25, raw score of 5.97
  DOMAIN (30)..(127): HMG14 and HMG17 domain identified by PFam, accession name HMG14_17, E-value=3.5e-18, PFam score of 73.8
LQRQRQHPAAAPAVPVRCFTFCFTDIVIMPKRKSPENTEGKDGSKVTKQEPTRRSARLSAKPAPPKPEPKPRKTSAKKEPGAKISRGAKGKKEEKQEAGKEGTAPSENGETKAEEIHISRSTVNVSTSRGTPPSTLSVKGQIETVRVKGTEN

SEQ ID NO: 53175 - protein, 94 aa, Homo sapiens
  DOMAIN (81)..(94): NONHISTONE CHROMOSOMAL PROTEIN HMG17 FAMILY SIGNATURE domain identified by eMATRIX, accession number PR00925B, p-value=9.229e- 14, raw score of 3.73
  misc_feature (1)...(94): Xaa = X or * as defined in Table 2
SSCPAREQLQRQRQHPAAAPAVPVRCFTFCFTDIVIMPKRKSPENTEGKDGSKVTKQEPTRRSARLSAVFVXFKLSLQKPAPPKPEPKPRKTSA

SEQ ID NO: 53176 - protein, 137 aa, Homo sapiens
  DOMAIN (46)..(77): HMG14 and HMG17 proteins domain identified by eMATRIX, accession number BL00355, p-value=2.528e-25, raw score of 5.97
  DOMAIN (28)..(124): HMG14 and HMG17 domain identified by PFam, accession name HMG14_17, E-value=6.9e-20, PFam score of 79.5
APTRPPAAAPAVPVLCFTFCFTDIVIMPKRKSPENTEGKDGSKVTKQEPTRRSARLSAKPAPPKPEPKPRKTSAKKEPGAKISRGAKGKKEEKQEAGKEGTAPSENGETKAEEVLSINTSHLIESVSLKKFLKSFSR

SEQ ID NO: 53177 - protein, 149 aa, Homo sapiens
  DOMAIN (66)..(97): HMG14 and HMG17 proteins domain identified by eMATRIX, accession number BL00355, p-value=4.450e-22, raw score of 5.97
  DOMAIN (48)..(147): HMG14 and HMG17 domain identified by PFam, accession name HMG14_17, E-value=9.3e-17, PFam score of 69.1
AEVQVEEAGLRRALRVSSCSGRGSIQRRFYAVPVRCFTFCFTDIVIMPKRKSPENTEGIDGSKVTKQEPTRRSARLSAKPAPPNPEPQPRKTSAKKEPGAKISRGAKGKKEEKQEAGKEGTAPAENDETKAEEAQKTESVDNEGRMNCP

SEQ ID NO: 53178 - protein, 44 aa, Homo sapiens
RNQRLEVDYSIGRDSQRQDLSAIARTLQEWCVGCEVVLSGIEEQ

SEQ ID NO: 53179 - protein, 132 aa, Homo sapiens
GRAVGASSGWTPCDTHFSFASCVLGSGHPEPKSPTLSAVMSAEVKVTGQNQEQFLLLAKSAKGAALATLIHQVLEAPGVYVFGELLDMPNVRELAESDFASTFRLLTVFAYGTYADYLAEARNLPPLTEAQK

SEQ ID NO: 53180 - protein, 44 aa, Homo sapiens
RNQRLEVDYSIGRDIQRQDLSAIARTLQEWCVGCEVVLSGIEEQ

SEQ ID NO: 53181 - protein, 46 aa, Homo sapiens
ATSQDPEQHLTELREPAPGTNQRQPSKKASKGKGLRGSAKIWSKSN

SEQ ID NO: 53182 - protein, 138 aa, Homo sapiens
MPLLYHLSRCAYVQQCNFANPVVSALCTCLVKPVVEKCTPYAVLLEALALRNVRQLEDLVIEAVYADVLRGSMDQRNQRLEVDYSIGRDIQRQDLSAIARTLQEWGCHQHLLSLRSAASQRQQCGYHKLHDKQRLLRG

SEQ ID NO: 53183 - protein, 84 aa, Homo sapiens
LHILFPCSSGHPEPKSPTLNALMSAEVKVTGQNQEQFLLLAKSAKGAALATLIHQVLEAPGVYVFGELLDMPNVRELKPGIFLH

SEQ ID NO: 53184 - protein, 298 aa, Homo sapiens
RPAEPDPGSGHPEPKSPTLSAVMSAEVKVTGRNQEQFLLLAKSAKGAVLATLIHQVLEAPGVYVFGELLDMPNVRELAESDFASTFRLLTVFAYGTYADYLAEARNLPPLTEAQKNKLSDTFSVVTLAAKVKCIPYAVLLEALALRNVRQLEDLVIEAVYADVLRGSLDQRNKRLEVDYSIGRDIQRQDLSAIARTLQEWCVGCEVVLSGIEEQVSRANQHKEQQLGLKHQIESEVANLKKTIKVTTAAAAAATSQDPEQHLTELREPAPGTNQRQPSKKASKGKGLRGSAKIWSKSN

SEQ ID NO: 53185 - protein, 439 aa, Homo sapiens
  DOMAIN (75)..(117): D-isomer specific 2-hydroxyacid dehydrogenases NAD-binding si domain identified by eMATRIX, accession number BL00065A, p-value= 8.258e-20, raw score of 31.92
  DOMAIN (76)..(224): D-isomer specific 2-hydroxyacid dehydrogen domain identified by PFam, accession name 2-Hacid_DH, E-value=5e-99, PFam score of 242.6
MKPSVILYKALPDDLLQRLQEHFTVHQVANLSPQTVEQNAAIFAEAEGLLGSNENVNAALLEKMPKLRATSTISVGYDNFDVDALTARKILLMHTPTVLTETVADTLMALVLSTARRVVEVAERVKAGEWTASIGPDWYGTDVHHKTLGIVGMGRIGMALAQRAHFGFNMPILYNARRHHKEAEERFNARYCDLDTLLQESDFVCLILPLTDETHHLFGAEQFADRVLVCLQAGTRVCRCALFLGERSKKMATGKSCSRWFAPLAALLMVVSLSGCFDKEGDQRKAFIDFLQNTVMRSGERLPTLTADQKKQFGPFVSDYAILYGYSQQVNQAMDSGLRPVVDSVNAIRVPQDYVTQSGPLREMNGSLGVLAQQLQNAKLQADAAHSALKQSDDLKPVFDQAFTKVVTTPADALQTLIPGGPNFPPHFWWLALLCLPGL

SEQ ID NO: 53186 - protein, 321 aa, Homo sapiens
  DOMAIN (240)..(253): PROTEIN ZINC-FINGER METAL-BINDI domain identified by eMATRIX, accession number PD00066, p-value=2.800e-14, raw score of 13.92
  DOMAIN (198)..(301): Zinc finger, C2H2 type domain identified by PFam, accession name zf-C2H2, E-value=3.8e-25, PFam score of 97.0
RAGGGAPWRFTGTFATVAPETAADLSLHRHLLSRTTSAWGTACITVPIEPPTWPTWAVPIQWGGSATCIQEDKLRQGILYGYSQQVNQAMDSGLRPVVDSVNAIRVPQDYVTQSVPLREMNGSLGVLAQQLQNAKLQADAAHSALKQSDDLKPVFDQAFTKVVTTPADALQPLIPAAQTFTQQLVMVGDYIAQQGTQECGKTFSRASYLVQHSRIHIGKKPYECKECGKAFSSGSYLVQHQRIHTGEKPYECNKCGKAFTVYGQLIGHQSVHTGEKPFECKECGKAFRLNSFLTEHQRVHTGEKPFKCKKCGKTFRYSSAP

SEQ ID NO: 53187 - protein, 67 aa, Homo sapiens
  misc_feature (1)...(67): Xaa = X or * as defined in Table 2
GGGQGATSFGRPESGFIRHQPPPPCRRSSTPTRSKLYTLSAPEXRSVPTSAPGPQDRPPGSVSKKSW

SEQ ID NO: 53188 - protein, 178 aa, Homo sapiens
MGSVSLGNPQGPFQFTRLPLANVIHPTFFWETGPRGADSLGAKGRKWQPTFTSRCNLKVYLGRAGSQAATGGPSPSLPNLHVKKLRPRKAEAWPGRRNTGKVSGRLAALRAPYGESFARAAGPRDAPSQQPRPQPEHAPTLISLGSNFGGMVEESWCRMNPDSGRPKEVAPWPPPSTK

SEQ ID NO: 53189 - protein, 195 aa, Homo sapiens
  DOMAIN (154)..(192): Ribosomal protein S7e proteins domain identified by eMATRIX, accession number BL00948D, p-value=4.339e-25, raw score of 14.77
  DOMAIN (22)..(195): Ribosomal protein S7e domain identified by PFam, accession name Ribosomal_S7e, E-value=9.5e-57, PFam score of 202.0
MGPHWKDFKEIDVKKYIDALSIHTYTHTHTHTHADITDGDHGGGALLELEINSHLKVQFRELNITAAKETEDGGGGKAIIIFVPFPQLKSFQKIQVWLRRILPKPTRKSCTQNMHWPPRSRTLKAMRDSIPEDLVFPSEIMCMRIHVKLDGSRLIKAHLDKAQQYHVERNAETFSGVYMKLTGKDINVEFPEFQL

SEQ ID NO: 53190 - protein, 168 aa, Homo sapiens
  DOMAIN (80)..(133): Ribosomal protein S7e proteins domain identified by eMATRIX, accession number BL00948B, p-value=1.000e-40, raw score of 10.28
  DOMAIN (27)..(168): Ribosomal protein S7e domain identified by PFam, accession name Ribosomal_S7e, E-value=1.9e-79, PFam score of 277.4
APPFELPRAAGIRHEGKFSQEKAMFSSSAKIVKPNGEKPDEFESGISQALLELEMNSDLKAQLRELNITAAKEIEVGGGRKAIIIFVPVPQLKSFQKIQVRLVRELEKKFSGKHVVFIAHRRILPKPTRKSRTKNKQKRPRSRTLTAVHDAIPEDLVFPSEIVGKRNR

SEQ ID NO: 53191 - protein, 83 aa, Homo sapiens
CSWNSSPRSQSPRPIRGSFCICTLGFSFKAPLAQHCISRDDSQDSWCLLAFLCQAKGHHRGPWILCLFLVEGSLCMCVYKYSF

SEQ ID NO: 53192 - protein, 60 aa, Homo sapiens; identical to SEQ ID NO: 46743

SEQ ID NO: 53193 - protein, 243 aa, Homo sapiens
LEEAEHFAMMVISLGEEAGEFLPKGYLALGLTYSLQATDATLKSKQDELHRKALQTLERAQQLAPSDPQVILYVSLQLALVRQTWSQPFYRVQNLKLRALLSEAAVCGGEDSLHPGESGQISSAMEQLQEALKVRKDDAHALHLLALLFSAQKHHQHALDVVNMAITEHPENFKRQHIVLLVAFASVPSTAVDGFLLPKAKERLARSFLESSVCRQEPLPWEQLTHADIAERLQGLQELWRGG

SEQ ID NO: 53194 - protein, 386 aa, Homo sapiens
  DOMAIN (259)..(280): PROTEIN REPEAT DOMAIN TPR NUCLEA domain identified by eMATRIX, accession number PD00126A, p-value=3.172e-09, raw score of 22.53
  DOMAIN (252)..(285): TPR Domain domain identified by PFam, accession name TPR, E- value=0.0027, PFam score of 24.4
MESFRNALQLHFLGAAWILGIPTVFQALDPGVKDQTRVTGGALAPAQKGCGRVEKIRSGPLMLMECQQLQSLMFTKVKLEQVLKGPEEALVTCRQVLRLWQTLYSFSQLGDVGDFSSVFGPEPTAPEPAWSSRRASSIAASRLEEAMSELTMPSSVLKQGPMQLWTTLEQIWLQAGGELEKKPKVDDLLLGHGDLPPSNSSPVREADEWYPLERRLQGNASWAAAELFMEQQHLKEAGFCIQEAAGLFPTSHSVLYMRGRLAEVKGNLEEAKQLYKEALTVNPDGVRIMHSLLPSAQNNPYAQVTYFGVACSAILQQPLKKVLALATEPPTLPALSLAKESVDTLVQLVCTARDNLDTLKHEWTSEVLTHEDDAMAIAQRLITTEF

SEQ ID NO: 53195 - protein, 955 aa, Homo sapiens
  DOMAIN (849)..(870): PROTEIN REPEAT DOMAIN TPR NUCLEA domain identified by eMATRIX, accession number PD00126A, p-value=3.172e-09, raw score of 22.53
  DOMAIN (511)..(943): TPR Domain domain identified by PFam, accession name TPR, E- value=1.7e-18, PFam score of 74.9
MAHLRSCCSSLYQPGHLLPPHNPIQDHPLTAPSLTHLTRRAYFTDEKTKGGQSAYAVSLLRECVKLRPSDPTVPLMAAKVCIGSLRWMAAKHLAGVLLHSLSEECYWSPLSHPLPEFMGKEESSFATQALRKPHLYEGDNLYCPKDNIEEALLLLLISESMLANKLLLLEMERVQSPGVESGVDRQLSPYSDTNVNAQNAQIVPVAAKSAQNEVPGYPEETEKSRVQSNLLTQFQDLRLLLAAPECLPPRMSPPSAHGEGLESGGPSRTGLSLERLPNSIASRFRLTEREEEVITCFERASWIAQVFLQELEKTTNNSTSRHLKGCHPLDYELTYFLEAALQSAYVKNLKKGNIVKGMRELREVLRTVETKATQNFKVMAAKHLAGVLLHSLSEECYWSPLSHPLPEFMGKEESSFATQALRKPHLYEGDNLYCPKDNIEEALLLLLISESMATRDVVLSRVPEQEEDRTVSLQNAAAIYDLLSITLGRRGQYVMLSECLERAMKFAFGEFHLWYQVALSMVACGKSAYAVSLLRECVKLRPSDPTVPLMAAKVCIGSLRWLEEAEHFAMMVISLGEEAGEFLPKGYLALGLTYSLQATDATLKSKQDELHRKALQTLERAQQLAPSDPQVILYVSLQLALVRQISSAMEQLQEALKVRKDDAHALHLLALLFSAQKHHQHALDVVNMAITEHPENFNLIFTKVKLEQVLKGPEEALVTCRQVLRLWQTLYSFSQLGGLEKDGSFGEGLTMKKQSGMHLTLPDAHDADSGSRRASSIAASRLEEAMSELTMPSSVLKQGPMQLWTTLEQIWLQAAELFMEQQHLKEAGFCIQEAAGLFPTSHSVLYMRGRLAEVKGNLEEAKQLYKEALTVNPDGVRIMHSLGLMLSRLGHKSLAQKVLRDAVERQSTCHEAWQGLGEVLQAQGQNEAAVDCFLTALELEASSPVLPFSIIPREL

SEQ ID NO: 53196 - protein, 133 aa, Homo sapiens
  DOMAIN (7)..(50): Glutathione S-transferases domain identified by PFam, accession name GST, E-value=0.0074, PFam score of 12.8
TSQCQLIYESVIACEYLDDAYPGRKLFPYDPYERARQKMLLELFCKILEYQNTTFFGGTCISMIDYLLWPWFERLDVYGILDCVSHTPALRLWISAMKWDPTVCALLMDKSIFQGFLNLYFQNNPNAFDFGLC

SEQ ID NO: 53197 - protein, 248 aa, Homo sapiens
  DOMAIN (27)..(123): Glutathione S-transferases domain identified by PFam, accession name GST, E-value=2.1e-12, PFam score of 44.2
LASPFPVPLHRCSAGSQPPGPVPEGLIRIYSMRFCPYSHRTRLVLKAKDIRHEVVNINLRNKPEWYYTKHPFGHIPVLKTSKCQLIYESVIACEYLDDAYPGRKLFPYDPYERVRQKMLLELFGKVPHLPKEFPGSVEDVGENAPNLKAALRQEFSNLEEILEYQNTTFFGGTCISMIDYLPLWPWFERLECMGYWNCVSHTPALRLWISAMKWDPTVCALLMDKEHFQGFLNPYFQNNPNAFDFGLC

SEQ ID NO: 53198 - protein, 83 aa, Homo sapiens
  DOMAIN (25)..(60): Elongation factor 1 beta/beta'/delta chain proteins domain identified by eMATRIX, accession number BL00824D, p-value=8.579e- 24, raw score of 14.04
  DOMAIN (1)..(83): EF-1 guanine nucleotide exchange domain identified by PFam, accession name EF1BD, E-value=3.6e-38, PFam score of 140.2
  misc_feature (1)...(83): Xaa = X or * as defined in Table 2
ILLDFKPWDDETDMAQLEACVCSIQLEELVXGASKLVPMGYGIRKLQIQCVVEDDKVGTDLLEEITKFEEHVQSVDIAAFNKI

SEQ ID NO: 53199 - protein, 240 aa, Homo sapiens
  DOMAIN (144)..(182): Elongation factor 1 beta/beta'/delta chain proteins domain identified by eMATRIX, accession number BL00824C, p-value=4.068e- 29, raw score of 14.58
  DOMAIN (155)..(240): EF-1 guanine nucleotide exchange domain identified by PFam, accession name EF1BD, E-value=1.1e-42, PFam score of 155.3
APLWPRAERKFYKQMNGPVASASRQSSAPGNDHSELVLQIASLEVENQSLRGVVQELQQAVSNLEAWLNIRRREKSSPGHRSTVPQTQHVSPMRQVERPSPRPPYYDPGQEAEDNEDDDIDLDNKEEDKEARRLREERLRLYAKKAKNPSLVAKSSILLDIKPWDNKTDMTQLEACVRSIQLDGLVSGASKLASVGYGIRKMQIQCVVEDDKVGTDLLEEEITKFEEHVQSVDIAALNKI

SEQ ID NO: 53200 - protein, 157 aa, Homo sapiens
  DOMAIN (96)..(131): Elongation factor 1 beta/beta'/delta chain proteins domain identified by eMATRIX, accession number BL00824D, p-value=4.600e- 20, raw score of 14.04
  DOMAIN (74)..(157): EF-1 guanine nucleotide exchange domain identified by PFam, accession name EF1BD, E-value=0.00011, PFam score of 21.0
PWANEAPAKKPATPAEGDARDDDIDLFGSDNEEEDKQAGHSCGEERLRHYAGEEGPRKPALVWPKSLPSLLDVKPWDDDDGPWPSLEACVRSIQLDGLVWGGFPSLVPVGYGIRKLQIQCVVEDDKVGTDFPWRREITKFEEARARSVDIASFSTRS

SEQ ID NO: 53201 - protein, 945 aa, Homo sapiens
  DOMAIN (584)..(596): FLAVODOXIN SIGNATURE domain identified by eMATRIX, accession number PR00369B, p-value=7.300e-11, raw score of 13.29
  DOMAIN (840)..(935): Ribosomal protein L32 domain identified by PFam, accession name Ribosomal_L32e, E-value=5.5e-10, PFam score of 46.6
MDALMLALGALMLALGLGDPKSAQVSDPDGAEPGPGRATGTDPLVQIHWKLGISEALSIPGGRLYRDLWSLTPVCLHIPGIAHHGPFTLGRMDVVEVAGSWWAQEREDIIMKYEKGHRAGLPEDKGPKSFGSYNNNVDHLGIVHETELPPLTAREVKQIRREISRKSKWVKMLGEWDTYKNSRKLIDRAYQGIPMNIRGPMWSVLLNIEEIKLKNPGRYQVRSARAQPTGQAVSGAQVSSWRERQDHPGELGVKIMKEKGKRSSEHIQQMDLDVSGTLRRHIFFRDRYGTKQRELLYILLAYEEYNPEVGYCRDLSHIAALFLLYLPEEDAFWALVQLLASERHSLQERLTKTSRCGPWARFWNRFVDAWARDDDTVLKHLRASMKKLTRKQGDLPPPACQDNEPGARETRESVSLTHGAFRERAQAGPRAQGQSQEFSQKWERQTRARVVGIQACASFTWREDPLQGGQAGPSRPTSPVPMAHLGGPQGSWRFLQWNSMPRLPTDLDVGDPWFRRYDFRQSCWVRAISQEDQPATCWQAEHPAERETQSVYWELKAYVYLNAVRVRCMNKFRLSCLEEEQLLLLVTSTFGNGDCSGQFEIEKSCELLFQMAESVDYDYDVQDTILDGLLILPCYGSMTTDQQRRIFLPPPPGIRKCVISTNISATSLTIDGTRYVVDGGFVKQLNHNPRLGLDILEVVPISKSEALQRSGRAGRTSSGKCFRIYSKDFWNQCMPDHVIPEIKRTSLTSVVLTLKCLAIHDVIRFPYLDPPNERLILEALKQLYQCDAIDRSGHVTRLGLSMVEFPLPPHLTCAVIKAASLDCEDLLLPIAAMLSVENVFIRPVDPEYQKEAEQRHRELAAKAGGFNDFATLAVIFEQCKSSGFRKFLVHNVKELEVLLMCNKSYCAEITHHVSSKNRKAIVERAAQLAIKVTNPNARLRSKENE

SEQ ID NO: 53202 - protein, 145 aa, Homo sapiens
  misc_feature (1)...(145): Xaa = X or * as defined in Table 2
XSYCAEIAHNVSSKNRKAIVERAAQLAIRVTNPNAQRKVGAVASSYSQRYYQNFCLQLDQPTYSSSFLGGPAAAALGPETAAEEAGHGMNEYTWADIGERWDPQIPAESCQGGPHMVVPRPPEDPEVWPQLAPSTAKEQTSSPQL

SEQ ID NO: 53203 - protein, 163 aa, Homo sapiens
  DOMAIN (1)..(91): Lectin C-type domain identified by PFam, accession name lectin_c, E-value=2.7e-14, PFam score of 60.9
MCSQSGGHLASVHNQNGQLFLEDIVKRDGFPLWVGLSSHDGSESSFEWSDGSTFDYIPWKGQTSPGNCVLLDPKGTWKHEKCNSVKDGAICYKPTKYNHILISALVIASTVILTVLGAIIWFLYKKHSDSRFTTVFSTAPQSPYNEDCVLVVGEENEYPVQFD

SEQ ID NO: 53204 - protein, 206 aa, Homo sapiens
  DOMAIN (9)..(91): Lectin C-type domain identified by PFam, accession name lectin_c, E-value=0.0094, PFam score of 4.0
MRWVVRTLAGCKGRRSQTSSTQQNLVNEEASLPNKCENSDDELNFGWSDGKRLHFSRWAETNGQLEDCVVLDTDGFWKTVDCNDNQPGAICYYSGNPKSHILSIRDEKENNFVLEQLLYFNYMASWVMLGITYRSFTESMAGQPQETYNHVRGEWETSRFYYGGAGERVKEEVLHTFEQPELIRTHSLSREQQGGKSPPTRPLLQD

SEQ ID NO: 53205 - protein, 1740 aa, Homo sapiens
  DOMAIN (180)..(217): Type II fibronectin collagen-binding domain proteins domain identified by eMATRIX, accession number BL00023, p-value=5.729e-15, raw score of 24.31
  DOMAIN (264)..(1680): Lectin C-type domain identified by PFam, accession name lectin_c, E-value=1.9e-113, PFam score of 390.3
SWSRVRPRTRPEGLRQLKMRTGWATPRRPAGLLMLLFWFFDLAEPSGRAVNDPLTIFHGNTGKCIKPGYGWIVADHCDETEDKLWKWVPQHRLFHLHSQKCLGLDITKSVNELRMFSCDSSAMLWWKCEHHSLYGAARYRLALKDGHGTAISNASDVWKKGGSEESLCDQPYHEIYTRDGNSYGRPCEFPFLIDGTWHHDCILDEDHNGPWCATTLNYEYDRKWGICLKPENGCEDNWEKNEQFGRCYQFNTQTALSLEEAYVSCQNQGADLLSINSAGELTYFKKQEGLAKIFWIGLNQLYSARGWEWSDHKPLNFLNWDPDRPSAPTIGGSSCARMDAESGLWQSFSCEAQLPYVCRKPLNNTVELTDVWTYSDTRCDAGWLPNNGFCYLLVNESNSWDKAHAKCKAFSSDLISIHSLADVEVVVTKLHNEDIKEEVWIGLKNINIPTLFQWSDGTEVTLTYWDENEPNVPYNKTPNCVSYLGELGQWKVQSCEEKLKYVCKRKGEKLNDASSDKMCPPDEGWKRHGETCYKIYEDEVPFGTNCNLTITSRFEQEYLNDLMKKYDKSLRKYFWTGLRDVDSCGEYNWATVGGRRRAVTFSNWNFLEPASPGGCVAMSTGKSVGKWEVKDCRSFKALSICKKMSGPLGPEEASPKPDDPCPEGWQSFPASLSCYKVFHAERIVRKRNWEEAERFCQALGAHLSSFSHVDEIKEFLHFLTDQFSGQHWLWIGLNKRSPDLQGSWQWSDRTPVSTIIMPNEFQQDYDIRDCAAVKVFHRPWRRGWHFYDDREFIYLRPFACDTKLEWVCQIPKGRTPKTPDWYNPDRAGIHGPPLIIEGSEYWFVADLHLNYEEAVLYCASNHSFLATITSFVGLKAIKNKIANISGDGQKWWIRISEWPIDDHFTYSRYPWHRFPVTFGEECLYMSAKTWLIDLGKPTDCSTKLPFICEKYNVSSLEKYSPDSAAKVQCSEQWIPFQNKCFLKIKPVSLTFSQASDTCHSYGGTLPSVLSQIEQDFITSLLPDMEATLWIGLRWTAYEKINKWTDNRELTYSNFHPLLVSGRLRIPENFFEEESRYHCALILNLQKSPFTGTWNFTSCSERHFVSLCQKYSEVKSRQTLQNASETVKYLNNLYKIIPKTLTWHSAKRECLKSNMQLVSITDPYQQAFLSVQALLHNSSLWIGLFSQDDELNFGWSDGKRLHFSRWAETNGQLEDCVVLDTDGFWKTVDCNDNQPGAICYYSGNETEKEVKPVDSVKCPSPVLNTPWIPFQNCCYNFIITKNRHMATTQDEVHTKCQKLNPKSHILSIRDEKENNFVLEQLLYFNYMASWVMLGITYRNNSLMWFDKTPLSYTHWRAGRPTIKNEKFLAGLSTDGFWDIQTFKVIEEAVYFHQHSILACKIEMVDYKEEHNTTLPQFMPYEDGIYSVIQKKVTWYEALNMCSQSGGHLASVHNQNGQLFLEDIVKRDGFPLWVGLSSHDGSESSFEWSDGSTFDYIPWKGQTSPGNCVLLDPKGTWKHEKCNSVKDGAICYKPTKSKKLSRLTYSSRCPAAKENGSRWIQYKGHCYKSDQALHSFSEAKKLCSKHDHSATIVSIKDEDENKFVSRLMRENNNITMRVWLGLSQHSVDQSWSWLDGSEVTFVKWENKSKSGVGRCSMLIASNETWKKVECEHGFGRVVCKVPLGPDYTAIAIIVATLSILVLMGGLIWFLFQRHRLHLAGFSSVRYAQGVNEDEIMLPSFHD

SEQ ID NO: 53206 - protein, 150 aa, Homo sapiens
  DOMAIN (88)..(111): Immunoglobulins and major histocompatibility complex proteins domain identified by eMATRIX, accession number BL00290A, p-value= 2.350e-12, raw score of 20.89
  DOMAIN (9)..(150): Immunoglobulin domain identified by PFam, accession name ig, E-value=6.5e-07, PFam score of 27.3
  misc_feature (1)...(150): Xaa = X or * as defined in Table 2
GQSPILVIYHETKRPSGISERFSGSTSGNTATLTITGTQAMDEADYYCQAGRDFGGGTKLTVLGQPKAAPSVTLFPPSSEELQANKATLVCLISDFYPGAVTVAWKAHSNPVKAGVETTTPSKQSNNKYAASSYLSLTPEQXKSHRSYSC

SEQ ID NO: 53207 - protein, 117 aa, Homo sapiens
  DOMAIN (99)..(117): Immunoglobulins and major histocompatibility complex proteins domain identified by eMATRIX, accession number BL00290B, p-value= 9.000e-12, raw score of 13.17
RFSASSEGSSNSGSLTISGLKTEDEADYYWQSYDSSIWVFGGGTKLTVLGAVTVAWKADSSPVKAGVETTTPSKQSNNKYAASSCLSLTPEQWKSHKSYSCQVTHEGSTVEKTVAPT

SEQ ID NO: 53208 - protein, 105 aa, Homo sapiens
  DOMAIN (65)..(99): IMMUNOGLOBULIN V REGION domain identified by eMATRIX, accession number DM00031B, p-value=9.719e-13, raw score of 15.41
  DOMAIN (15)..(98): Immunoglobulin domain identified by PFam, accession name ig, E-value=2e-11, PFam score of 41.9
QPVLTQPSSHSASSGASVRLTCMLSSGFSVGDFWIRWYQQKPGNPPRYLLYYHSDSNKGQGSGVPSRFSGSNDASANAGILRISGLQPEDEADYYCGTWHSNSKT

SEQ ID NO: 53209 - protein, 236 aa, Homo sapiens
  DOMAIN (78)..(112): IMMUNOGLOBULIN V REGION domain identified by eMATRIX, accession number DM00031B, p-value=7.750e-12, raw score of 15.41
  DOMAIN (34)..(221): Immunoglobulin domain identified by PFam, accession name ig, E-value=1.7e-19, PFam score of 67.8
MAWTLLFLTLLTQGTGSWAQSALTQPASVSGSPGQSITISCIGTSSDIGAYYFVSWYQQYPGKAPKLLIFDVSGRPSGISSRFSGSKSGNTASLTISGLQAEDEADYYCASYARSSTVVFGGGTSVTVLGQPKAAPSVTLFPPSSEELQANKATLVCLISDFYPGAVKVAWKADGSPVNAGVETTTPSKQSNNKYAASSYYLSLTPEQWKSHRSYSCQVTHEGSTVEKTVAPTECS

SEQ ID NO: 53210 - protein, 593 aa, Homo sapiens
  DOMAIN (242)..(265): Immunoglobulins and major histocompatibility complex proteins domain identified by eMATRIX, accession number BL00290A, p-value= 1.563e-15, raw score of 20.89
  DOMAIN (34)..(571): Immunoglobulin domain identified by PFam, accession name ig, E-value=6e-28, PFam score of 95.1
MAWIPLFLGVLAYCTGSVASYELTQPPSVSVSPGQTASITCSGDKLGDKYACWYQQKPGQSPVLVIYQDSKRPSGIPERFSGSNSGNTATLTISGTQAMDEADYYCQAWDSSTAHSDTGRCGIVGRPPVRQCWPLLLLGLAMVAHGLLRPMVAPQSGDPDPGASVGSSRSSLRSLWGRLLLQPSPQRADPRCWPRGFWSEPQSLCYVFGTGTKVTVLGQPKANPTVTLFPPSSEELQANKATLVCLISDFYPGAVTVAWKADGSPVKAGVETTKPSKQSNNKYAASSYLSLTPEQWKSHRSYSCQLQWGLGLGASQGGFLYEPVSQCVVFGGGTKLTVLGQPKAAPSVTLFPPSSEELQANKATLVCLISDFYPGAVTVAWKADSSPVKAGVETTTPSKQSNNKYAASSYLSLTPEQWKSHRSYSCQKPNHASHGTSRMPSVSAPVSGLKSCWSGTGDRSALGQMPGPCHGIPDPMQQASDSGQPKAAPSVTLFPPSSEELQANKATLVCLISDFYPGAVTVAWKADSSPVKAGVETTTPSKQSNNKYAASSYLSLTPEQWKSHKSYSCQVTHEGEHRGEDSGPYRMFIGSQL

SEQ ID NO: 53211 - protein, 667 aa, Homo sapiens
  DOMAIN (118)..(150): GLYCOPROTEIN PROTEIN PRECURSOR SA domain identified by eMATRIX, accession number PD01469, p-value=2.333e-28, raw score of 20.59
  DOMAIN (262)..(488): S-adenosylmethionine synthetase domain identified by PFam, accession name S-AdoMet_synt, E-value=3.1e-237, PFam score of 572.5
MVLDSNGICMHLGLCKSRQPEPEQEPGMSDPLPKPLRDPLPDPLLDKLVLPVLPGALQARPGPHTQDLSEQQFPIPLPYCWLCRALIKRIQAMIPKGALAVAVAQVCRVVPLVAGGICQCLAERYSVILLDTLLGRMLPQLVCRLVLRCSMDDSAGPRSPTGEWLPRDSECHLCMSVTTQAGNSSEQAIPQAMLQACVGSWLDREKECALLDERLVEAVELSVHVGVGVRKWPYEGAAARRQRLRNAQAADSVLLVAGGRRGANEAAGGFDYKTCNVLVALEQQSPDIAQGVHLDRNEEDIGAGDQGLMFGYATDETEECMPLTIVLAHKLNAKLAELRRNGTLPWLRPDSKTQVTVQYMQDRGAVLPIRVHTIVISVQHDEEVCLDEMRDALKEKVIKAVVPAKYLDEDTIYHLQPSGRFVIGGPQGDAGLTGRKIIVDTYGGWGAHGGGAFSGKDYTKVDRSAAYAARWVAKSLVKGGLCRRVLVQSEHFKTTSQKVARKFWWKNVKMIVLICVIGFIIILFIVLFATENAARSSYPSSRGPAAMLYAPEGRGLKSHAYIHSVQFSHHVFLNLHTLKFYCLPDNYEIIDSSLEDITSSTFNKTTQNLAQKKCWENIRYRICVGLVVVGVLLIILIVLLVVFLPQSSDSSSAPRTQDAGIASGPGN

SEQ ID NO: 53212 - protein, 398 aa, Homo sapiens
  DOMAIN (18)..(73): S-adenosylmethionine synthetase proteins domain identified by eMATRIX, accession number BL00376A, p-value=1.000e-40, raw score of 10.62
  DOMAIN (16)..(398): S-adenosylmethionine synthetase domain identified by PFam, accession name S-AdoMet_synt, E-value=0, PFam score of 857.5
  misc_feature (1)...(398): Xaa = X or * as defined in Table 2
TGQLNGFHEAFIEEGTFLFTSESVGEGHPDKICDQISDAVLDAHLQQDPDAKVACETVAKTGMILLAGEITSRAAVDLPRKVVRESCLNTLEYDDSSKGFXLQRLVNVLVALEQQSPDIAQGVHLDRNEEDIGAGDQGLMFGYATDETEECMPLTIVLAHKLNAKLAELRRNGTLPWLRPDSKTQVTVQYMQDRGAVLPIRVHTIVISVQHDEEVCLDEMRDALKEKVIKAVVPAKYLDEDTIYHLQPSGRTFVIGGPQGDAGLTGRKIIVDTYGGWGAHGGGAFSGKDYTKVDRSAAYAARWVAKSLVKGGLCRRVLVQVSYAIGVSHPLSISIFHYGTSQKSERELLXIVKKNFDLRPGVIVRDLDLKKPIYQRTAAYGHFGRDSFPWEVPKKLIY

SEQ ID NO: 53213 - protein, 503 aa, Homo sapiens
  DOMAIN (31)..(86): S-adenosylmethionine synthetase proteins domain identified by eMATRIX, accession number BL00376A, p-value=1.000e-40, raw score of 10.62
  DOMAIN (29)..(333): S-adenosylmethionine synthetase domain identified by PFam, accession name S-AdoMet_synt, E-value=1.6e-300, PFam score of 725.3
FFVRSLSHTDTNMNGQLNGFHEALIEEGTFLFTSKADGEGHPDKICDQISEAVLDAHLHQDPDAKVACETVAKTGMILLAGEITSRAAVDYQKVVREAVKHIGYDDSSKGFDYKTCNVLVALEQQSPDIAQGVHLDRNEEDIGAGDQGLMFGYATDETEECMPLTIVLAHKLNAKLAELRRNGTLPWLRPDSKTQVTVQYMQDRGAVLPIRVHTIVISVQHDEEVCLDEMRDALKEKVIKAVVPAKYLDEDTIYHLQPSGRFVIGGPQGDAGLTGRIIIVDPYDGWGAHEEGAFSGKDYTKVSRSAAYGARWVARSLVKGGLCRRVLVQVPGPPKKPDEDLYLECEPDPVLALTQTLSFQVLMPSGPLPRTSVVPREQQMLPLKDSDLLTQPWYSGNCDRYAVESALLHLQKDGAYTVRPSSGPHGSQPFTLAVLLRGRVFNIPIRRLDGGRHYALGREGRNREELFSSVAAMVQHFMWHPLPLVDRHSGSRELTCLLFPTKP

SEQ ID NO: 53214 - protein, 107 aa, Homo sapiens
  DOMAIN (32)..(68): RECEPTOR FC IMMUNOGLOBULIN AFFIN domain identified by eMATRIX, accession number PD01270D, p-value=3.700e-34, raw score of 24.66
  DOMAIN (1)..(50): Immunoglobulin domain identified by PFam, accession name ig, E-value=0.011, PFam score of 13.7
MLRCHSWKDKPLVKVTFFQNGKSQKFSRLDPTFSIPQANHSHSGDYHCTGNIGYTLFSSKPVTITVQANSTDPVKAAQFEPPGRQMIAIRKRQLEETNNDYETADGG

SEQ ID NO: 53215 - protein, 332 aa, Homo sapiens
  DOMAIN (70)..(110): RECEPTOR FC IMMUNOGLOBULIN AFFIN domain identified by eMATRIX, accession number PD01270A, p-value=1.000e-40, raw score of 17.22
  DOMAIN (86)..(220): Immunoglobulin domain identified by PFam, accession name ig, E-value=3.9e-15, PFam score of 53.8
NRQALREGCDCCALGASSLQGVMGILSFLPVLATESDWADCKSPQPWGHMLLWTAVLFLAPVAGTPAAPPKAVLKLEPQWINVLQEDSVTLTCRGTHSPESDSIQWFHNGNLIPTHTQPSYRFKANNNDSGEYTCQTGQTSLSDPVHLTVLSEWLVLQTPHLEFQEGETIVLRCHSWKDKPLVKVTFFQNGKSKKFSRSDPNFSIPQANHSHSGDYHCTGNIGYTLFSSKPVTITVQAPSSSPMGIIVAVVTGIAVAAIVAAVVALIYCRKKRISALPGYPECREMGETLPEKPANPTNPDEADKVGAENTITYSLLMHPDALEEPDDQNRI

SEQ ID NO: 53216 - protein, 195 aa, Homo sapiens
  DOMAIN (60)..(100): RECEPTOR FC IMMUNOGLOBULIN AFFIN domain identified by eMATRIX, accession number PD01270A, p-value=1.000e-40, raw score of 17.22
  DOMAIN (76)..(127): Immunoglobulin domain identified by PFam, accession name ig, E-value=3.2e-08, PFam score of 31.5
  misc_feature (1)...(195): Xaa = X or * as defined in Table 2
LLCSGRHSLQGVMGILSFLPVLATESDWADCKSPQPWGHMLLWTAVLSLAPVAGTPAAPPKAVLKLEPQWINVLQEDSVTLTCRGTHSPESDSIQWFHNGNLIPTHTQPSYRFKANNNDSGEYTCQTGQTSLSDPVHLTVLSGQWRKAPGWTWEGQDGXNLLSGRGLQERGVACLLGSIAVSCLSTYQWLFLPQF

SEQ ID NO: 53217 - protein, 365 aa, Homo sapiens
  DOMAIN (122)..(159): RECEPTOR FC IMMUNOGLOBULIN AFFIN domain identified by eMATRIX, accession number PD01270B, p-value=2.875e-38, raw score of 22.18
EKAVTAVLWAPARLQGVMGILSFLPVLATESDWADCKSPQPWGHMLLWTAVLFLAPVAGTPAAPPKAVLKLEPQWINGGSREDSVTLTCRGTHSPESDSIQWFHNGNLIPTHTQPSLQVSRANNNDSGEYTCQTGQTSLSDPVHLTVLSEWLVLQTPHLEFQEGETIVLRCHSWRDKPLVKVTFFHNGKSKKFSRSDPNFSIPQANHSHSGDYHCTGNIGYTLLFIPRLLTITVQAPSSSPMGIIVAVVTGTAVAAIVAAVVALIYCRKKRISANPTNPDEADKVGAENTITYFTSQWHPGWLWEEPDDQNRILVSIVLALGIWRRNSEREDLVFPGLKFPLGEDTGRCCQFPKEKVFLPGVILP

SEQ ID NO: 53218 - protein, 157 aa, Homo sapiens
  DOMAIN (74)..(111): Ribosomal protein L32e proteins domain identified by eMATRIX, accession number BL00580B, p-value=8.744e-27, raw score of 19.83
  DOMAIN (51)..(149): Ribosomal protein L32 domain identified by PFam, accession name Ribosomal_L32e, E-value=5.8e-41, PFam score of 149.5
MKSSFQGHNKEKREKKGPSLFSAAYGGGSCLLLSIMAALRPLVKPKIVKKRTKEFIWHQSDQHVKIKCNWRKPRGQILMPNTGHGSNKKTKHMLPSGFRKFLVPSVKELEVLMCNKSPCAEIAHSVSSKNKTIVERAAQLAVRVTNPNARLRSEENE

SEQ ID NO: 53219 - protein, 152 aa, Homo sapiens
  DOMAIN (20)..(56): Ribosomal protein L32e proteins domain identified by eMATRIX, accession number BL00580A, p-value=7.652e-37, raw score of 17.63
  DOMAIN (22)..(145): Ribosomal protein L32 domain identified by PFam, accession name Ribosomal_L32e, E-value=1e-14, PFam score of 62.3
  misc_feature (1)...(152): Xaa = X or * as defined in Table 2
GIFRGIMAALRPLVKPKIVKKRTKKFIRHQSDRYVKIKRNWRKPRGIDNRVRRRFKGQILMPNIGYGSNKKTKHMLPKWLSGKFLGSHQRSRELEKLLAXCCNKFFTCCPRFVSHCFSFQGTGKGLRGERSLPNWAFRVTNPNARLRSEENE

SEQ ID NO: 53220 - protein, 57 aa, Homo sapiens
RGVEFLGGSLILAPSFLRMLRRFPDTEPRCPPPPVRTSLRCTSTVSSEFTPAHPRTH

SEQ ID NO: 53221 - protein, 217 aa, Homo sapiens
RFAGAGAIPEARARPPDVQAAEEEKEMDLPDSASRVFCGDASSNMGEHRMNVNAIILAQKNMLDRFEKTNEMLLNFNNLSSARLASRLSERFLHHTRTLVEMKRDLDSIFRRIRTLKGKLARQHPEAFSHIPEASFLEEEDEDPIPTQAPTTTIATSEQSTGSCDTSPDTVSPSLEPLASEDLSHVQALASPAINGPQPDQIDEEMTGRIALPARCL

SEQ ID NO: 53222 - protein, 90 aa, Homo sapiens
MRTVAEKVDAVRIVHIHSVIILRRSDKRKDRVEISPEQLSAASTEAERLAELTGRPMRVVGWYHSHPHITVWPSHVGKYHGVAMFIVFRN

SEQ ID NO: 53223 - protein, 294 aa, Homo sapiens
AKMAVQVVQAVQAVHLESDAFLVCLNHALSTEKEEVMGLCIGELNDDTRSDSKFAYTGTEMRTVAEKVDAVRIVHIHSVIILRRSDKRKDRVEISPEQLSAASTEAERLAELTGRPMRVVGWYHSHPHITVWPSHVDVRTQAMYQMMDQGFVGLIFSCFIEDKNTKTGRVLYTCFQSIQAQKSSEYERIEIPIHIVPHVTIGKVCLESAVELPKILCPQEEQDAYRRIHSLTHLDSVTKIHNGSVFTKNLCSQMSAVSGPLLQWLEDRLEQNQQHLQELHQEKEELMQELSSLE

SEQ ID NO: 53224 - protein, 325 aa, Homo sapiens
LKAMSWAKMAVQVVQAVQAVHLESDAFLVCLNHALSTEKEEVMGLCIGELNDDTSRSDSKFAYTGTEMRTVAEKVDAVRIVHIHSVIILRRSDKRKDQVEISPGQLSAASTEAEKLAELTGHPMRVVGWYHSHPHITVWPSHVDVRTQAMYQMMDQGFVGLIFSCFIEDKNTRAGRVLYTCFQSIQAQKSSESLHGPQDFWSSSQHISIEGQKEEERYERIEIPIHIVPHVTIGKACLESAVELPKILCQEEQDAYWRIHSLTHLDSVTKIHNGSVFTKNLCSQMSAVSGPLLQWLEDRLEQNQQHLQELQQEKEELMQELSSLE

SEQ ID NO: 53225 - protein, 454 aa, Homo sapiens
  DOMAIN (20)..(55): Prion protein domain identified by eMATRIX, accession number BL00291A, p-value=6.422e-10, raw score of 4.49
  DOMAIN (238)..(454): Josephin domain identified by PFam, accession name Josephin, E-value=4.2e-175, PFam score of 595.1
MEKSLLFPSLTTSAGNDRDSRSRSGGGESSGETGSESGPRAPGGPMTPPSPARGSLLSPALTCLPFPTPRRIQVQDVEKPMLGQQRQGLPAGRSPTVAAAILELETSGGDEEEPGRDHLRGVGTVLSEGDGGHACTPRLSGAKFYSEIIAIMVNLLQIVRDHWVHVLVPMGFVIGCYLDRKSDERLTAFRNKSMLFKRDGSSGSREFQLARQDACQWAYSWVGGSLRGKRTEQHPQWQEGSLCAQHCLNNLLQGEYFSPVELSSIAHQLDEEERMRMAEGGVTSEDYRTFLQWFNLNSLLTGPELISDTYLALFLAQLQQEGYSIFVVKGDLPDCEADQLLQMIRVQQMHRPKLIGEELAQLKEQRVHKTDLERVLEANDGSGMLDEDEEDLQRALALSRQEIDMEDEEADLRRAIQLSMQGSSRNISQDMTQTSGTNLTSEELRKRREAYFEK

SEQ ID NO: 53226 - protein, 85 aa, Homo sapiens
KLFQKKNKKSSCISDNFFFLLAIMVNLLQIVRDHWVHVLVPMGFVIGCYLDRKSDERLTAFRNKSMLFKSFPHRELQPSEEVTWK

SEQ ID NO: 53227 - protein, 322 aa, Homo sapiens
  DOMAIN (86)..(101): WILM'S TUMOUR PROTEIN SIGNATURE domain identified by eMATRIX, accession number PR00049D, p-value=6.857e-10, raw score of 0.00
  misc_feature (1)...(322): Xaa = X or * as defined in Table 2
FPGGAACDICWVKEENGSLMSMKMGWKAKSCLPVTVHPRCLTPYSARLSSTFPLXNSITTGPXQSPACKRPFXLTTCXGGSRRNSNRKAAXGPCSPPPPSPPPSPATLPRGPAGLQPPGVPVLPPLRPRKHYAPGGLPPPASLLEDDDDTFCTSQAMQPTAPTKLSPPALLPEKDSFSSALDEIEELCPTSTSTEAATAATDSVKGTSSEAGTQKLDGPQESRADDSKLMDSLPGNFEITTSTGFLTDLTLDDILFADIDTSMYDFDPCTSSSGTASKMAPVSADDLLKTLAPYSSQPVTPSQPFKMDLTELDHIMEVLVGS

SEQ ID NO: 53228 - protein, 1078 aa, Homo sapiens
MELKCVCLKNRSPSAEEQPSLLPEPSAQESHGGHPRSALYGRERLTGQPPSSPHPNPAPWASCPAVIDPVPIYSSVAEAYDSGTEGIPTVPGLRHVESGSLRATAQRLPPERRVQQRTTAPPPRQPPRRPLRASLSAAPPEPREPVVAAGPEPGSLQRPARTALPNRPEPQAASPGTLVEKYAAPVATQDLLDENPCTSRLGVVDLQAVLTLRKLENLRSGAQTPLEGGQSGRVGPHALRWNRGEEEGERLLCILIEMNSSKCENVINPSRGLEVVEEPLYPQVQSSLVSAAVGLPPRHTEVAQQQSEALRQHREQKWLYELLKSPIWKLEKLGPFPNSEEATVPGAGTGPSYSSLALQSGVAWDQVLRNCDGRRAPLQQQVEHLIWSERQAELLSGPEKQVFLFRGVAPFRDSDPGNSGGWGMFLEELGLNLSSKGWTEGKEGDFFAATPGGVSGAGESRALKVACALARDRIGQGGQATDPRADRGALKSCGTASRRPPSRSWGPLVVTLRTPDLNEPEPWSYPTPPDLPQSPEVGAQHVRPRKPRPQEGRGLAVLSRSQGPSRPRELSRPRECIPLRAWAGLTGAASFKRTWPPGTTCRPSAGKAMLCTCQEKSTPHEEERSKVQGSYRGNDRIRTPCSASRLKTRHVLEGVLRVREAQSQLYPLASCVTFGKLLNLSEPAATSVKTPLTPVPYSSFQGCVSPVYVALSLSHLWSDAVLSIGRVAKIRIWQTFSVKGQIANSSDFEGHVVFLQLLNSAIVVRQQTGQHTDTRAWPGSSNAFLTKAGSGQDLAYKQHRVAALKDTGSTETTNCTANPKTRQDLLSAFAEAWSSGKAQKRKRLVLTPGMQRFHGQAFEFGLGMMGRISTSRRGRVQGWATEPSVEQSAEDNEPTEESAPRGNESSLDALRVREQILVDTEVWSSGERQGLETSFESPEWIRSPWESKRQQEWRLSEVQSWAKPWKRQCFKESWGTDVRKRRSRRVQEAGGEPGEKGRCVQHAAGLPGPPVIESMESGQTCSLQEREALKINRHTDTGSIYYNPHLSYMVPGPIKGNDTPVAVRGVCVEVACRRTSAI

SEQ ID NO: 53229 - protein, 533 aa, Homo sapiens
  DOMAIN (121)..(133): Snake toxins proteins domain identified by eMATRIX, accession number BL00272C, p-value=9.182e-10, raw score of 8.27
  DOMAIN (235)..(522): Eukaryotic protein kinase domain identified by PFam, accession name pkinase, E-value=3e-63, PFam score of 223.5
TMTQLYIYIRLLGAYLFIISRVQGQNLDSMLHGTGMKSDSDQKKSENGVTLAPEDTLPFLKCYCSGHCPDDAINNTCITNGHCFAIIEEDDQGETTLASGCMKYEGSDFQCKDSPKAQLRRTIECCRTNLCNQYLQPTLPPVVIGPFFDGSIRWLVLLISMAVCIIAMIIFSSCFCYKHYCKSISSRRRYNRDLEQDEAFIPVGESLKDLIDQSQSSGSGSGLPLLVQRTIAKQIQMVRQVGKGRYGEVWMGKWRGEKVAVKVFFTTEEASWFRETEIYQTVLMRHENILGFIAADIKGTGSWTQLYLITDYHENGSLYDFLKCATLDTRALLKLAYSAACGLCHLHTEIYGTQGKPAIAHRDLKSKNILIKKNGSCCIADLGLAVKFNSDTNEVDVPLNTRVGTKRYMAPEVLDESLNKNHFQPYIMADIYSFGLIIWEMARRCITGGIVEEYQLPYYNMVPSDPSYEDMREVVCVKRLRPIVSNRWNSDECLRAVLKLMSECWAHNPASRLTALRIKKTLAKMVESQDVKI

SEQ ID NO: 53230 - protein, 584 aa, Homo sapiens; identical to SEQ ID NO: 35965
  DOMAIN (455)..(505): ENV polyprotein (coat polyprotein) domain identified by eMATRIX, accession number PF00429, p-value=2.500e-19, raw score of 31.08
  DOMAIN (49)..(579): ENV polyprotein (coat polyprotein) domain identified by PFam, accession name ENV_polyprotein, E-value=4.2e-53, PFam score of 182.3

SEQ ID NO: 53231 - protein, 38 aa, Homo sapiens
ENVEYLRATFHCYLQGPIPTPGSIKWPEPFVRAPVRRW

SEQ ID NO: 53232 - protein, 62 aa, Homo sapiens
  misc_feature (1)...(62): Xaa = X or * as defined in Table 2
DQVVWTKRLQDAILVLVXEFRLHSPALRLCVMKQVGMSQGELEWGQFLKLSSRNRKRSGERI

SEQ ID NO: 53233 - protein, 196 aa, Homo sapiens
  DOMAIN (110)..(170): Eukaryotic protein kinase domain identified by PFam, accession name pkinase, E-value=8.2e-12, PFam score of 46.5
MQKVCHQATADPSEEEENSSLQARLERRPLVQDTDNPISSSPARVKLTDSWSAMDSPSQRDFADFGTTIKQDFRLLGQTSVDRLLQLSQGQAVKGNQLLPVSLRTIAKQIQMVRQVGKGRYGEVWMGKWRGEKVAVKVFFTTEENSWFRETEIYQTVLMRHENILGFIAADIKVPQAKGNIVVITKLHDKQRFFRG

SEQ ID NO: 53234 - protein, 305 aa, Homo sapiens
  DOMAIN (281)..(301): NATURAL RESISTANCE-ASSOCIATED MACROPHAGE PROTEIN SIGNATURE domain identified by eMATRIX, accession number PR00447G, p-value= 9.544e-09, raw score of 6.69
  DOMAIN (158)..(274): ENV polyprotein (coat polyprotein) domain identified by PFam, accession name ENV_polyprotein, E-value=8.1e-19, PFam score of 65.7
MLAALAALACSQRLFGLGAHSGRALQPATALWEPLSGLAKAEAGSLSLRGGVEGEAQTGTGLHMALVGQHEFWVGVGLVDPTLRAAGQLHQPWAVAEAKVIVKVNAPLSLSDLSQNQLAFRLFFIEYKNPAQFMVCLAATLTRFTALDPERSSTYMCLPANWTGTCTLVFLTPKIQIANRTEELPVPLMTPTRQKRVIPLIPLLVGLGLSASTIALSTGIAGISTSVTTFRSLSNDFSASITDISQTLSVLQAQVDSLAAVVLQNRRDLDLLTAVWSADLEAQRSLLLIFLLVPLFTFRSPVSSY

SEQ ID NO: 53235 - protein, 564 aa, Homo sapiens
  DOMAIN (36)..(48): Snake toxins proteins domain identified by eMATRIX, accession number BL00272C, p-value=9.182e-10, raw score of 8.27
  DOMAIN (237)..(553): Eukaryotic protein kinase domain identified by PFam, accession name pkinase, E-value=4.9e-57, PFam score of 202.9
MEALNDADKNGLRNANCGGQENKNQARDSPKAQLRRTIECCRTNLCNQYLQPTLPPVVIGPFFDGSIRWLVLLISMAVCIIAMIIFSSCFCYKGHLLLRVIHIRGQLESEGGVPVVLRILCPQGERKVSSSPLPQHQRILAWSEHREHFLYIPKRQRDFAASPPSKVMDLCLCSGAGGRGHYCKSISSRRRYNRDLEQDEAFIPVGESLKDLIDQSQSSGSGSGLPLLVQRTIAKQIQMVRQVGKGRYGEVWMGKWRGEKVAVKVFFTTEEASWFRETEIYQTVLMRHENILGFIAADIKGTGSWTQLYLITDYHENGSLYDFLKCATLDTRALLKLAYSAACGLCHLHTEIYGTQGKPAIAHRDLKSKNILIKKNGSCCIADLGLAVKFNSDTNEVDVPLNTRVGTKRYMAPEVLDESLNKNHFQPYIMADIYSFGLIIWEMARRCITGGIVEEYQLPYYNMVPSDPSYEDMREVVCVKRLRPIVSNRWNSDEVSGTQSPEEVIRKCHQIYSLLTEHLFTFQCLRAVLKLMSECWAHNPASRLTALRIKKTLAKMVESQDVKI

SEQ ID NO: 53236 - protein, 753 aa, Homo sapiens
  DOMAIN (7)..(52): kw TRANSCRIPTASE REVERSE II ORF2 domain identified by eMATRIX, accession number DM01354N, p-value=2.966e-20, raw score of 13.17
  DOMAIN (456)..(746): Eukaryotic protein kinase domain identified by PFam, accession name pkinase, E-value=2e-59, PFam score of 210.8
MKRIRDYYERSHANNLDNLEEMDELLETHNLPGLNHEETENLNKPITTSLSPLAGVSSTKKNTKNELSIVLPFTGSILPVGFATRPRGLASSNPILLHMVAFLFANGTEELPVPLMTPTRQKKVIPLIPLMVGLGVSASTIALGTGITGISTSVTTFRSLSNDFSASITDISQTLSVLQALVDSSAAVVLQGQLRGLDLLTAEKGGLCIFLNEECCFYLNQSGLVYDNIKKLKDRAQKLANQARQNLDSMLHGTGMKSDSDQKKSENGVTLAPEDTLPFLKCYCSGHCPDDAINNTCITNGHCFAIIEEDDQGETTLASGCMKYEGSDFQCKDSPKAHVRRTIECCRTNLCNQYLQPTLPPVVIGPFFDGSIRWLVLLISMAVCIIAMIISSSCFCYKHYCKSISSRRRYNRDLEQDEAFIPVGESLKDLIDQSQSSGSGSGLPLLVQRTIAKQIQMVRQVGKGRYGEVWMGKWRGEKVAVKVFFTTEEASWFRETEIYQTVLMRHENILGFIAADIKGTGSWTQLYLITDYHENGSLYDFLKCATLDTRALLKLAYSAACGLCHLHTEIYGTQGKPAIAHRDLKSKNILIKKNGSCCIADLGLAVKFNSDTNEVDVPLNTRVGTKRYMAPEVLDESLNKNHFQPYIMADIYSFGLIIWEMARRCITGGIVEEYQLPYYNMVPSDPSYEDMREVVCVKRLRPIVSNRWNSDECLRAVLKLMSECWAHNPASRLTALRIKKMLAKMVESQDVKI

SEQ ID NO: 53237 - protein, 189 aa, Homo sapiens
  DOMAIN (160)..(189): SOMATOSTATIN HORMONE PRECURSOR CLE domain identified by eMATRIX, accession number PD02718, p-value=4.160e-12, raw score of 8.36
GVTSNPKALLGALIAPAFASLPEGRGKRIQALNMFRPKNSWRLGLKYPPSSKEKTQVPKTLISGLPERKSTTRVGEKLQSAHKMPLSPGLLLLLFSGATATAAPLPLEGGPTGRDSEHMQEAAGIRKSSLLTFLAWWFEWTSQASAGPLIGKEAREVARRQEGAPPQQSARRDRMPCRNFFWKTFSSCK

SEQ ID NO: 53238 - protein, 47 aa, Homo sapiens
GIRLPSSADWQKTEAQKRREQLLLDELVALVNKRDALVRDLDAQEKQ

SEQ ID NO: 53239 - protein, 221 aa, Homo sapiens
  DOMAIN (65)..(97): REV protein (anti-repression transactivator protein) domain identified by eMATRIX, accession number PF00424A, p-value=9.521e- 09, raw score of 14.34
RWNSSDPDADRTTLNHADHSSKIVQHRLLSRQEELKERARVLLEQARRDAALKAGNKHNTNTATPFCNRQLSDQQDEERRRQLRERARQLIAEARSGVKMSELPPYGEMAAEKLKERSKASGEQNSKLVDLKLKKLLEVQPQVANSPSSAAQKAVTESSEQDMKSGTEDLRTERLQKTTERFRNPVVFSKDSTVRKTQLQSFSQYIENRPEMKRQRSIQED

SEQ ID NO: 53240 - protein, 479 aa, Homo sapiens
  DOMAIN (419)..(451): kw TRANSCRIPTASE REVERSE II ORF2 domain identified by eMATRIX, accession number DM01354J, p-value=2.627e-15, raw score of 15.12
MWTGHLERERDAGPSASCSSLFSQDQTEQAGAVTPQHSLPKRRLQTQTSLHSCGPGKASPALSASEVPASAVWLLPAIGTCSNLGTKLELSSGAVTARPEIVNQLNALSSLDEDQDDCIKQANMRSAKSASSSEELINKLNFLDEAEKDLATVNSNPFDDPDAAELNPFGDPDSEEPITETASPRKTEDSFYNNSYNPFKEVQTPQYLNPFDEPEAFVTIKDSPPQSTKRKNIRPVDMSKYLYADSSKTEEEELDESNPFYEPKSTPPPNNLVNPVQELETERRVKRKAPAPPVLSPKTGVLNENTVSAGKDLSTSPKCTHVCTLPPRHCWCKHMHTDPATLPLPACRHCCPIPAGVCAPHLIAATSASAHAQSPLPHQYGHEPHCCHPDEMLLPAPHIRVILPADWEHLRPSSTAAKAVLRGQLVTPSAHIKKLERSQINNVIPHLEELGNQEQTNRKLAEDDKSSAKIRAEVYEIEA

SEQ ID NO: 53241 - protein, 669 aa, Homo sapiens
  DOMAIN (61)..(91): Actinin-type actin-binding domain proteins domain identified by eMATRIX, accession number BL00019D, p-value=4.200e-19, raw score of 15.33
  DOMAIN (42)..(147): Calponin homology (CH) domain identified by PFam, accession name CH, E-value=2.4e-17, PFam score of 71.1
MAKPYLYKKYGNQQGVAAIPDVPAAWEAEPSPIPSPVLGRKPNASQSLLVWCKEVTKNYRGVKITNFTTSWRNGLSFCAILHHFRPDLIDYKSLNPQDIKENNKKAYDGFASIGISRLLEPSDMVLLAIPDKLTVMTYLYQIRAHFSGQELNVVQIEENSSKSTYKVGNYETDTNSSVDQEKFYAELSDLKREPELQQPISGAVDFLSQDDSVFVNDSGVGESESEHQTPDDHLSPSTASPYCRRTKSDTEPQKSQQSSGRTSGSDDPGICSNTDSTQAQVLLGKKRLLKAETLELSDLYVSDKKKDMSPPFICEETDEQKLQTLDIGSNLEKEKLENSRSLECRSDPESPIKKTSLSPTSKLGYSYSRDLDLAKKKHASLRQTESDPDADRTTLNHADHSSKIVQQDEERRRQLRERARQLIAEARSGVKMSELPSYGEMAAEKLKERSKASGDENDNIEIDTNEEIPEGFVVGGGDELTNLENDLDTPEQNSKLVDLKLKKLLEVQPQVANSPSSAAQKAVTESSEQDMKSGTEDLRTERLQKTTERFRNPVVFSKDSTVRKTQLQSFSQYIENRPEMKRQRSIQEDTKKGNEEKAAITETQRKPSEDEKGFKDTSQYVVGELAALENEQKQIDTRAALVEKRLRYLMDTGQNLILTGSATADLDQN

SEQ ID NO: 53242 - protein, 1023 aa, Homo sapiens
  DOMAIN (254)..(284): Actinin-type actin-binding domain proteins domain identified by eMATRIX, accession number BL00019D, p-value=4.200e-19, raw score of 15.33
  DOMAIN (237)..(342): Calponin homology (CH) domain identified by PFam, accession name CH, E-value=2.4e-17, PFam score of 71.1
LDEYEARLTLANLDDFEEDNEDDDENRVNQEEKAAKITELINKLNFLDEAEKDLATVNSNPFDDPDAAELNPFGDPDSEEPITETASPRKTEDSFYNNSYNPFKEVQTPQYLNPFDEPEAFVTIKDSPPQSTKRKNIRPVDMSKYLYADSSKTEEEELDESNPFYEPKSTPPPNNLVNPVQELETERRVKRKAPAPPVLSPKTGVLNENTVSAGKDLSTSPKPSPIPSPVLGRKPNASQSLLVWCKEVTKNYRGVKITNFTTSWRNGLSFCAILHHFRPDLIDYKSLNPQDIKENNKKAYDGFASIGISRLLEPSDMVLLAIPDKLTVMTYLYQIRAHFSGQELNVVQIEENSSKSTYKVGNYETDTNSSVDQEKFYAELSDLKREPELQQPISGAVDFLSQDDSVFVNDSGVGESESEHQTPDDHLSPSTASPYCRRTKSDTEPQKSQQSSGRTSGSDDPGICSNTDSTQAQVLLGKKRLLKAETLELSDLYVSDKKKDMSPPFICEETDEQKLQTLDIGSNLEKEKLENSRSLECRSDPESPIKKTSLSPTSKLGYSYSRDLDLAKKKHASLRQTESDPDADRTTLNHADHSSKIVQHRLLSRQEELKERARVLLEQARRDAALKAGNKHNTNTATPFCNRQLSDQQDEERRRQLRERARQLIAEARSGVKMSELPSYGEMAAEKLKERSKASGDENDNIEIDTNEEIPEGFVVGGGDELTNLENDLDTPEQNSKLVDLKLKKLLEVQPQVANSPSSAAQKAVTESSEQDMKSGTEDLRTERLQKTTERFRNPVVFSKDSTVRKTQLQSFSQYIENRPEMKRQRSIQEDTKKGNEEKAAITETQRKPSEDEVLNKGFKDSSQYVVGELAALENEQKQIDTRAALVEKRLRYLMDTGRNTEEEEAMMQEWFMLVNKKNALIRRMNQLSLLEKEHDLERRYELLNRELRAMLAIEDWQKTEAQKRREQLLLDELVALVNKRDALVRDLDAQEKQAEEEDEHLERTLEQNKGKMAKKEEKCVLQ

SEQ ID NO: 53243 - protein, 63 aa, Homo sapiens
  misc_feature (1)...(63): Xaa = X or * as defined in Table 2
RPAAPRHERRPAADHGHHRPEPGRGTGQKACSELPSDEACSGIAIGXSLLCSACSVRSRKRQW

SEQ ID NO: 53244 - protein, 199 aa, Homo sapiens
MKPALFSVLCEIKEKTALPDGASAFVWNGQVSAQRKLFMVLILHPVVPTGRLLKGNPMSRGPGVLLDLTHSSHISLWLKSAAGLMECTIQEKNRDGCLKIVYLGSSKTSSMNAKNTASRRGDWVCDGCGSLLRCPTAQTPKGEHAVRQERGMPAPSKWQCHRHPQDSNDAEGKQASYRCVRGNRFTLNSGLFHPSSYGP

SEQ ID NO: 53245 - protein, 67 aa, Homo sapiens
FIDGSSTRPNRHTPAKSGYAIVQATSPPLRTSHFLSIVEIYPQGNNFSVFHLLFYYSSGIIQAISCL

SEQ ID NO: 53246 - protein, 1131 aa, Homo sapiens
  DOMAIN (70)..(81): RNase H domain identified by eMATRIX, accession number PF00075B, p-value=1.346e-09, raw score of 12.56
  DOMAIN (241)..(374): RNase H domain identified by PFam, accession name rnaseH, E- value=4.4e-12, PFam score of 53.6
  misc_feature (1)...(1131): Xaa = X or * as defined in Table 2
LLQWRHGLLNPINSPYNSPILPVQKPDKPYRLVQHLCLIYQIVLPIHPMVPNPYTLLSSIPFTTHYSVLDLKHAFFTIPLYPSSQPLFAFTWTDPDTHQAQQITLAVLPQCFIDSPHYFSQAQISSSSVTYLGIILMKTHIGLGAVEQGVVLVGEARAAQEPMEWVGGSGMVGCRSRALPRGKAAKARREIERSAVTIVPVLDFNPAFHIIPDTTPDHHDCISLIHLTFTPFPHISFFPVPHLEHTWFIDGSSTRPNCHSPAKAGYAIVSSTSIIEATALPRSTTSQQAKLIAYTDSKCAFHILHHHAVIWEERNFLTMQGASIINAFLIKTLLKDILLPKEAGVIHCKGHQKASDPITQDNAYADKVAKQAASVPTSVPHGRFSPSHPATLTYFPTKTSTYQSLPTQGKXFLSLLGKGWVQLMKTVWSSLPGKERTEIGLGPGIWELGLLSWVELSQASGADQWGLKLEILVRQLQGYPKEKTKLMEAARKQDTPQNKRWITKWKNEAEEIGGGLHSFTSKEDNYTLVVDMNCLDVQGCGDDVNNRLLHSASYPTASWVDEAMPTASGRSQHQAHLTQLRQSCTENTYACSLCLSYKVPYSVSSRHTDTAILPTKKGMQTQPTSAFGVGPQWNAYILSQLPRPSGKSNACPHISQSQTSSSALSTSYNYVFTCVLTALTSYLWTDVYVPPKFTCTAVRIKVTIHDAQSTYQGKVPAGTQASAIVEFGFSLPQIPDCPWSFKKDSLSLGQESGAKQEHQGYGLRMLSAGSNDQAGHWELLSRLQAGLHEGPCLPFQPLPQTLERWLHTGITWGAFKRYGGLGLTPAQDLRKGLPRANPQSLGLTWPPGLQTSQPLRAREEPGERHGPGTPGPGSAVAREDAAPAVARGRGRTGAAASRARNGNWLRLQPQPRPSVGAPKSLPAAGRGRRRAGAVKAGSHGAAIRPGEINSFIAHAKPFGGLFTRTRVTFGAEDPGQEDSFRRPVPCPHPHSVRRSTYDLGSSDQTAQGTSHQFQIGSSRTDAARSPQKPPGPSQMLWVTLTVEAWPFKSYKLSLQFPHFTCPKTGQALQVSSASVPYLPNCFAYPPHGAKPIYSLILNTLHNPLFCSGSQTCFLYYSFVPFITASLRFHLD

SEQ ID NO: 53247 - protein, 494 aa, Homo sapiens
  DOMAIN (239)..(382): RNase H domain identified by PFam, accession name rnaseH, E- value=6.7e-24, PFam score of 92.8
MEENFIRVFFTTTTMLLLIALIKQGELCESFDGKSLDGRDERVVICFDAAAGLHRACSIRGEQQNLGTHYFTWQRLFAEVIKLGGLMKPKARNASSLWKEKTKNGFFSLETPEERQTSDLHKYQLAFRLFFIKYKNPAQFMAHLATTLRHFTALDPESSHNFQNLFSSSHLMHILSAPRLLRLYSRFVESPTVTIVPGPDFNPASNIIPDTTPDPHDCISLIHLAFTPFPYISFFPVPHPDHTWFIDGSSTRPNCHTPAKAGYAIVSSTSIIEATALPPSTTSRQAELIALTQALTLAKGLRINIYTDSHILHHHAVLWAERGFLTMQGSSIINASLIKTLLQAALLPKEAEVIHCKGHQKASDPITQGNAYADKVPSLAHAPTLTLAPVLQCPLREVAGTEDDNGKAVLEIPSNIRKSAHVPVQTWKGWDPTNLLGGWFSNLGGFKTLVGTVIFIIGFLLFLPCVIPRIIKAIKTLVETTVSRQIIQTILLLQ

SEQ ID NO: 53248 - protein, 307 aa, Homo sapiens
  DOMAIN (68)..(215): RNase H domain identified by PFam, accession name rnaseH, E- value=7.5e-30, PFam score of 112.6
CIYFLLPGSFSYTPLFVESPTITVVPGPDFNLASHIILDTTPDPHDCISLIHLTFTPFPHISFFPVPHPGHTWFNDGSSTRPNRHSPAKAGHAIVFSTSIIEATALPPSTTSQQAELIALIWALTLAKGLHVNIYIDSKYAFHILHHHAVIWAERGFLAMRGSSIINASLIKTLLKAALLPKEAGVIHCKGHQKVSDPITQGNAYADKVAKESASVPTSVPRGQFFSFSSVTPTYSPTETSTYQSLPTQSKWFLDQGKYLLPASQACFILSSFHNLFHVGYKPLAHLLEYLISFLSWKSILKEITSQ

SEQ ID NO: 53249 - protein, 156 aa, Homo sapiens
AWNSKKDPEDVKEVVVWKRYSDFRKLHGDLAYTHRNLFRRLEEFPAFPRAQVFGRFEASVIEERRKGAEDLLRFTVHIPALNNSPQLKEFFRWTPHHPALPRRPWISSLTVRAPRRHLVPLPEAPSPRLSLPSSTPSPRKKAQPPAPPMWLSWQRW

SEQ ID NO: 53250 - protein, 30 aa, Homo sapiens
AAVVIKPLVYPSRTGVCKLPPAAKSGPPPF

SEQ ID NO: 53251 - protein, 97 aa, Homo sapiens
ALWPGLGRQGWALLPHPLPPPALLAPRVPGPALQTPPPSLPAQPHGWGWGLRLLQLEREDSDQTGPSFPRPSAQPQDFFCPSGYQPVPSRGDQCQSN

SEQ ID NO: 53252 - protein, 208 aa, Homo sapiens
RRSCFGFEGLLGAKDLSGVSPVVCSKLTEVPRVCAKPWAPDMTLPGISPPPEKQKRKKKKMPEILGGEVTRPLEVSRDLHILPPPLIPTPPPDDPRLSQLLPAERRGLEELELAPARTPPDSVKDASAAEPAAPERVLGDVPGACTPVVPTRIPAIVSLSRGPVSPLVRFQLPNVLFAYAHTLALYHGGDDALLSDFCATLLGVSGAL

SEQ ID NO: 53253 - protein, 189 aa, Homo sapiens
MRTRRPRPGLGAAPEGAAKDDFLRHYTVSDPRTHPKGYTEYKVTAQPPEYLGLQVHAATPQHESLEKDNLALRKEIQSLQAELAWWSRTLHFISKKDPEDVKEVVVWKRYSDFRKLHGDLAYTHRNLFRRLEEFPAFPRAQVFALPKAKWENFQASASLISSPGSHSTCCYTVSSLDHGVSNSGSFKGA

SEQ ID NO: 53254 - protein, 166 aa, Homo sapiens
GGGRRSAPLQLGFMSRQAKDDFLRHYTVSDPRTHPKGYTEYKVTAQFISKKDPEDVKEVVVWKRYSDFRKLHGDLAYTHRNLFRRLEEFPAFPRAQVFGRFEASVDSRERRKGAEDLLRFTVHIPALNNSPQLKEFFRGGEVTRPLEVSRDLHILPPPLIPTPPPG

SEQ ID NO: 53255 - protein, 154 aa, Homo sapiens
FLPAAPVETQAPAILALAALLILLGLLSTALLGHLLCFHIYLMWHKLTTYEYIVQHRPPQEAKGVHRELESCPPKMRPIQEMEFYMRTFRHMRPEPPGQAGPAAVNAKHSRPASPDPTPGRRDCAAPPVQVERDRKKPLPWRSPLLLLAMWVPL

SEQ ID NO: 53256 - protein, 37 aa, Homo sapiens
MWKQSRCPRRVGLTKNSTKTYVATSTRSRTPSKADAT

SEQ ID NO: 53257 - protein, 63 aa, Homo sapiens
QGPMWTSSSPKSRGSLLGSSTMRSSRRPWKSWRPRDSRGRARRRPSMPSSCSNFCPPGDSLCL

SEQ ID NO: 53258 - protein, 133 aa, Homo sapiens
  DOMAIN (40)..(127): DHHC zinc finger domain identified by PFam, accession name zf -DHHC, E-value=5.2e-18, PFam score of 73.3
MGAIFAGHLVVHLTAVSIDPADANVRDKSYAGPLPIFNRSQHAHVIEDLHCNLCNVDVPHSTTPTGRAAERGMSRANRRCAPSPCRSARSKHCSACNKCVCGFDHHCKWLNNCVGERNYRVASALLGVLLLVL

SEQ ID NO: 53259 - protein, 245 aa, Homo sapiens
  DOMAIN (153)..(217): DHHC zinc finger domain identified by PFam, accession name zf -DHHC, E-value=1.8e-31, PFam score of 118.0
GSTMYKMNICNKPSNKTAPEKSVWTAPAQPSGPSPELQGQRSRRNGWSWPPHPLQIVAWLLYLFFAVIGFGILVPLLPHHWVPAGYAVSLGKRRAGPWNPFLSVSAETILPQCMGAIFAGHLVVHLTAVSIDPADANVRDKSYAGPLPIFNRSQHAHVIEDLHCNLCNVDVSARSKHCSACNKCVCGFDHHCKWLNNCVGERNYRLFLHSVASALLGVLLLVLGGHICLRGVLCQPHASAHQPTL

SEQ ID NO: 53260 - protein, 74 aa, Homo sapiens
PRVRVQWAQLSQDKKGEMNSMTSTAGPPGSSSAPCATRRNLLQRQHLQRLSGEFKKDPATYSKHLEPLEEERDK

SEQ ID NO: 53261 - protein, 419 aa, Homo sapiens
  DOMAIN (53)..(101): HMG (high mobility group) box domain identified by PFam, accession name HMG_box, E-value=0.00012, PFam score of 16.9
QQPSGSGALARGSGLPPRPGRLPARSPVQKRKGGWPKGKKRNPPRDLAVRVPTTGYMIFLNEQRSQLRATHPDLPFTEIMKMLAVQWAQLSQDKKGRKYAGKALGVTPPPSALTPVALIEEPKQLDIQSLPFQPILDRLKIKDKRQLVPSYLGGMHTVTEGLAGRQVLLQQVQGGAWESAFLTCPWAMAAAAPGPTLTMLQPSISAVGFSQMAMGPHVQGRASKLSIYVNPRRQLSTTTAMGDELNDLYCGTSRQLFSSLCNKKEPAAKAAPAAPLSSPGPPALGHAGHGRQLLLERSLTLFHLYELLKYPRASPGLWPPRVWMPHSLTCGTFWVPMIMMRFCAHVASGLLRPPFNQVFAHLSPAQGRHPGENGIIVLTSRAAVRIRCSSCSRSLTGNLKKILPRTQSTWSLWRKRRDK

SEQ ID NO: 53262 - protein, 134 aa, Homo sapiens; identical to SEQ ID NO: 42419
  DOMAIN (92)..(134): Histone H2B proteins domain identified by eMATRIX, accession number BL00357, p-value=1.000e-40, raw score of 7.74
  DOMAIN (18)..(134): Core histone H2A/H2B/H3/H4 domain identified by PFam, accession name histone, E-value=8.6e-55, PFam score of 195.4

SEQ ID NO: 53263 - protein, 130 aa, Homo sapiens
  DOMAIN (88)..(130): Histone H2B proteins domain identified by eMATRIX, accession number BL00357, p-value=1.000e-40, raw score of 7.74
  DOMAIN (14)..(130): Core histone H2A/H2B/H3/H4 domain identified by PFam, accession name histone, E-value=1.9e-54, PFam score of 194.3
LHSAMPEPAKSAPAPKKGSKKAVTKAQKKDGKKRKRSRKESYSIYVYKVLKQVHPDTGISSKAMGIMNSFVNDIFERIAGEASRLAHYNKRSTITSREIQTAVRLLLPGELAKHAVSEGTKAVTKYTSAK

SEQ ID NO: 53264 - protein, 153 aa, Homo sapiens; identical to SEQ ID NO: 42423
  DOMAIN (111)..(153): Histone H2B proteins domain identified by eMATRIX, accession number BL00357, p-value=1.000e-40, raw score of 7.74
  DOMAIN (37)..(153): Core histone H2A/H2B/H3/H4 domain identified by PFam, accession name histone, E-value=8.6e-55, PFam score of 195.4

SEQ ID NO: 53265 - protein, 129 aa, Homo sapiens; identical to SEQ ID NO: 46774
  DOMAIN (61)..(82): HISTONE H2B SIGNATURE domain identified by eMATRIX, accession number PR00621B, p-value=7.750e-26, raw score of 4.91
  DOMAIN (14)..(129): Core histone H2A/H2B/H3/H4 domain identified by PFam, accession name histone, E-value=1.3e-45, PFam score of 165.0

SEQ ID NO: 53266 - protein, 142 aa, Homo sapiens
  DOMAIN (100)..(142): Histone H2B proteins domain identified by eMATRIX, accession number BL00357, p-value=1.000e-40, raw score of 7.74
  DOMAIN (26)..(142): Core histone H2A/H2B/H3/H4 domain identified by PFam, accession name histone, E-value=6.5e-40, PFam score of 146.0
KEETDFLFWFCHYCFIMPELAKSAPAPKKGSKKAVTKAQKKDGKKRKRSRKESYSVYVYKVLKQVHPDTGISSKAMGIMNSFVTTFFERIAGEASRLAHYNKRSTITSREIQTAVRLLLPGELAKHAVSEGTNAVTKYTSSK

SEQ ID NO: 53267 - protein, 101 aa, Homo sapiens
  DOMAIN (10)..(101): Ribosomal L37ae protein family domain identified by PFam, accession name Ribosomal_L37ae, E-value=3e-27, PFam score of 104.0
FTATWLNQEVGIVGKYRTRYGVSLQKMVKKIEISQYAKYICSFLWQNSKMKRRAVGIWCCGSCMKTVKVSSSRNHIVWTYNTTSAVTVKSTIRRLKQLKDQ

SEQ ID NO: 53268 - protein, 142 aa, Homo sapiens
  DOMAIN (36)..(134): Ribosomal L37ae protein family domain identified by PFam, accession name Ribosomal_L37ae, E-value=3.3e-32, PFam score of 120.4
FTCRSHVSEVEERCVEAPGLLGSRSITGFSLHSKQAKRTKKVGIVGKYGNPLWGPSLRKMVKKIEISQHAQVHFALFCGKTKMKRRAVGIWHCGSCMKTVAGGAWTYNTTSAVTVKSAIRRLKEFERPSRTLLYSLRTSLGL

SEQ ID NO: 53269 - protein, 57 aa, Homo sapiens
  DOMAIN (1)..(53): Ubiquitin family domain identified by PFam, accession name ubiquitin, E-value=1.8e-09, PFam score of 33.8
VAQSKAHVASLEGLIPEDKVVLLAGSPLQNEATLGQCGVEALTTLEVVGRRLGVHNV

SEQ ID NO: 53270 - protein, 18 aa, Homo sapiens
  misc_feature (1)...(18): Xaa = X or * as defined in Table 2
MRPSRDATWALRWAAXNL

SEQ ID NO: 53271 - protein, 192 aa, Homo sapiens
  DOMAIN (104)..(156): Ubiquitin domain proteins domain identified by eMATRIX, accession number BL00299, p-value=3.455e-16, raw score of 28.84
  DOMAIN (101)..(163): Ubiquitin family domain identified by PFam, accession name ubiquitin, E-value=7.5e-14, PFam score of 47.3
MVRCVRLVEAGSVVRYLSTSICRPVVDAGSRALCLQEWADSQQVKEKQYSSRDVQRAAALNIYRIPPSSRKPALCPTPRDRLEYDEDRLEHIAYVRARELHTLEVTGLETVAQSKAHVASLEGLIPEDKVVLLAGSPLQNEATLGQCGVEALTTLEVVGRRLGASLHTSASKHTMVRALTYCSSREETFTAI

SEQ ID NO: 53272 - protein, 47 aa, Homo sapiens
  misc_feature (1)...(47): Xaa = X or * as defined in Table 2
MLFASLGGSFRMSDFGLNEGXXXXXXXXXXXAFRRYLEFTCKVISCT

SEQ ID NO: 53273 - protein, 119 aa, Homo sapiens
  DOMAIN (45)..(74): Zn-finger in Ran binding protein and others domain identified by PFam, accession name zf-RanBP, E-value=2.1e-06, PFam score of 34.7
  misc_feature (1)...(119): Xaa = X or * as defined in Table 2
VVQKTEPRLCFAVSPPFSCSLPLPSLFPHSPLLGRPKRQAKPAADEGFWDCSVCTFRNSAEAFKCSICDVRKGTSTRYLKICVTWVVVVIXQVFIEHTAICALGVQWYKDRPGPCSYGA

SEQ ID NO: 53274 - protein, 320 aa, Homo sapiens
  DOMAIN (165)..(206): Hemolysin-type calcium-binding region proteins domain identified by eMATRIX, accession number BL00330B, p-value=9.122e- 10, raw score of 27.59
  DOMAIN (30)..(59): Zn-finger in Ran binding protein and others domain identified by PFam, accession name zf-RanBP, E-value=4.9e-08, PFam score of 40.1
VGGGGVQPSMTMGDKKSPTRPKRQAKPAADEGFWDCSVCTFRNSAEAFKCSICDVRKGTSTRKPRINSQLVAQQVAQQYATPPPPKKEKKEKVEKAGQKRKPEKRPRKFSPSVVTKKNTNKKTKPKSDILKDPPSEANSIQSANATTKTSETNHTSRPRLEKRGTGGIAQQFGQLTVGNVTVIITDFKEKTRSSSTSSSTVTSSAGSEQQNQRQLRGFRGATDKGSLPVPPNPKGRPCQAVNDESFLKLAHGNCGKLWNSGVWKFQNLPPAHACLHPWENLSCGTSTSLVDCCQDNFLLCHGHSWPPRDFRHPDDYSGHF

SEQ ID NO: 53275 - protein, 208 aa, Homo sapiens
MAGCRNPCKAESHRSKSLLSEAESLFREAESQHDRGSKNAGHRDESVEVWLSLLSSSQTRAEIERQSRGKQWLRHLLRDTEGPKETVRPELATRAAMDVAEVEFLAEKELVTIIPNFSLDKSYLIGVDNIPKADEIRTLVKDIWDTRIAKLRVSADSFVRQQEAHAKPDNLTLMEINPSGTFLTQALNHTYKLRTNLQPSESTQSQDF

SEQ ID NO: 53276 - protein, 315 aa, Homo sapiens
MDAAEVEFLAEKELVTIIPNFSLDKIYLIGTWELKYREIRWLSQGPHGKPHADPGSSILQNSSGPSGVRTNGKSKPWEPFVAEEFAHQFHESVLQSTQKALQKHKGSVAVLSAEQNHKVDTSVHYNIPELQSSSRAPPPQHNGQQEPPTARKGPPTQELDRDSEQEQEEDDEDGEDEEEVPKRKWQGIEAVFEAYQEHIEERTLERNRSSTAADKAQLLAANRQGHGQPTDPASDNIPKADEIRTLVKDMWDTRIAKLRVSADSFVRQQEAHAKLDNLTLMEIHTSGTFLTQALNHMYKLRTNLQPLESTQSQDF

SEQ ID NO: 53277 - protein, 208 aa, Homo sapiens; identical to SEQ ID NO: 53275

SEQ ID NO: 53278 - protein, 211 aa, Homo sapiens
RPRRLLRDAEGPEETVRLWPAARAAMDAAEVEFLAEKELVTIIPNFSLDKIYLIGGDLGPFNPGLPVEVPLWLAINLKQRQKCRLLPPEWMDVEKLEKMRDHERKEETFTPMPKPFTTLELTKLLLNHASDNIPKQDEIRTLVKDMWDTRIAKLRVSADSFVRQQEAHAKLDNLTLMEIHTSGTFLTQALNHMYKLRTNLQPLESTQSQDF

SEQ ID NO: 53279 - protein, 344 aa, Homo sapiens
TSSMAAGCSEAPRPAAGSDGSLVGQAGVLPCLELPTYAAACALVNSRYSCLVAGPHQRHIALSPRYLNRKRTGIREQLDAELLRYSESLLGVPIAYDNIKVVGELGDIYDDQGHIHLNIEADFVIFCPEPGQKLMGIVNKVSSSHIGCLVHGCFNASIPKPEQLSAEQWQTMEINMGDELEFEVFRLDSDAAGVFCIRGKLNITSLQFKRSEVSEEVTENGTEEAAKKPKKKKKKKDPETYEVDSGTTKLADDADDTPMEESALQNTNNANGIWEEEPKKKKKKKKHQEVSRTQDPCFSQGQLTSSGYQSDHKKKKKKRKHSEEAEFTPPLKCSPKRKGKSNFL

SEQ ID NO: 53280 - protein, 81 aa, Homo sapiens
  misc_feature (1)...(81): Xaa = X or * as defined in Table 2
XIAVSTDYWLYMEEGTVLPQNQTTEVKMALHAGLWRVCFFAGREKGRCVASEYFLEPEINLVTENTENILKTVRTATPFPM

SEQ ID NO: 53281 - protein, 540 aa, Homo sapiens
  DOMAIN (260)..(311): Octicosapeptide repeat proteins domain identified by eMATRIX, accession number PF00564B, p-value=1.305e-17, raw score of 24.74
  DOMAIN (190)..(455): Eukaryotic protein kinase domain identified by PFam, accession name pkinase, E-value=3.6e-72, PFam score of 253.2
  misc_feature (1)...(540): Xaa = X or * as defined in Table 2
QLEIRAPTADEIHVTVGEARNLIPMDPNGLSDPYVKLKLIPDPRNLTKQKTRTVKATLNPVWNETFVFNLKPGDVERRLSVEVWDWDRTSRNDFMGAMSFGVSELLKAPVDGWYKLLNQEEGEYYNVPVADADNCSLLQKFEACNYPLELYERVRMGPSSSPIPSPSPSPTDPKRCFFGASPGRLHISDFSFLMVLGKGSFGKVMLAERRGSDELYAIKILKKDVIVQDDDVDCTLVEKRVLALGGRGPGGRPHFLTQLHSTFQTPDRLYFVMEYVTGGDLMYHIQQLGKFKEPHAAFYAAEIAIGLFFLHNQGIIYRDLKLDNVMLDAEGHIKITDFGMCKENVFPGTTTRTFCGTPDYIAPEIIAYQPYGKSVDWWSFGVLLYEMLAGQPPFDGEDEEELFQAIMEQTVTYPKSLSREAVAICKGFLTKHPGEAPGASGPXWGNLTIRAHGFFPLGFDWERLERLEIPASFSRPRPCGRSGENFDKFFTRAAPALTPPDRLVLASIDQADFQGFTYVNPDFVHPDARSPTSPVPVPVM

SEQ ID NO: 53282 - protein, 510 aa, Homo sapiens
  DOMAIN (381)..(397): Protein kinases ATP-binding region proteins domain identified by eMATRIX, accession number BL00107B, p-value=9.100e-15, raw score of 13.31
  DOMAIN (435)..(479): Protein kinase C terminal domain identified by PFam, accession name pkinase_C, E-value=5.4e-22, PFam score of 75.5
MLRAPRQATRDHHFAHIDIVQVTCFRYLRRSALAPAPAMPSPVRVDRGSFPPVAGGNHTRRRGGTPQEGVTREALAFFDVVATTGAEMMWSNFFLQEENRRRGAAGRRRAHGQGRSGLTPEREGKVKLALLLAAWAPRWRCCPWAPSSGWTQHLQGQRQRRVRSGPTWGCGRRAPSGCGRRTCPWTGTPAAPRSCPEASERNSEHPALICTLPQPHMLKRRARRAPGSMAPPLPRPPQAASVPVFPPDWEPLESRARSKSPLHSQHRPAQETGRHSRPRTSTRKRQQKHSTEKATHTPERAPKPQTRENNPKGRAQGSPAPRDHNPASRHQKTSNDKRSTHDTHKTRKDSQTRRKKTRNNEKQQPDRIGPQIIAYQPYGKSVDWWSFGVLLYEMLAGQPPFDGEDEEELFQAIMEQTVTYPKSLSREAVAICKGCGRSGENFDKFFTRAAPALTPPDRLVLASIDQADFQGFTYVNPDFVHPDARSPTSPVPVPASSPTRPQLLENKFGC

SEQ ID NO: 53283 - protein, 613 aa, Homo sapiens
SIWGMVMMNPTPSSITLRRMMSLFPASLTTKYGGFYINSGTLQFRQASESEDDFIKEKKKKSPKKRKLKEGGEKIKKKKKDDTYDKEKKSKKSKFSKAGFTALNASKEKKKKKYSGALSVKEMLKKFQKEKEAQKKREEEHKPVAVPSAEAQGLRELEGASDPLLSLFGSTSDNDLLQAATAMDSLTDLDLEHLLSESPEGSPFRDMDDGSDSLGVGLDQEFRQPSSLPEGLPAPLEKRVKELAQAARAAEGESRQKFFTQDINGILLDIEAQTRELSSQVRSGVYAYLASFLPCSKDALLKRARKLHLYEQGGRLKEPLQKLKEAIGRAMPEQMAKYQDECQAHTQAKVAKMLEEEKDKEQRDRICSDEEEDEEKGGRRIMGPRKKFQWNDEIRELLCQVVKIKLESQDLERNNKAQAWEDCVKGFLDAEVKPLWPRGWMQARTLFKESRRGHGHLTSILAKKKVMAPSKIKVKESSTKPDKKVSVPSGQIGGPIALPSDHQTGGLSIGASSRELPSQASGGLANPPPVNLEDSLDEDLIRNPASSVEAVSKELAALNSRAAGNSEFTLPAPSKAPAEKVGGVLCTEEKRNFAKPSPSAPPPASSLQSPLNF

SEQ ID NO: 53284 - protein, 125 aa, Homo sapiens
  DOMAIN (9)..(32): TYROSINE KINASE CATALYTIC DOMAIN SIGNATURE domain identified by eMATRIX, accession number PR00109D, p-value=7.158e-23, raw score of 17.04
  DOMAIN (49)..(113): SAM domain (Sterile alpha motif) domain identified by PFam, accession name SAM, E-value=2.5e-22, PFam score of 87.6
AYRNFTSASDVWSYGIVMWEVMSYGERPYWDMSNQDPNTALLDPASPEFSAVVSVGDWLQAIKMDRYKDNFTAAGYTTLEAVVHVNQEDLARIGITAITHQNKILSSVQAMRTQMQQMHGRMVPV

SEQ ID NO: 53285 - protein, 41 aa, Homo sapiens; identical to SEQ ID NO: 36049

SEQ ID NO: 53286 - protein, 72 aa, Homo sapiens
  DOMAIN (15)..(63): Receptor tyrosine kinase class V proteins domain identified by eMATRIX, accession number BL00790E, p-value=6.000e-35, raw score of 29.58
DQSLDSFLSLSIFHSHSCKIGYYKALSTDATCAKCPPHSYSVWEGATSCTCDRGFFRADNDAASMPCTPIYG

SEQ ID NO: 53287 - protein, 99 aa, Homo sapiens
MRECAAPEEGRADKDRNPQSATPQRGGACVWASFSATAKSRALGLLLPWGCGQRSRGPGVCRDSRLLDFKRWNRKAFQGETPNKPSGGCLSGCSRKSGS

SEQ ID NO: 53288 - protein, 285 aa, Homo sapiens
  DOMAIN (86)..(130): Receptor tyrosine kinase class V proteins domain identified by eMATRIX, accession number BL00790G, p-value=1.000e-40, raw score of 22.06
  DOMAIN (39)..(235): Fibronectin type III domain identified by PFam, accession name fn3, E-value=1.9e-34, PFam score of 127.9
  misc_feature (1)...(285): Xaa = X or * as defined in Table 2
AFSVNSSNSWEKAXSQKCLQVNYLSLSSASYLPCMTCPPSAPLNLISNVNETSVNLEWSSPQNTGGRQDISYNVVCKKCGAGDPSKCRPCGSGVHYTPQQNGLKTTKVSITDLLAHTNYTFEIWAVNGVSKYNPNPDQSVSVTVTTNQAAPSSIALVQAKEVTRYSVALAWLEPDRPNGVILEYEVKYYEKDQNERSYRIVRTAARNTDIKGLNPLTSYVFHVRARTAAGYGDFSEPLEVTTNTGNKDHPDSVTSEAIFIIQLNPITVKSKELSVIFGSADILLQ

SEQ ID NO: 53289 - protein, 366 aa, Homo sapiens
  DOMAIN (72)..(103): Protein kinases ATP-binding region proteins domain identified by eMATRIX, accession number BL00107A, p-value=1.000e-20, raw score of 18.39
  DOMAIN (49)..(216): Eukaryotic protein kinase domain identified by PFam, accession name pkinase, E-value=2.7e-35, PFam score of 130.7
MRWLLKWERKYTLYSSGVLKHKNLLESLLGQFLGPPAQRFDSAGGVRPKNDGRFTVIQLVGMLRGIGSGMKYLSDMSYVHRDLAARNILVNSNLVCKVSDFGMSRVLEDDPEAAYTTRGGKIPIRWTAPEAIAYRKFTSASDVWSYGIVMWEVMSYGERPYWDMSNQDVIKAIEEGYRLPPPMDCPIALHQLMLDCWQKERSDRPKFGQIVNMLDKLIRNPNSLKRTGTESSRPNTALLDPSSPEFSAVVSVGDWLQAIKMDRYKDNFTAAGYTTLEAVVHVNQEVSTQRCNTKGDLARIGITAITHQNKILSSVQAMRTQMQQMHGRMVPRLSTVLNKLKTLEISLPHPCTLIEELHFFNFVFAL

SEQ ID NO: 53290 - protein, 1026 aa, Homo sapiens
  DOMAIN (101)..(153): Receptor tyrosine kinase class V proteins domain identified by eMATRIX, accession number BL00790B, p-value=1.000e-40, raw score of 21.59
  DOMAIN (70)..(244): Ephrin receptor ligand binding domain identified by PFam, accession name EPH_lbd, E-value=1e-145, PFam score of 497.5
NAFRFHLLNPAGESHDRLQDLLSAVRSPTKRQEQRWHRRTMAGIFYFALFSCLFGICDAVTGSRVYPANEVTLLDSRSVQGELGWIASPLEGGWEEVSIMDEKNTPIRTYQVCNVMEPSQNNWLRTDWITREGAQRVYIEIKFTLRDCNSLPGVMGTCKETFNLYYYESDNDKERFIRENQFVKIDTIAADESFTQVDIGDRIMKLNTEIRDVGPLSKKGFYLAFQDVGACIALVSVRVFYKKCPLTVRNLAQFPDTITGADTSSLVEVRGSCVNNSEEKDVPKMYCGADGEWLVPIGNCLCNAGHEERSGECQACKIGYYKALSTDATCAKCPPHSYSVWEGATSCTCDRGFFRADNDAASMPCTRPPSAPLNLISNVNETSVNLEWSSPQNTGGRQDISYNVVCKKCGAGDPSKCRPCGSGVHYTPQQNGLKTTKVSITDLLAHTNYTFEIWAVNGVSKYNPNPDQSVSVTVTTNQAAPSSIALVQAKEVTRYSVALAWLEPDRPNGVILEYEVKYYEKDQNERSYRIVRTAARNTDIKGLNPLTSYVFHVRARTAAGYGDFSEPLEVTTNTVPSRIIGDGANSTVLLVSVSGSVVLVVILIAAFVISRRRSKYSKAKQEADEEKHLNQGVRTYVDPFTYEDPNQAVREFAKEIDASCIKIEKVIGVGEFGEVCSGRLKVPGKREICVAIKTLKAGYTDKQRRDFLSEASIMGQFDHPNIIHLEGVVTKCKPVMIITEYMENGSLDAFLRKNDGRFTVIQLVGMLRGIGSGMKYLSDMSYVHRDLAARNILVNSNLVCKVSDFGMSRVLEDDPEAAYTTRGGKIPIRWTAPEAIAYRKFTSASDVWSYGIVMWEVMSYGERPYWDMSNQDVIKAIEEGYRLPPPMDCPIALHQLMLDCWQKERSDRPKFGQIVNMLDKLIRNPNSLKRTGTESSRPNTALLDPSSPEFSAVVSVGDWLQAIKMDRYKDNFTAAGYTTLEAVVHVNQEDLARIGITAITHQNKILSSVQAMRTQMQQMHGRMVPV

SEQ ID NO: 53291 - protein, 132 aa, Homo sapiens; identical to SEQ ID NO: 49359

SEQ ID NO: 53292 - protein, 468 aa, Homo sapiens
VGDCLTSRGMSWVQATLLARGLCRAWGGTCGAALSQEPPSLRSLASLPRGLHCSAAAHSSEQVLVPSPPEPRQEGPPRLLVPFEGPVLGQGAGLGERGQGRAFLLDGCRNLRTTSVRKRGPHVDLFYLALRKMREYGVERGDLAVYNQLLNIFPKEVFRPRNIIQRIFVHYPRQQECGIAVLEQMENHGVMPNKETEFLLIQIFGRKSYPMLKLVRLKLWFPRFMNVNPFPVPRDLPQDPVELAMFGLRHMEPDLSARVTIYQVPLPKDSTGASKIPPKPHIVGHRACMSPHQESKKSRSSKAALARHNPSRPVFVEGPFSLWLRNKCVYYHILRADLLPPEEEGKWKRTPEEWELYYPRQLDLEYVRSGWDNYEFDINEVEEGPVFAMCMAGAHDQATMVKWIQGPAGDQPQTLAQNPPWSFRLRRVQPGELPDILLQGWRSPHPARGPPRKKTTTCKRQQQGPELV

SEQ ID NO: 53293 - protein, 839 aa, Homo sapiens
  DOMAIN (559)..(614): ELEMENT INSERTION TRANSPOSABLE SEQUENCE TRANSPOSASE FOR domain identified by eMATRIX, accession number PD02662D, p-value= 3.973e-10, raw score of 21.71
MKDPYGFGDSRDSRRDRSPIRGSPRREPRDGRNGRDARDSRDIRDPRDLRDHRHSRDLRDHRDSRSVRDVRDVRDLRDFRDLRDSRDFRDQRDPMYDRYRDMRDSRDPMYRREGSYDRYLRMDDYCRRKDDSYFDRYRDSFDGRGPPGPESQSRAKERLKREERRREELYRQYFEEIQRRFDAERPVDCSVIVVNKQTKDYAESVGRKVRDLGMVVDLIFLNTEVSLSQALEDVSRGGSPFAIVITQQHQIHRSCTVNIMFGTPQGQKLVSDCTEFTETECLPCGESEFLDTWNRETHCHQHKYCDPNLGLRVQQKGTSETDTICTCEEGWHCTSEACESCVLHRSCSPGFGVKQIGNRHLHKERLAVYRWHASFICSGNTMPIVLVDWSDIREQKRLMVLRASVALHGRSVTLYEKAFPLSEQCSKKAHDQFLADLASILPSNTTPLIVSDAGFKVPWYKSVEKLGWYWLSRVRGKVQYADLGAENWKPISNLHDMSSSHSKTLGYKRLTKSNPISCQILLYKSRSKGRKNQRSTRTHCHHPSPKIYSASAKEPWVLATNLPVEIRTPKQLVNIYSKRMQIEETFRDLKSPAYGLGLRHSRTSSSERFDIMLLIALMLQLTCWLAGVHAQKQGWDKHFQANTVRNRNLKIYSHMVTLWGNYEGISQYQVPQFDQSTIKNIESAKGLDVWDSWPLQNADGTVAEYNGYHVVFALAGSPKDADDTSIYMFYQKVGDNSIDSWKNAGRVFKDSDKFDANDPILKDQTQEWSGSATFTSDGKIRLFYTDYSGKHYGKQSLTTAQVNVSKSDDTLKINGVEDHKTIFDGRLYRIPGTYEPYEI

SEQ ID NO: 53294 - protein, 306 aa, Homo sapiens
  DOMAIN (62)..(73): TNFR/NGFR family cysteine-rich region proteins domain identified by eMATRIX, accession number BL00652B, p-value=8.200e- 11, raw score of 12.02
  DOMAIN (51)..(168): TNFR/NGFR cysteine-rich region domain identified by PFam, accession name TNFR_c6, E-value=5.5e-10, PFam score of 46.6
IIVVEFVSRGLARAPSGPAVFSHLAMARLPLRGVRWGCLLTAVHPEPPTACREKQYLINSQCCSLCQPGQKLVSDCTEFTETECLPCGESEFLDTWNRETHCHQHKYCDPNLGLRVQQKGTSETDTICTCEEGWHCTSEACESCVLHRSCSPGFGVKQIATGVSDTICEPCPVGFFSNVSSAFEKCHPWTSCETKDLVVQQAGTNKTDVVCGPQDRLRALVVIPIIFGILFAILLVLVFIKKVAKKPTNKAPHPKQEPQEINFPDDLPGSSNTAAPVAGRIFTWGGQPVTQEDGQRESHFSCRERQ

SEQ ID NO: 53295 - protein, 49 aa, Homo sapiens
MSGTIQLGRKLITKYNRRELTDKLLIFLALALFLATVLYIVKKRLFPFL

SEQ ID NO: 53296 - protein, 194 aa, Homo sapiens
MAAPQDVHVRICNQEIVKFDLEVKALIQDIRDCSGPLSALTELNTKVKEKFQQLRHRIQDLEQLAKEQDKESEKQLLLQEVENHKKQMLRKTTKESLAQTSSTITESLMGISRMMAQQVQQSEEAMQSLVTSSRTILDANEEFKSMSGTIQLGRKLITKYNRRELTDKLLIFLALRLFLATVLYIVKKRLFPFL

SEQ ID NO: 53297 - protein, 868 aa, Homo sapiens
  DOMAIN (174)..(194): Prokaryotic DNA topoisomerase I proteins domain identified by eMATRIX, accession number BL00396F, p-value=2.800e-14, raw score of 19.48
  DOMAIN (531)..(833): Zinc finger, C2H2 type domain identified by PFam, accession name zf-C2H2, E-value=4.4e-92, PFam score of 319.3
MNAISVHAPDLLPQPVVDPDIRNRCWDDKKVDAHHAIIPTARSSAINLTENEAKVYNLIARQYLMQFCPDAVFRKCVIELDIAKGKFVAKARFLAEAGWRTLLGSKERDEENDGTPLPVVAKGDELLCEKGEVVERQTQPPRHFTDATLLSAMTGIARFVQDKDLKKILRATDGLGTEATRAGIIELLFKRGFLTKKGRYIHSTDAGKALFHSLPEMATRPDMTAHWESVLTQISEKQCRYQDFMQPLVGTLYQLIDQAKRTPVRQFRGIVAPGSGGSADKKKAAPRKRSAKKSPPADEVGSGAIARYHSPACFRPNRGVSGSSLTVRLLEGVCCCPVRRCEVESLGVVGGGLVASLKIPCIQCGSLLCYNIERVEVAAECLVLFSAFLPGSVVSICECIVFAPRNPLGVWRSGYRIAAGTVLVCARGCNLGVSPGYKYDQTGNASTVKCDVFRLLRGQKSEPGQKQAKSTLEQTSEYPSNRGIPIIRQRLGGEIQMTMHQGCLAGVNQVPWWLLKPSAFSASVHTRKKPYKCEECGKAFIWSSTLTRHKRMHTGEKPYKCEECGKAFSQSSTLTTHKIIHTGEKRYKCLECGKAFKQLSTLTTHKIIHVGEKLYKCEECGKGFNRSSNLTTHKIIHTGEKPYKCEECGKAFIWSSTLTKHKRIHAREKPYKCEECGKAFIWSSTLTRHKRMHTGEKPYKCEECGKSFSQSSTLTTHKIIHTGEKPYKCEECGKAFNWSSTLTKHKIIHTEEKPYKCEKCGKAFKQSSILTNHKRIHTGEKPYKCEECGKSFNRSSTFTKHKVIHTGVKPYKCEECGKAFFWSSTLTKHKRIHTGEQPYKWEKFGKAFNRSSHLTTDKITHWREILQV

SEQ ID NO: 53298 - protein, 60 aa, Homo sapiens
  misc_feature (1)...(60): Xaa = X or * as defined in Table 2
ATNYTREQDSMWNCVRXGRTTATTHSVTQRTDERQRRADTALTLADYRNTSVTGVFAGLF

SEQ ID NO: 53299 - protein, 216 aa, Homo sapiens
DVERTGTGEPREETGKSGRPAKERTRSEGEKTRSGERRPYGRRGTGAQETNRSGAQRRKRSGRQESSREQAKQRGRRRREGEGRCERARERAAWEGERQEELHPRAHTRTVPDAIRYPERQTPNGLRGANTMHSQMDTLYGDGRTDLQGRELFSPKCPFGAPITDYYAVCRMTEFESKGWITFILNTAMLSRQLQSFMQKIQLTSKVLKLFLALLT

SEQ ID NO: 53300 - protein, 104 aa, Homo sapiens
  misc_feature (1)...(104): Xaa = X or * as defined in Table 2
VFRLLRGQKSEPGKSRPKALXNKPANTPVQSHISLYAAGIINSDSKVRXSCRQSSARQSGSYLXTSPRSPQNRQQTGEITATVIAFGRTRRTAPDITPHPASAR

SEQ ID NO: 53301 - protein, 218 aa, Homo sapiens
  DOMAIN (171)..(190): BACTERIAL SENSOR PROTEIN C-TERMINAL SIGNATURE domain identified by eMATRIX, accession number PR00344C, p-value=1.000e- 14, raw score of 12.49
  DOMAIN (15)..(208): Histidine kinase domain identified by PFam, accession name signal, E-value=3.3e-47, PFam score of 170.3
DFAAKKRRENLRAGEILTLDLASEGSPHARQASEIRQHVLNTTRLVNNLLDMARIQSGGFNLKKEWLTLEEVVGSALQMLEPGLSSPINLSLPEPLTLIHVDGPLFERVLINLLENAVKYAGAQAEIGIDAHVEGENLQLDVWDNGPGLPPGQEQTIFDKFARGNKESAVPGVGLGLAICRAIVDVHGGTITASTDRKVVPVFVLHFPQQMALNLKIS

SEQ ID NO: 53302 - protein, 275 aa, Homo sapiens
GVPNMAAPQDVHVRICNQEIVKFDLEVKALIQDIRDCSGPLSALTELNTKVKEKFQQLRHRIQPVLYQRAFIWTASTFFFKLTYSLTDFSSTQHDFNSPTTPVTFSDLEQLAKEQDKESENQLLLQEVENHKKQMLSNQASWRKANLTCKIAIDNLEKAELLQGGDLLRQRKTTKESLAQTSSTITESLMGISRMMAQQVQQSEEAMQSLVTSSRTILDANEEFKSMSGTIQLGRKLITKYNRRELTDKLLIFLALRLFLATVLYIVKKRLFPFL

SEQ ID NO: 53303 - protein, 76 aa, Homo sapiens
WRTVMSNPTRGLQREITLRLGARLVQEGNRLHYLADRASITGKFSDIECRKLDETFPHFILQMASMLTTGELSPHH

SEQ ID NO: 53304 - protein, 543 aa, Homo sapiens
  DOMAIN (161)..(208): kw TRANSCRIPTASE REVERSE II ORF2 domain identified by eMATRIX, accession number DM01354V, p-value=1.000e-40, raw score of 12.97
MPLTVRSPIYHEAYQILRQQPEAYYETIREVTCRMNPVLALRTASSGGTSSLPCKVFRLLRGQKSEPGQKQAKSTLEQTSEYPSNRGIPIIRQILVIALQASQLDVTCGTPWCQRCLQKICLLNNSLQTQRGTRCRCRHKGVSEQGVGQTESQIMSELPFTIASKRIKYLGIQLTKDVKDLFKENYKPLLNEIKEDTNKWKNIPCSWVGRINIVKMAILPKVNYRFNAIPIKLPMPFFTQLEKTTLKFIWNQKTARIAKSILSQKNKAGGITLPDFKLYYKATVTKTAWYWYQNRDIDQWNRTEPSEIMPHIYNYLIFDKSEKNKQWGKDSLFNKWCWENWLAICRKLKLDPFLTPYTKINSRWIKDLNVRPKTIKTLEENLGITIQDIGMGKDFMSKTPKAMATEAKIDKWDLIKELLHSKRNYHQSEQGTYSMGEKFLQSTHLTKANIQNLQELKHIYKKKSTPHQTIRAHNRNHALSHAAHGRTAAACGYCTHFGGLSEYLCYWGIRWFVLECFWPAFGLVPIFGRRSRRKTYGTVPQSC

SEQ ID NO: 53305 - protein, 78 aa, Homo sapiens
  misc_feature (1)...(78): Xaa = X or * as defined in Table 2
VFRLLRGQKSEPGQKQAKSTLEQTSEYPSNRGIPIIRQSECSIRTPLPFVRALRDXVRGCGCAPLSSVDSFFCCTEAL

SEQ ID NO: 53306 - protein, 375 aa, Homo sapiens
VPNMAAPQDVHVRICNQEIVKFDLEVKAPIQDIRDCSGPLSALTELNPKVKEKFQQLRHRPTGPVEQLAKEQDKESEKQLLLQEVENHKKQMLQQFRPSWEGKLNSSPGKICNSDNLEKAELLQGGDLLRQRKTTKESLAQTSSTITESLMGISGRMMAQQVQQSEEAMQSLVTSSRTILDANEEFKSMSGTIQLGRKLITKYNRRELTDKLLIFLALALFLATVLYIVKKRLFPIFVRFPKVPVLAPFNSLFSGICPWFPEAPRLPKAEAHTPLRFAPQLPCRLGWEHQCPPLFLQSSWLVKGEQSPWEEGPGIGMPPLGTYEPPPSHHCALWEAAAAWSTLKSEPPRTRMPLLSPAPIVPLNARSGGGKREER

SEQ ID NO: 53307 - protein, 197 aa, Homo sapiens
  DOMAIN (55)..(64): Zinc finger C3HC4 type (RING finger), proteins. domain identified by eMATRIX, accession number BL00518, p-value=2.714e-10, raw score of 12.23
  DOMAIN (41)..(83): Zinc finger, C3HC4 type (RING finger) domain identified by PFam, accession name zf-C3HC4, E-value=1.7e-05, PFam score of 22.1
RVRGGEAELAMAAAEEESGAPNVPNRERGGAGRPKTPFECNICLETAREAVVSVCGHLYCWPCLHQWLETRPERQECPVCKAGISREKVVPLYGRGSQEAPRIPELKTPPPPPRGQRPAPESRGGFQPFGDTGGFHFSFGVGAFPFGFFTTVFNAHEPFRRGTGVDLGQGHPSLQLGKEFPLPGFSAIFFLFWLLSN

SEQ ID NO: 53308 - protein, 138 aa, Homo sapiens
  DOMAIN (28)..(43): WILM'S TUMOUR PROTEIN SIGNATURE domain identified by eMATRIX, accession number PR00049D, p-value=8.790e-11, raw score of 0.00
MQRRRRRRLLLLPPRRQTDRALPPPPSPGSMPPPLPPPPPPARGGGLRPGDGLYPKPSPARRGSGARTSWCTMCAPPSTSAPRASRRPRPSSCATRPPTSKPPPAGHAPHPPPRDLGGGLDSGVQSDGVLQHLQRPGH

SEQ ID NO: 53309 - protein, 571 aa, Homo sapiens
  DOMAIN (319)..(362): 'Homeobox' domain proteins domain identified by eMATRIX, accession number BL00027, p-value=5.688e-10, raw score of 26.43
MAGAVPGAIMDEDYYGSAAEWGDEADGGQQEDDSGEGEDDAEVQQECLHKFSTRDYIMEPSIFNTLKRYFQAGGSPENVIQLLSENYTAVAQTVNLLAEWLIQTGVEPVQVQETVENHLKSLLIKHFDPRKADSIFTEEGETPAWLEQMIAHTTWRDLFYKLAEAHPDCLMLNFTVKLISDAGYQGEITSVSTACQQLEVFSRVLRTSLATILDGGEENLEKNLPEFAKMVCHGEHTYLFAQAMMSVLAQEEQGGSAVRRIAQEVQRFAQEKACQALGAMLSKGALNPADITVLFKMFTSMDPPPVELIRVPAFLDLFMQSLFKPGARINQDHKHKYIHILAYAASVVETWKKNKRVSINKDELKSTSKAVETVHNLCCNENKGASELVAELSTLYQCIRFPVVAMGVLKWVDWTVSEPRYFQLQTDHTPVHLALLDEISTCHQLLHPQVLQLLVKLFETEHSQLDVMEQLELKKTLLDRMVHLLSRGYVLPVVSYIRKCLEKLDTDISLIRYFVTEVLDVIAPPYTSDFVQLFLPILENDSIAGTIKTEGEHDPVTEFIAHCKSNFIMVN

SEQ ID NO: 53310 - protein, 77 aa, Homo sapiens
  misc_feature (1)...(77): Xaa = X or * as defined in Table 2
LKVKRNCTSSXSPTIGHDXQSNLSLPPSDFAKPPFPFSLLRCSKFRKLKAAYRKRKKGHKSSLSLSVKINKTAAANK

SEQ ID NO: 53311 - protein, 102 aa, Homo sapiens
  DOMAIN (26)..(46): RIBOSOMAL PROTEIN L5 SIGNATURE domain identified by eMATRIX, accession number PR00058B, p-value=3.625e-09, raw score of 8.75
SLLFRGPASVLIKSHSLTPTYQKKKKKNYPKYSCIFKITNKYIVSLERPGVPDVVYQLSRSLLCKTLLLPLESLWFLLLRLSVLQSQHLIYVLPIPLLLGLY

SEQ ID NO: 53312 - protein, 95 aa, Homo sapiens
LISDAGYQGEITSVSTACQQLEVFSRVLRTSLATILDGGEENLEKNLPEFAKMVCHGEHTYLFAQAMMSVLAQEEQGGSAVRRIAQEVQRFAQEK

SEQ ID NO: 53313 - protein, 77 aa, Homo sapiens; identical to SEQ ID NO: 53310
  misc_feature (1)...(77): Xaa = X or * as defined in Table 2

SEQ ID NO: 53314 - protein, 410 aa, Homo sapiens
  DOMAIN (298)..(322): G-PROTEIN ALPHA SUBUNIT GROUP S SIGNATURE domain identified by eMATRIX, accession number PR00443B, p-value=3.893e-10, raw score of 9.25
  DOMAIN (309)..(384): G-protein alpha subunit domain identified by PFam, accession name G-alpha, E-value=1.1e-20, PFam score of 78.7
HEVAGAVPGAIMDEDYYGSAAEWGDEADGGQQEDDSGEGEDDAEVQQECLHKFSTRDYIMEPSIFNTLKRYFQAGGSPENVIQLLSENYTAVAQAVNLLAEWLIQTGVEPVQVQDTVEYHLKSLLIKHFDPRIADSMFTEEGETPAWLEQMIAHTTWRDLFYKLAEAHPDCLMLNFTVKLISDAGYQGEITSVSTACQQLEVFSRVLRTSLATILDGGEENLEKNLPEFAKMVCHGEHTYLFAQAMMSVLAQEEQGGSAVRRIDQEVQRFAQEKTVLTQEAIITVKGVSLSSYLEGLMASTISSNASKTIVAAMSNLVPPVELANPENQFRVDYILSVMNVPDFDFPPEFYEHAKALWEDEGVRACYERSNEYQLIDCAQYIFVLEMQVPCCEEAQSHPGQHGGVQVGRN

SEQ ID NO: 53315 - protein, 77 aa, Homo sapiens; identical to SEQ ID NO: 53310
  misc_feature (1)...(77): Xaa = X or * as defined in Table 2

SEQ ID NO: 53316 - protein, 142 aa, Homo sapiens
  DOMAIN (61)..(94): Ribosomal protein L24 proteins domain identified by eMATRIX, accession number BL01108A, p-value=7.097e-21, raw score of 20.33
  DOMAIN (61)..(119): KOW motif domain identified by PFam, accession name Ribosomal_L24, E-value=3.2e-11, PFam score of 50.7
GITGSTDASGVTMKFNPFVFSDRRKNRKRHVNAPSHVRRKIMSSPLSKELRQKYNVRSMPIRKDDEVQVVRGHYKGQQIGKVVHVYRKKYVIYIERVQREKANGDKDRKKILERKAKSRQVGKEKGKYKEELIGKMQEYIEP

SEQ ID NO: 53317 - protein, 192 aa, Homo sapiens
EYVAYSHTGRIIPAIWFRYDLSPITVKYTERRQPLYRFITTYFPEGNAPFHNQGNPVFDYVWNTVRRRFGGRLHARNDGIKPFIQSVRQGYWGYYLPDQDHGPEHSEFVDFFATYKATLPAIGRLMKVCRARVVPLFPIYDGKTHRLTIQVVITRLKLDKDRKKILERKAKSRQVGKEKGKYKEELIEKMQE

SEQ ID NO: 53318 - protein, 148 aa, Homo sapiens
MKFNPFVTSDRSKNRKRHFNAPSHVRRKIMSSPALQGAAAEVQCPLHAPSAKDDEVPGSSMDTTKVSKLAKVVPGVPERKYVHPTSERGAAVRKPNGQTVPRGAFHPRQGGYSPGLKTGTRIGKKFFERKAKSRQGGKEQGIIYRRTY

SEQ ID NO: 53319 - protein, 140 aa, Homo sapiens
  DOMAIN (28)..(53): Vertebrate galactoside-binding lectin proteins domain identified by eMATRIX, accession number BL00309A, p-value=2.385e- 13, raw score of 19.16
NNSLSSPVQADVYFPRLIVPFCGHIKGGMRPGKKVGVMGIVDLNPKSFAINLTCGDSEDPPADGAIELKAVFTDRQLLRNSCISGERGEEQVSNPLLSIHSTTMPFRVEILCEHHCFRVFVDGHQLFDFYHPHSNRYLAI

SEQ ID NO: 53320 - protein, 71 aa, Homo sapiens
  misc_feature (1)...(71): Xaa = X or * as defined in Table 2
QGFIKPPLKEENFTLPPPGKFGPPKGSLNSPPSPSSPXSPGGGILLLVYYLYRALFQKGCKEAAWLEYPLT

SEQ ID NO: 53321 - protein, 149 aa, Homo sapiens
PWGPGCNKRWPCLAKDPPPTPQSSGVGQPFGGAEPAGAYIRTGPHLGPPPPPPPDSSTNLHSPNPSDDGADTPLAQSDEEEERGDGGAEPGPAASSGPLAYRPDPAGYSPTSRPPGPSPEPLGAEDPDSLLASRAPRGGNGWWDCGTLS

SEQ ID NO: 53322 - protein, 82 aa, Homo sapiens
  DOMAIN (30)..(58): !!!! PROTEIN ALU SUBFAMILY WARNING ENTRY NUCLEAR PHOSPHO domain identified by eMATRIX, accession number PD02454B, p-value= 2.485e-09, raw score of 11.61
NRYIDKTGWAWWLTPVIRHFRRPRWVDCLRLGVREQPGQHSKIKSLQKNAKISQAWWHAPVDPATWKADAGGSLEPGSLRLQ

SEQ ID NO: 53323 - protein, 221 aa, Homo sapiens; identical to SEQ ID NO: 33883
  DOMAIN (107)..(126): PROTEIN TYROSINE PHOSPHATASE SIGNATURE domain identified by eMATRIX, accession number PR00700D, p-value=4.462e-11, raw score of 12.47
  DOMAIN (26)..(165): Dual specificity phosphatase, catalytic doma domain identified by PFam, accession name DSPc, E-value=2.5e-42, PFam score of 154.1

SEQ ID NO: 53324 - protein, 67 aa, Homo sapiens
GYEAFSASCPELCSKQSTPMGLSLPLSTSVPDSAESGCSSCSTPLYDQVSRCPCHREEVRTGKGMEE

SEQ ID NO: 53325 - protein, 416 aa, Homo sapiens
  DOMAIN (290)..(309): PROTEIN TYROSINE PHOSPHATASE SIGNATURE domain identified by eMATRIX, accession number PR00700D, p-value=4.462e-11, raw score of 12.47
  DOMAIN (222)..(370): Dual specificity phosphatase, catalytic doma domain identified by PFam, accession name DSPc, E-value=2.4e-37, PFam score of 137.5
LFLEKRRPALGPENRQRAPQGRSTLGALRPAMVMEVGTLDAGGLRALLGERAAQLPACLDCRSFFAFNAGHIAGSVNVRFSTIVRRRAKGAIGALEHIVPNAELRGRLLAGAYHAVVLLDERSAGLDGAKRDGTLALAAGRALCREARAAQVFFLSKGGYEAFSASCPELCSKQSTPMGLSLSLSTSVPDSAESGCSSCSTPLYDQGGPVEILPFLYLGSAYHASRKDMLDALGHRLPWINVLSQIVPNHFEGHYQYKSIPVEDNHKADISFWFNEAIDFIDSIKNAGGRVFVHCQAGISRSATICLAYLMRTNRVKLDEAFEFVKQRRSIISPNFQLHGASLLQFEFPRMLGPALFRAEAGKPRQMAVLDRGTSTTTVFNFPVSIPVHSTNSALSVPFRAPLTDLSQLVERPTGR

SEQ ID NO: 53326 - protein, 91 aa, Homo sapiens
LSAPPSAASRGTMADPRVRQIKIKTGVVKRLVKEKVMYEKEAKQQEEKIEKMRAEDGENYDIKKQENEKDLEEAEEYKEARLVLDSVKLEA

SEQ ID NO: 53327 - protein, 164 aa, Homo sapiens
AGFPHDPKVSDTSGRCHTQVTMSRLVKEKVMYEKEAKQQEEKIEKMRAEDGENYDIKKQLKPRMPSVHWSPPTVRARFNASGNRPRVFSPSHRRVYKLTGSVHNDTTCTAEILQESRMMIPDCQRRLEAAYLDLQRILENEKDLEEAEEYKEARLVLDSVKLEA

SEQ ID NO: 53328 - protein, 212 aa, Homo sapiens
MSPASASGEGLMAEGEGRASMSHVSFLWSGEKANFLKHFWLFYRLVKEKVMYEKEAKQQEEKIEKMRAEDGENYDIKKQDHNSLPAREQSWMENEFDKLTEVGFIRWVITNSSELREDILTHRKEAKNLEKNLDEWLTRITSVEKCLKELMELKTKARELREECRSLRSRCDQLEERVSAMEDEMNEMKREGKFREKRIKRNEQASKKYGTM

SEQ ID NO: 53329 - protein, 165 aa, Homo sapiens
PTRTWTRGRIPRLSAQPSRGARGTMADPRVRQIKIKTGVVKRLVKEKVLYEKEPKQQEEKIEKMRAEDGENYDIKKQAEILQESRMMIPDCQRRLEAAYLDLQRILENEKDLEKEAEEYKEARLVLDSVKLESLKLFSYGVVFALKPRGPILQSIIFDHVLCVQV

SEQ ID NO: 53330 - protein, 262 aa, Homo sapiens
  DOMAIN (186)..(198): TYPE II EGF-LIKE SIGNATURE domain identified by eMATRIX, accession number PR00010A, p-value=6.400e-12, raw score of 11.79
  DOMAIN (190)..(221): EGF-like domain identified by PFam, accession name EGF, E- value=7.2e-06, PFam score of 32.9
MAMLLPCQPHSAMTLCSQAPCMKSNNALIVILGTVTLDAVGIGLVMPVLPGLLRDIVHSDSIASHYGVLLALYALMQFLCAPVLGALSDRFGRRPVLLASLLGATIDYAIMATTPVLWIYPLLTVSCPCSMMLFLTTDVLLPLVFIKKLGANVGFLSSKKPLFVLWLGITTLFAFGFAALSRCQSDIDECSGNPCLHGALCENTHGSYHCNCSHEYRGRHCEDAAPNQYVSTPWNIGLAEGIGIVVFVAGIFLLVVVFVLCR

SEQ ID NO: 53331 - protein, 292 aa, Homo sapiens
  DOMAIN (80)..(128): Cadherins extracellular repeat proteins domain proteins domain identified by eMATRIX, accession number BL00232B, p-value= 4.393e-20, raw score of 32.79
  misc_feature (1)...(292): Xaa = X or * as defined in Table 2
VLGAFIWQGLDPSPETAFTDHRATEWGTNDQSLCLNSPXDAPSAKHEYQASVSGSVSSKPEIDLQLYDEVRDQDVPVKRNFARIVVNVSDTNDHAPWFTASSYKGRVYESAAVGSVVLQVTALDKDKGKNAEVLYSIESGSHPPYKTAADVLLKAPPPGWRPTNTKPVHSTEAQPTQNQRTQQKHNQGASRSPRHSFATSTRAGAGICGCKTRRWMTRWMEESRGSLQTLPSTRLEPGSSAAWLDPEEQAQSLQFSSQEAPFLGEGGENHIKGVPHGTKESQQQPLNHRSSL

SEQ ID NO: 53332 - protein, 408 aa, Homo sapiens
MAAARPSPTGYPTIRRTARNKENFSSDSSYVQARKISPGGKLQGLLLVPLEMYVGALKTGYHWDTSDWMPSVPLPDIQEFPNYEVIDEQTPLYSADPNAIDTDYYLGGYDIPSDFPPPPEDFTAADELPPLPPEFSNQFESIHPPRDMPAAGSLGSSSRNRQRFNLNQYLPNFYPLDMGILRGFCRFRNHHQTGFSPAGANQRGPLAATLSGPGGEGQSAVARLTGEKKNHPGAQYANRLSPRVGRFINAAGTTGFPTGKRATAADVLLKAPPPGWRPTNTKPVHSTEAQPTQNQRTQQKHNQGASRSPRHSFATSTRAGAGICGCKTRRWMTRWMEESRGSLQTLPSTRLEPGSSAAWLDPEEQAQSLQFSSQEAPFLGEGGENHIKGVPHGTKESQQQPLNPRSSL

SEQ ID NO: 53333 - protein, 220 aa, Homo sapiens
MHMIIKKIVNQAAVLVFTSALMAGGATQAFAKENNQKAYKETPYFDSKLNKNIYSDIPPQVPVRPISYTPSIPSDSRNNLDRNSFEGSAIPEHPEFSTFNPESVHGHRKAVAVCSVAPNLPPPPPSNSPSDSDSIQKPSWDFDYDNRAERLCFENKPVGFSVLQLVVTDEDSSHNGPPFFFTIVTGNDEKAFEVNPQGVLLTSSAIKRKEKDHYLLQVKV

SEQ ID NO: 53334 - protein, 156 aa, Homo sapiens
  misc_feature (1)...(156): Xaa = X or * as defined in Table 2
LFPRLLSCLTTPPHCSFSICFVICSRTLILKGSSLMYVFCLPNTAIVMALSPRGWRSKFGMPWHSKPTWIMTLXFPLEKTGALSLTSDTSMFTVVVLTLGGLPLSEAXTGGNYDSHFDVDKGTGTIIVAKPLDAEQKSNYNLTVEATDGTTTILTQ

SEQ ID NO: 53335 - protein, 592 aa, Homo sapiens
  DOMAIN (340)..(420): Cadherin domain identified by PFam, accession name cadherin, E-value=0.073, PFam score of 11.7
  misc_feature (1)...(592): Xaa = X or * as defined in Table 2
MAARIEVIHELSIRLLLMKTDLDAATAALLNVQPAKSGDNTSGAPFPGKISQTLLKDPHNGYHVVFALAGSPKDADDTSIYMFYQKVGDNSIDSWKNAGRVFKDSDKFDANDPILKDQTQEWSGSATFTSDGKIRLFYTDYSGKHYGKQSLTTAQVNVSKSDDTLKINGVEDHKTIFDGDGKTYQNVQQFIDEGNYTSGDNHTLRDPHYVEDKGHKYLVFEANTGTENGYQGEESLFNKAYYGGGTNFFRKESQKLQQSAKKRDAELANGALGIIELNNDYTFEKSNEAADHFKHGGGATIKGRVADNGKPQLSSLTYIDIRVIEESIYPPAILPLEIFITASGEEYSGGVIGKIHATDQDVYDTLTYSLDPQMDNLFSVSSTGGKLIAHKKLDIGQYLLNVSVTDGKFTTVADITVHIRQVTQEMLNHTIAIRFANLTPEEFVGDYWRNFQRALRNILGVRRNDIQIVSLQSSEPHPHLDVLLFVEKPGSAQISTKQLLHKINSSVTDIEEIIGVRILNVFQKLCAGLDCPWKFCDEKVSVDESVMSTHSTARLSFVTPRHHRAARQQRGPPLHNPADTXTTARKYNCDKR

SEQ ID NO: 53336 - protein, 4591 aa, Homo sapiens
  DOMAIN (4064)..(4080): AGRIN domain identified by eMATRIX, accession number DM00758, p-value=3.250e-11, raw score of 13.12
  DOMAIN (40)..(3635): Cadherin domain identified by PFam, accession name cadherin, E-value=0, PFam score of 1932.1
AMGRHLALLLLLLLLFQHFGDSDGSQRLEQTPLQFTHLEYNVTVQENSAAKTYVGHPVKMGVYITHPAWEVRYKIVSGDSENLFKAEEYILGDFCFLRIRTKGGNTAILNREVKDHYTLIVKALEKNTNVEARTKVRVQVLDTNDLRPLFSPTSYSVSLPENTAIRTSIARVSATDADIGTNGEFYYSFKDRTDMFAIHPTSGVIVLTGRLDYLETKLYEMEILAADRGMKLYGSSGISSMAKLTVHIEQANECAPVITAVTLSPSELDRDPAYAIVTVDDCDQGANGDIASLSIVAGDLLQQFRTVRSFPGSKEYKVKAIGDIDWDSHPFGYNLTLQAKDKGTPPQFSSVKVIHVTSPQFKAGPVKFEKDVYRAEISEFAPPNTPVVMVKAIPAYSHLRYVFKRTPGKAKFSLNYNTGLISILEPVKRQQAAHFELEVTTSDRKASTKVLVKVLGANSNPPEFTQTAYKAAFDENVPIGTTIMSLSAVDPDEGENGYVTYSIANLNHVPFAIDHFTGAVSTSENLDYELMPRVYTLRIRASDWGLPYRREVEVLATITLNNLNDNTPLFEKINCEGTIPRDLGVGEQITTVSAIDADELQLVQYQIEAGNELDLFSLNPNSGVLSLKRSLMDGLGAKVSFHSLRITATDGENFATPLYINITVAASHKLVNLQCEETGVAKMLAEKLLQANKLHNQGEVEDIFFDSHSVNAHIPQFRSTLPTGIQVKENQPVGSSVIFMNSTDLDTGFNGKLVYAVSGGNEDSCFMIDMETGMLKILSPLDRETTDKYTLNITVYDLGIPQKAAWRLLHVVVVDANDNPPEFLQESYFVEVSEDKEVHSEIIQVEATDKDLGPNGHVTYSILTDTDTFSIDSVTGVVNIARPLDRELQHEHSLKIEARDQAREEPQLFSTVVVKVSLEDVNDNPPTFIPPNYRVKVREDLPEGTVIMWLEAHDPDLGQSGQVRYSLLDHGEGNFDVDKLSGAVRIVQQLDFEKKQVYNLTVRAKDKGKPVSLSSTCYVEVEVVDVNENLHPPVFSSFVEKGTVKEDAPVGSLVMTVSAHDEDAGRDGEIRYSIRDGSGVGVFKIGEETGVIETSDRLDRESTSHYWLTVFATDQGVVPLSSFIEIYIEVEDVNDNAPQTSEPVYYPEIMENSPKDVSVVQIEAFDPDSSSNDKLMYKITSGNPQGFFSIHPKTGLITTTSRKLDREQQDEHILEVTVTDNGSPPKSTIARVIVKILDENDNKPQFLQKFYKIRLPEREKPDRERNARREPLYRVIATDKDEGPNAEISYSIEDGNEHGKFFIEPKTGVVSSKRFSAAGEYDILSIKAVDNGRPQKSSTTRLHIEWISKPKQSLEPISFEESFFTFTVMESDPVAHMIGVISVEPPGIPLWFDITGGNYDSHFDVDKGTGTIIVAKPLDAEQKSNYNLTVEATDGTTTILTQVFIKVIDTNDHRPQFSTSKYEVVIPEDTAPETEILQISAVDQDEKNKLIYTLQSSRDPLSLKKFRLDPATGSLYTSEKLDHEAVSPAHLTVMVRDQDVPVKRNFARIVVNVSDTNDHAPWFTASSYKGRVYESAAVGSVVLQVTALDKDKGKNAEVLYSIESGNIGNIGNSFMIDPVLGSIKTAKELDRSNQAEYDLMVKATDKGSPPMSEITSVRIFVTIADNASPKFTSKEYSVELSETVSIGSFVGMVTAHSQSSVVYEIKDGNTGDAFDINPHSGTIITQKALDFETLPIYTLIIQGTNMAGLSTNTTVLVHLQDENDNAPVFMQAEYTGLISESASINSVVLTDRNVPLVIRAADADKDSNALLVYHIVEPSVHTYFAIDSSTGAIHTVLSLDYEETSIFHFTVQVHDMGTPRLFAEYAANVTVHVIDINDCPPVFAKPLYEASLLLPTYKGVKVITVNATDADSSAFSQLIYSITEGNIGEKFSMDYKTGALTVQNTTQLRSRYELTVRASDGRFAGLTSVKINVKESKESHLKFTQDVYSAVVKENSTEAETLAVITAIGSPINEPLFYHILNPDRRFKISRTSGVLSTTGTPFDREQQEAFDVVVEVIEEHKPSAVAHVVVKVIVEDQNDNAPVFVNLPYYAVVKVDTEVGHVIRYVTAVDRDSGRNGEVHYYLKEHHEHFQIGPLGEISLKKQFELDTLNKEYLVTVVAKDGGNPAFSAEVIVPITVMNKAMPVFEKPFYSAEIAESIQVHSPVVHVQANSPEGLKVFYSITDGDPFSQFTINFNTGVINVIAPLDFEAHPAYKLSIRATDSLTGAHAEVFVDIIVDDINDNPPVFAQQSYAVTLSEASVIGTSVVQVRATDSDSEPNRGISYQMFGNHSKSHDHFHVDSSTGLISLLRTLDYEQSRQHTIFVRAVDGGMPTLSSDVIVTVDVTDLNGNPPLFEQQIYEARISEHAPHGHFVTCVKAYDADSSDIDKLQYSILSGNDHKHFVIDSATGIITLSNLHRHALKPFYSLNLSVSDGVFRSSTQVHVTVIGGNLHSPAFLQNEYEVELAENAPLHTLVMEVKTTDGDSGIYGHVTYHIVNDFAKDRFYINERGQIFTLEKLDRETPAEKVISVRLMAKDAGGKVAFCTVNVILTDDNDNAPQFRATKYEVNIGSSAAKGTSVVKSASDADEGSNADITYAIEADSESVKENLEINKLSGVITTKESLIGLENEFFTFFVRAVDNGSPSKESVVLVYVKILPPEMQLPKFSEPFYTFTVSEDVPVGTEIDLIRAEHSGTVLYSLVKGNTPESNRDESFVIDRQSGRLKLEKSLDHETTKWYQFSILARCTQDDHEMVASVDVSIQVKDANDNSPVFESSPYEAFIVENLPGGSRVIQIRASDADSGTNGQVMYSLDQSQSVEVIESFAINMETGWITTLKELDHEKRDNYQIKVVASDHGEKIQLSSTAIVDVTVTDVNDSPPRFTAEIYKGTVSEDDPQGGVIAILSTTDADSEEINRQVTYFITGGDPLGQFAVETIQNEWKVYVKKPLDREKRDNYLLTITATDGTFSSKAIVEVKVLDANDNSPVCEKTLYSDTIPEDVLPGKLIMQISATDADIRSNAEITYTLLGSGAEKFKLNPDTGELKTSTPLDREEQAVYHLLVRATDGGGRFCQASIVVTLEDVNDNAPEFSADPYAITVFENTEPGTLLTRVQATDADAGLNRKILYSLIDSADGQFSINELSGIIQLEKPLDRELQAVYTLSLKAVDQGLPRRLTATGTVIVSVLDINDNPPVFEYREYGATVSEDILVGTEVLQVYAASRDIEANAEITYSIISGNEHGKFSIDSKTGAVFIIENLDYESSHEYYLTVEATDGGTPSLSDVATVNVNVTDINDNTPVFSQDTYTTVISEDAVLEQSVITVMADDADGPSNSHIHYSIIDGNQGSSFTIDPVRGEVKVTKLLDRETISGYTLTVQASDNGSPPRVNTTTVNIDVSDVNDNAPVFSRGNYSVIIQENKPVGFSVLQLVVTDEDSSHNGPPFFFTIVTGNDEKAFEVNPQGVLLTSSAIKRKEKDHYLLQVKVADNGKPQLSSLTYIDIRVIEESIYPPAILPLEIFITSSGEEYSGGVIGKIHATDQDVYDTLTYSLDPQMDNLFSVSSTGGKLIAHKKLDIGQYLLNVSVTDGKFTTVADITVHIRQVTQEMLNHTIAIRFANLTPEEFVGDYWRNFQRALRNILGVRRNDIQIVSLQSSEPHPHLDVLLFVEKPGSAQISTKQLLHKINSSVTDIEEIIGVRILNVFQKLCAGLDCPWKFCDEKVSVDESVMSTHSTARLSFVTPRHHRAAVCLCKEGRCPPVHHGCEDDPCPEGSECVSDPWEEKHTCVCPSGRFGQCPGSSSMTLTGNSYVKYRLTENENKLEMKLTMRLRTYSTHAVVMYARGTDYSILEIHHGRLQYKFDCGSGPGIVSVQSIQVNDGQWHAVALEVNGNYARLVLDQVHTASGTAPGTLKTLNLDNYVFFGGHIRQQGTRHGRSPQVGNGFRGCMDSIYLNGQELPLNSKPRSYAHIEESVDVSPGCFLTATEDCASNPCQNGGVCNPSPAGGYYCKCSALYIGTHCEISVNPCSSNPCLYGGTCVVDNGGFVCQCRGLYTGQRCQLSPYCKDEPCKNGGTCFDSLDGAVCQCDSGFRGERCQSDIDECSGNPCLHGALCENTHGSYHCNCSHEYRGRHCEDAAPNQYVSTPWNIGLAEGIGIVVFVAGIFLLVVVFVLCRKMISRKKKHQAEPKDKHLGPATAFLQRPYFDSKLNKNIYSDIPPQVPVRPISYTPSIPSDSRNNLDRNSFEGSAIPEHPEFSTFNPESVHGHRKAVAVCSVAPNLPPPPPSNSPSDSDSIQKPSWDFDYDTKVVDLDPCLSKKPLEEKPSQPYSARESLSEVQSLSSFQSESCDDNGYHWDTSDWMPSVPLPDIQEFPNYEVIDEQTPLYSADPNAIDTDYYPGGYDIESDFPPPPEDFPAADELPPLPPEFSNQFESIHPPRDMPAAGSLGSSSRNRQRFNLNQYLPNFYPLDMSEPQTKGTGENSTCREPHAPYPPGYQRHFEAPAVESMPMSVYASTASCSDVSACCEVESEVMMSDYESGDDGHFEEVTIPPLDSQQHTEV

SEQ ID NO: 53337 - protein, 91 aa, Homo sapiens
  misc_feature (1)...(91): Xaa = X or * as defined in Table 2
MREFLKPRSLYLFFRKIHTFQEKPEHDFGXSXLPPVSAPGIQLKGFSVFIFTKVPPRNQQPASVSSGSPSLGPLCGFSGRASLSLRLPFFN

SEQ ID NO: 53338 - protein, 144 aa, Homo sapiens
GEFLKTREFSIYFLEKYTTFPGENLEHGFWDSSTSPPVLLHPGIPASRIPVSSIFTKVPPKKSATKPPVSIWGAPPLGPPGFWGCCPTGEQRGVCHPSEPHPPVVDFRKKPPFLCVSLSLINIFKSNKFLLTTCNLVIFYTCSL

SEQ ID NO: 53339 - protein, 310 aa, Homo sapiens
CQEAASEFGGPLHTPAMFLRRLGGWLPRPWGRRKPMRPDPPYPEPRRVDSSSENSGSDWDSAPETMEDVGHPKTKDSGALRVSRAASEPSKEEPQVEQLGSKRMDSLKWDQPISSTQESGRLEAGGASPKLRWDHVDSGGTRRPGVSPEGGLGVPGPGAPLEKPGRREKLLGWLRGEPGAPSRYLGGPEECLQISTNLTLHLLELLASALLALCSRPLRAALDTLGLRGPLGLWLHGLLSFLAALHGLHAVLSLLTAHPLHFACLFGLLQALVLAVSLREPNGDEAATDWESEGLEREGEEQRGDPGKGL

SEQ ID NO: 53340 - protein, 772 aa, Homo sapiens
RLELKLPLWTMRFTEMELLGHLSIFKITGKQKQLTRTAPGPSGQLRSNQTTGNSLEPSGQPRSSQTTGNSLEPSGQPRSSQTTGNSLEPSGQPRSSQTTGNSLEPSGQPRSSQTTGNSLEPSGQPRSSQTTGNSLEPSGQPRSSQTTGDSLEPSGQLRSNQTTGDSVQPNNREQPGTVRSAPLQPNNREQPGTVRSAPLQPNNRGQRPTKQQGTTWNRQVSSAPTKQQGTARPSGQPRSNQTTGNSLEPSSQLRSNQTTGDSVQPNNREQPGTVRSAPLQPNNRGQRPTKQQGTARPSGQPCSNQTTGNSLEPSSQLRSNQTTGDSVQPNNREQPGTIRSAPLQPNNRGQRWDRQVSSAPTKQGTALGPSGSSAPTKQQGTALEPSSQLRSNQTTGNSLEPSGQPRSNQTTGNSREPSSQLCSNQTIGNSQDRQVSSAPIQTTGNSQDRQVSPAPTKQQGTAGNRQVSSTPIQTGNSVQPNNREQPGTVSGAMVWVATPVKGPARVETSAHKVSAAGLPKKKTQPGVTGGAPRLTLNTVLPKHSRTPSRHEAGSTQALYHNGQAQYALSFPHEAAPMAAFYVVTGIEVTTALTLEEAPCTVEITTALTLEEPPCTVFWNKTERNTRTLVQDKGSNTKGFVQTATCCFRADCKASRPSPHPPSPHREWTSDLRHKQVSKFPGAHRLPGHPELPIQEAWDRGEGTEEDSVAQPFQDRGEGTEEDSVAQPFQDGGEGTEEDSVAQPFQDRGEGTEEDSVAQPFQEVACERFRWLP

SEQ ID NO: 53341 - protein, 68 aa, Homo sapiens
LFVFINFRENPALLRWAYARTINVYPNFRPTPKNSLMGALCGFGPLIFIYYIIKTERVSIQTRCLVFE

SEQ ID NO: 53342 - protein, 221 aa, Homo sapiens
  DOMAIN (53)..(217): Sodium and potassium ATPases domain identified by PFam, accession name Na_K-ATPase, E-value=2.7e-58, PFam score of 203.1
AYSNKVPSWNQKAPSPTKPAGTLIFDFPAVKTVRNKFVFFINYPVSGYTEDLKKFLKPYTLEEQKNLTVCPDGALFEQKGPVYVACQSPISLLQACRGMNDLDFGYSQRNPCILVKMNRIIGLKSEGVPRIDCVSKNEDIPNVAVYPHNGIIDLKYFPYYGEKLHVGYLQPLVAVQVSFAPNDTGKEVTVECKIDGSANLKSQDDRDKFLGRVMFKITACA

SEQ ID NO: 53343 - protein, 124 aa, Homo sapiens
  DOMAIN (48)..(112): Sodium and potassium ATPases domain identified by PFam, accession name Na_K-ATPase, E-value=1.5e-19, PFam score of 70.0
  misc_feature (1)...(124): Xaa = X or * as defined in Table 2
ETEVGGLVEASMSHNCTTALQPGQHSQKENLQNKPIPGREKYXVSIEFELIYFPYYCQVGYLQPLVAVQVSFAPNNTGKEVTVECKIDGSANLKSQDDRDKFLGRVMFQNHSTVHSMSRVSSTE

SEQ ID NO: 53344 - protein, 297 aa, Homo sapiens
  DOMAIN (25)..(80): Sodium and potassium ATPases beta subunits proteins domain identified by eMATRIX, accession number BL00390, p-value=1.000e-40, raw score of 27.44
  DOMAIN (10)..(241): Sodium and potassium ATPases domain identified by PFam, accession name Na_K-ATPase, E-value=5.9e-83, PFam score of 287.9
  misc_feature (1)...(297): Xaa = X or * as defined in Table 2
LLSPVRAHTMTKNEKKSLNQSLAEWKLFIYNPTTGEFLGRTAASWGLILLFYLVFYGFLAALFSFTMWVMLQTLNDEVPKYRDQIPSPGLMVFPKPVTALEYTFSRSDPTSYAGYIEDLKKFLKPYTLEEQKNLTVCPDGALFEQKGPVYVACQFPISLLQACSGMNDPDFGYSQGNPCILVKLNRIIGLKPEGVPRIDLCFKRMKDIPNVAVYSHNGMIDLKYFPYYGKKTAMFVGIYQPIGLLVQVSFAPXQPLGKEVTVECAKIDGSSQPKKVQDDRDKVFGDEFMFQIHSTVH

SEQ ID NO: 53345 - protein, 152 aa, Homo sapiens
SRDSRRGTPLAGGRGRDFAGQMGHRVQGRHGSRGRLPSGDARVNAERAEPVGAGAGGPGGGSSVRGFCGRSWSEARGRRRAGGGVHIEPRYRQFPQLTQIPRCSQSEFFSGLMWFWIFWRFWHDPKKVLGHFPVYPDPSQWTDEELGIPPDD

SEQ ID NO: 53346 - protein, 130 aa, Homo sapiens
  DOMAIN (23)..(74): Leucine rich repeat C-terminal domain identified by PFam, accession name LRRCT, E-value=2.8e-18, PFam score of 74.1
  misc_feature (1)...(130): Xaa = X or * as defined in Table 2
VTIPTSLAELQGLPHIRVFLDNNPWVCDCHMADMVTWLKETEVVQGKDRLTCAYPEKMRNRVLLELNSADLDCDPILPPSLQTSYVFLGIGXALIGAIFLHYRNNGPLTISSEGGLASLLCKDSRGVPLL

SEQ ID NO: 53347 - protein, 549 aa, Homo sapiens
  DOMAIN (346)..(360): LEUCINE-RICH REPEAT SIGNATURE domain identified by eMATRIX, accession number PR00019B, p-value=6.538e-13, raw score of 11.36
  DOMAIN (206)..(396): Leucine Rich Repeat domain identified by PFam, accession name LRR, E-value=3e-22, PFam score of 87.3
PQRIQRGVPTRGEEVAPGRRQEEEREQERGAERPDPPCVLSGGKGRGNRPLREAPGGEGVSQVPAAAPLPRFHERKVFFFQTLPPARALRAQPPEPSERAPSQPSSGETRAAMPGGCSRGPAAGDGRLRLARLALVLLGWVSSSSPTSSASSFSSSAPFLASAVSAQPPLPDQCPALCACRSEAARTVKCVNRNLTEVPTDLPAYVRNLFLTGNQLAVLPAGAFARRPPLAELAALNLSGSRLDEVRAGAFEHLPSLRQLDLSHNPLADLSPFAFSGSNASVSAPSPLVELILNHIVPPEDERQNRSFEGMVVAALLAGRALQGLRRLELASNHFLYLPRDVLAQLPSLRHLDLSNNSLVSLTYVSFRNLTHLESLHLEDNALKVLHNGTLAELQGLPHIRVFLDNNPWVCDCHMADMVTWLKETEVVQGKDRLTCAYPEKMRNRVLLELNSADLDCDPILPPSLQTSYVFLGIVLALIGAIFLLVLYLNRKGIKKWMHNIRDACRDHMEGYHYRYEINADPRLTNLSSNSGCLEEILEDRPRTTLHEM

SEQ ID NO: 53348 - protein, 196 aa, Homo sapiens
  misc_feature (1)...(196): Xaa = X or * as defined in Table 2
ASRLSLPTRTSMRSSSSTSPSSSSSSSSLCRFLLNSRVTDAAFNFLLVWYYCTLTIRESILINNGSRWGRAGPEGGEHGMGCQGPSGKGREQGAGGXWWVFCSRVKGWWVFHHYVSTFLSGVMLTWPDGLMYQKFRNQFLSFSMYQSFVQFLQYYYQSGCLYRLRALGERHTMDLTVGESGVALASGHSPFLPSRV

SEQ ID NO: 53349 - protein, 422 aa, Homo sapiens
MAPLHSILGNRVGLCQASVRACPGATVSSQCRASLRSRLAWRGSELPANRGRTWPGPGGLRLQAAPRLAYLGRATLLVLTPYYDLPPNVRFTSMPASPHTYFLVLGAPIFLLLRSTWSYYHACRFEYATPNDRNTTYLAISGPTRRTYDVATFAYKDEYEKFKLYLTIILILISFTCRFLLNSRVTDAAFNFLLVWYYCTLTIRESILINNGSRPDGLMYQKFRNQFLSFSMYQSFVQFLQYYYQSGCLYRLRALGERHTMDLTVEGFQSWMWRGLTFLLPFLFLWYNSGQLFNALTLFKPGPRDPQLQGVGRCLCCGFPFLLLFLGNFFTTLRVVHHKFHSQRHGSKKDLRLGLSPCRPRRGFLVPVCFWEGDWEGAPSSVRVSGGLFYSPLGFMGRCGPGKEDPGPSCPQLKRRPRGEKK

SEQ ID NO: 53350 - protein, 53 aa, Homo sapiens
SHCPQEPSSAPVGGRESAAPGSSPSSTIPSASTSSSPKPVGKAMVSAILTGRV

SEQ ID NO: 53351 - protein, 128 aa, Homo sapiens
  DOMAIN (54)..(76): AAA-protein family proteins domain identified by eMATRIX, accession number BL00674B, p-value=4.000e-23, raw score of 4.46
  DOMAIN (56)..(128): ATPases associated with various cellular act domain identified by PFam, accession name AAA, E-value=0.032, PFam score of -39.9
EFIIAAHLVDPLKMHVTWSDIAGLDDVITDLKDTVILPIKKKHLFENSRLLQPPKGVLLYGPPGCGKTLIAKATAKEAGCRFINLQPSTLTDKWYGESQKLAAAVFSLAIKLQPSIIFIDEIDSFLRN

SEQ ID NO: 53352 - protein, 189 aa, Homo sapiens
CQQDTIDLLKSLPLPEYCNPEGKFNLASHLPGFFVRPDLGPRLCSAYGVVAAKDHDIGTTNLHIEVSDVVNILVYVGIAKGNGILSKAGILKKFEEEDLDDILRKRLKDSSEIPGALWHIYAGKDVDKIREFLQKISKEQGLEVLPEHDPIRDQSWYVNKKLRQRLLEEYGVRTCTLIQFLGDAIVLPA

SEQ ID NO: 53353 - protein, 291 aa, Homo sapiens
  DOMAIN (81)..(121): G-protein coupled receptors proteins domain identified by eMATRIX, accession number BL00237A, p-value=3.667e-17, raw score of 27.68
  DOMAIN (33)..(199): 7 transmembrane receptor (rhodopsin family) domain identified by PFam, accession name 7tm_1, E-value=1.3e-14, PFam score of 48.6
MAETSALPTGFGELEVLAVGMVLLVEALSGLSLNTLTIFSFCKTPELRTPCHLLVLSLALADSGISLNALVAATSSLLRRWPYGSDGCQAHGFQGFVTALASICSSAAIAWGRYHHYCTRSQLAWNSAVSLVLFVWLSSAFWAALPLLGWGHYDYEPLGTCCTLDYSKGDRNFTSFLFTMSFFNFAMPLFITITSYSLMEQKLGKSGHLQVNTTLPARTLLLGWGPYAILYLYAVIADVTSISPKLQMVPALIAKMVPTINAINYALGNEMVCRGIWQCLSPQKREKDRTK

SEQ ID NO: 53354 - protein, 138 aa, Homo sapiens
  DOMAIN (14)..(89): 60s Acidic ribosomal protein domain identified by PFam, accession name 60s_ribosomal, E-value=1.9e-15, PFam score of 52.3
PPSSKAPSSKGPAKIVCIYWALILQSNEVTITEDKFNNLIKAAAVTVEPFWPSFFAKALASVNIGSLLCNAGVGSMAPAACTAQAGGPATSTTAASASFRNHNPRIAPKFRGVLAHEQYLSERATWVWAPNPNPKSLF

SEQ ID NO: 53355 - protein, 320 aa, Homo sapiens
MKARAPPPPGKAATLHVHSDQKPPHDGALGSQQNLVRMKEALRASTMDVTVVLPSGLEKRSVLNGSHAMMDLLVELCLQNHLNPSHHALEIRSSETQQPLSFKPNTLIGTLNVHTVFLKEKVPEEKVKPGPPKVPEKSVRLVVNYLRTQKAVVRVSPEVPLQNILPVICAKCEVSPEHVVLLRDNIAGEELELSKSLNELGIKELYAWDNRRALNMSFILCLPANFHDISKRGKVRLSKTQSEPSLSCQALYLIEGLLQLTLQRVCTHALVLLHHVAVGPLIWVLCDVEPAQCLHWSLLHVTKCPGPALVARMCTFAPTA

SEQ ID NO: 53356 - protein, 1316 aa, Homo sapiens
  DOMAIN (389)..(404): WILM'S TUMOUR PROTEIN SIGNATURE domain identified by eMATRIX, accession number PR00049D, p-value=7.807e-11, raw score of 0.00
  DOMAIN (1164)..(1312): Wiskott Aldrich syndrome homology region 2 domain identified by PFam, accession name WH2, E-value=2.4e-21, PFam score of 84.3
QPLPSAALRRCPPPARVGGRWVSAEKVNEGGSGGGGSQRLTRRARSTARVPAPGTMDAPRASAAKPPTGRKMKARAPPPPGKAATLHVHSDQKPPHDGALGSQQNLVRMKEALRASTMDVTVVLPSGLEKRSVLNGSHAMMDLLVELCLQNHLNPSHHALEIRSSETQQPLSFKPNTLIGTLNVHTVFLKEKVPEEKVKPGPPKVPEKSVRLVVNYLRTQKAVVRVSPEVPLQNILPVICAKCEVSPEHVVLLRDNIAGEELELSKSLNELGIKELYAWDNRRETFRKSSLGNDETDKEKKKFLGFFKVNKRSNSKGCLTTPNSPSMHSRSLTLGPSLSLGSISGVSVKSEMKKRRAPPPPGSGPPVQDKASEKVSLGSQIDLQKKKRRAPAPPPPQPPPPSPLIPNRTEDKEENRKSTMVSLPLGSGSHCSPDGAPQVLSEAEETVSVGSCFASEDTTEDSGVMSSPSDIVSLDSQQDSMKYKDKWATDQEDCSDQDLAGTPDLGPQKSPLWEKNGSENSHLRTEKAVTASNDEEDLLIAGEFRKTLAELDEDLEEMEDSYETDTSSLTSSIHGASNHCPQDAMIPHGDTDAIPVTFIGEVSDDPVDSGLFSNRNNNAGSFDSEGVASRRDSLAPLQAEHSQPHEKAREEVPALHPASHDVGKGIRVALSNISKDGNLMETAPRVTSFASNLHTDNLNAKVKDKVYGCADGERTQATERVNSQPVNEKDSNDKNAALAPTSWHQRGQNPGKSYRLKHGLTTYKIIPPKSEMRCYDRDVSLSTGAIKIDELGNLVSPHATGIRIISLSSSVPEAESQPIGKVREFWRCNSVEKHLGRPSESSARGPPSTPVPTQTQNPESRLQADPKPISPQQKSAHHEGRNPLGEGRNQPPTMGMGHVRVPAAHTTEVTFLKPQRRTSSQYVASAIAKRIGAPKVHADVVRPHGYAEKGYAGKAPVLAAPPVTVKDDRTSSPHSETQGWKDGAQWPCVTPPNNHGEDLAVGAPPRGEVIGPHRKLSTQDRPAAIHRSSCFSLVQSSQRDRVSVGQSCGFSGKQSTSSQEASSASEPRRAPDGTDPPPPHTSDTQACSRELVNGSVRAPGHGEPSHPPGGSGTESHILLEREEKPSVFSTDGNETDSIWPPSIFGPKKKFKPVVQRPVPKDTSLHSALMEAIHSAGGKDRLRKTAEHTGEGRPAKLSYTEAEGERSALLAAIRGHSGTCSLRKVASSASEELQSFRDAALSAQGSESPLLEDLGLLSPPAIPPPPPPPSQALSAPRTASRFSTGTLSNTADARQALMDAIRSGTGAARLRKVPLLV

SEQ ID NO: 53357 - protein, 146 aa, Homo sapiens
KSVRLVVNYLRTQKAVVRVSPEVPLQNILPVICAKCEVSPEHVVLLRDNIAGEELELSKSLNELGIKELYAWDNRRVPSAVPMQGPWPAEHFLQVNEQPPAGSPSPCPSSSSSSSGLRGGMQTANGPACALTPTCAQTDCPCPTSH

SEQ ID NO: 53358 - protein, 67 aa, Homo sapiens
TDSSSALQPQHRGRPALRQRTPPRRSPSPGLSPPRGASPASSGAPARGVAFGGDEPPIGAEAMYSKP

SEQ ID NO: 53359 - protein, 51 aa, Homo sapiens
ASKTRSELDGEIYKFLRTWADKLEEWPEQTLEAGTQVGNQTSSHKWQAWKP

SEQ ID NO: 53360 - protein, 113 aa, Homo sapiens
  DOMAIN (44)..(108): Transcriptional Coactivator p15 (PC4) domain identified by PFam, accession name PC4, E-value=1.9e-07, PFam score of 38.2
EKLKEPDEHSDTRSLSAGLASDGASGEEAPRRRKRYPRQRHVIWAPGVEAPGDDAERRRTRSQWTCDTALPIGKMRYVSVRDFKGKVLIDIREYWMDPEGEMKPGRKGPQQIG

SEQ ID NO: 53361 - protein, 289 aa, Homo sapiens
  DOMAIN (14)..(98): Transcriptional Coactivator p15 (PC4) domain identified by PFam, accession name PC4, E-value=0.0041, PFam score of 9.1
LGRWRQDQVPHGLECRSQSEWSCTDSRQHSSSYSDSRRQEIGKMRYVSVRDFKGKVLIDIREYWMDLKRLPRKPRTGEAGSGSLSSPGADTPVEAAVTWRLGLGSVDVGSFRAWQRGKSAAVGHTVSPRWPRWQGGDSSALSMASLSTLTCSWGLRYSALSPTTSAQREEGSALYRHLSPPSLRFYPTVKWATLAITRPRPPAPRSHSHHPQPRALCPVWVLFQHPKTHGENLGDRWKEGSALVSSKGTPAKLSSGRIRNALQNTLGEVSVARIQTHRGIFVETTEARL

SEQ ID NO: 53362 - protein, 193 aa, Homo sapiens
  DOMAIN (69)..(168): Transcriptional Coactivator p15 (PC4) domain identified by PFam, accession name PC4, E-value=8.9e-18, PFam score of 72.5
  misc_feature (1)...(193): Xaa = X or * as defined in Table 2
APIECGGIPSLPVLCQSRANDQEGVRLLEPSEAMPKSKELVSSSSSGSDSDSEVDKKLKRKKASLLPENPVKKQKTGETSRALSSFXTEPASSRDDNMFQIGKMRYVSVRDFKGKSAXFDIREYWMDPEGEMKPERKGISLNPQQWEPSLKEQISGPLIDASKKTCKISEPILIKPCTVPVVLICLVTVAVCF

SEQ ID NO: 53363 - protein, 167 aa, Homo sapiens
  DOMAIN (69)..(163): Cystatin domain identified by PFam, accession name cystatin, E-value=0.0012, PFam score of 16.9
LLWARGLGRAKSAVPTVSTMLGLPWKGGLSWALLLLLLGSQILLIYAWHFHEQRDCDEHNVMARYLPATVEFAVHTFNQQSKDYYAYRLGHIFNSWKEQVESKTVFSMELLLGRTRVWEYLKTTIDNCHFQESTELNNTFTCFFTISTRPWMTQFSLLNKTCLEGFH

SEQ ID NO: 53364 - protein, 56 aa, Homo sapiens
LFKAWECFFLIFLQVVITRLKLDKDRKKILERKAKSRQVGKEKGKYKEETIEKMQE

SEQ ID NO: 53365 - protein, 40 aa, Homo sapiens
NVEEKNRKKILERKAKSCQIKKEKGEYKEETIGTMRECGL

SEQ ID NO: 53366 - protein, 364 aa, Homo sapiens
IVFLLYLETCLEVMDDKPNPEALSDSSERLFSFGVIADVQFADLEDGFNFQGTRRRYYRHSLLHLQGAIEDWNNESSMPCCVLQLGDIIDGYNAQYNASKKSLELVLWQFKRRKGPVHHTWGNHEFYNFSREYLTHSKLNTKFLEDQIVHHPETMPSEDYYAYHFVPFPKFWFILLDAYDLSALGAWDQSSPKYGGSVWKILEGSHNPNTGNWNSSSRDFSEARSLFQFNGRVSAQEQLNWLNEVLTFSDTNQEKVVIVSHLPLYPGPPFDNVCLAWNYRDALAVIWSHECVGVSLLGHTHDGGYSEDPFGVYHGNLEGVIETAPDSQRFGTVHVYPDKMMLKGRGRVPDRIYELQGKEEPSHC

SEQ ID NO: 53367 - protein, 49 aa, Homo sapiens
  DOMAIN (22)..(37): GLYCOSYL HYDROLASE FAMILY 35 SIGNATURE domain identified by eMATRIX, accession number PR00742H, p-value=3.000e-09, raw score of 15.02
MKMSFFERLRSATWKPVPDSHQGPAFYCGTLKAGPSPKDTFLSLLNWNY

SEQ ID NO: 53368 - protein, 76 aa, Homo sapiens
  DOMAIN (41)..(72): Acyl-CoA dehydrogenase domain identified by PFam, accession name Acyl-CoA_dh, E-value=8e-05, PFam score of 19.2
MLRSGCRRFGARLGCLPGGLRDLVQTGHRSLTSCIDPSMGLNEEQKEFQKVAFDFAAREMAPNMAEWDQKHVCLDD

SEQ ID NO: 53369 - protein, 57 aa, Homo sapiens
FSTRILRYRQSCWDRPGHGDHAAMEGVYPTTRFFTESHMERHMGEQEAPGPSSLPFT

SEQ ID NO: 53370 - protein, 290 aa, Homo sapiens
  DOMAIN (187)..(199): Syndecans proteins domain identified by eMATRIX, accession number BL00964A, p-value=6.500e-09, raw score of 6.57
MPTGMAHLCPLPLRPPGQLQDCELHGSRDRTILVFVPLRCFTQSFVNTPAASVATAMSGHLRLRVDPGLDFHLADHQSSLLAFVECDLWSRTSDGQGALSERLRSFSMQDLTTIRGDGAPAPSGPPPPGSGRASGKHGQPKMSRSASESASSSGLQGARTDFVCQCVPAAPPAGPGKGHNNPGKDDEDDDDDDGGGGGGDDGGGGGGGGGGGGGDSLEHPGDPRESGGLPVLDRDSCCCPPSVGEHAQSHFGFSPEIIVMMVILEIDDCLVQAKDRSYDALVHFGKRGLN

SEQ ID NO: 53371 - protein, 337 aa, Homo sapiens
  DOMAIN (28)..(59): Acyl-CoA dehydrogenase domain identified by PFam, accession name Acyl-CoA_dh, E-value=7.7e-05, PFam score of 19.3
RISTSTLCPKPKKLIAPPGRAGLASMGLNEEQKEFQKVAFDFAAREMAPNMAEWDQKDRKADGKGGAVTQEVQAQLLVKHGQKLVSRFQLSSFSYVDSVRTTQSKQEHLQTDKGLSGKRTKTENSGEALAKVEDSNPQKTSATKNCLKNLSSHWLMKSEPESRLEKGVDVKFSIEDLKAQPKQTTCWDGVRNYQARNFLRAMKLGEEAFFYHSNCKEPGIAGLMKIVKEAYPDHTQFEKNNPHYDPSSKEDNPKWSMVDVQFVRMMKRFIPLAELKSYHQAHKATGGPLKNMVLFTRQRLSIQPLTQGLQIPAVNSLLCDVTESLCALVSSLIKEGY

SEQ ID NO: 53372 - protein, 517 aa, Homo sapiens
  DOMAIN (223)..(274): Acyl-CoA dehydrogenases proteins domain identified by eMATRIX, accession number BL00072D, p-value=2.837e-24, raw score of 30.08
  DOMAIN (2)..(339): Acyl-CoA dehydrogenase domain identified by PFam, accession name Acyl-CoA_dh, E-value=2e-87, PFam score of 300.8
MCAWMIDSFGNEEQRHKFCPPLCTMEKFASYCLTEPGSGSDAASLLTSAKKQGDHYILNGSKAFISGAGESDIYVVMCRTGGPGPKGISCIVVEKGTPGLSFGKKEKKEETLREDLVLATSLSNGRRVVPFASLIKNKVKLIGDDCGYFSNPRRTLRYWKAALPAGLLGNHAVPDFCQVGWNSQPTRAVIFEDCAVPVANRIGSEGQGFLIAVRGLNGGRINIASCSLGAAHASVILTRDHLNVRKQFGEPLASNQYLQFTLADMATRLVAARLMVRNAAVALQEERKDAVALCSMAKLFATDECFAICNQALQMHGGYGYLKDYAVQQYVRDSRVHQILEELFWQGPGVQSRSFVPFGGPQIALLLPFSSGDLREGLCWNRLEGMGAQIAGLNPRASAPEGLVWAWEFVSATSLQYRQAGPVIAVQVENEYGSFNKDKTYMPYLHKALLRRGIVELLLTSDGEKHVLSGHTKGVLAAINLQKLHQDTFNQLHKVQNWNYGFVFINGRNLGRYWNIG

SEQ ID NO: 53373 - protein, 304 aa, Homo sapiens
  DOMAIN (15)..(28): Glycosyl hydrolases family 35  proteins domain identified by eMATRIX, accession number BL01182E, p-value=9.357e-14, raw score of 10.97
MNGATYFGKHSGIVTSYDYDAVLTEAGDYTEKYLKLQKLFQSVSATPLPRVPKLPPKAVYPPERPTLYLPLWDALSYLNEPVRSRQPVNMENLPINNGSGQSYGLVLYEKSICSGGRLRAHAHDMAQVFLDETMIGILNENNKDLHIPELRDCRYLRILVENQGRVNFSWQIQNEQKGITGSVSINNSSLEGFTIYSLEMKMSFFERLRSATWKPVPDSHQGPAFYCGTLKAGPSPKDTFLSLLNWNYGFVFINGRNLGRYWNIGPQKTLYLPGVWLHPEDNEVILFEKMMSGSDIKSTDKPTL

SEQ ID NO: 53374 - protein, 193 aa, Homo sapiens
  DOMAIN (62)..(120): Acyl-CoA dehydrogenase domain identified by PFam, accession name Acyl-CoA_dh, E-value=1.4e-13, PFam score of 49.1
RTRGRRSLAFLLLAERGAAAAVLWSGCRRFRARLGCLPGGLRVLVQTGHRSLTSCIDPSMGLNEEQKEFQNAAFDFAAREMAPNMAEWDQKELFPVDVMRKAAQLGFGGVYIQTDVGGSGHVRLDTSVIFEALATGCTSTTAYIRHPQCPQSQHSFVQEGGTHYKAGHLCCRQWGPRACLPPGRPCHRGASGE

SEQ ID NO: 53375 - protein, 136 aa, Homo sapiens
DRPPRSCFTRIQRATCCVLLICLFLGANAVWYGAVGDSAYSTGHVSRLSPLSVDTVAVGLVSSVVVYPVYLAILFLFRMSRSKVINTLADHRHRGTDFGGSPWLLIITVFLRSYKFAISLCTSYLCESFLKTIFPS

SEQ ID NO: 53376 - protein, 147 aa, Homo sapiens
  DOMAIN (56)..(78): POLYCYSTIC KIDNEY DISEASE PROTEIN SIGNATURE domain identified by eMATRIX, accession number PR00500H, p-value=1.107e-29, raw score of 17.80
  DOMAIN (67)..(147): PLAT/LH2 domain identified by PFam, accession name PLAT, E- value=3.1e-06, PFam score of 34.1
GILTAFGASLFMPPSHEPTADVNYIVMLTCAVCLVTYMVMAAILQKLDQLDASRGRAIPFCGQRGRFKYEILVKTGWGRGSGTTAHVGIMLYGVDSRSGHRHLDGDRAFHCNSLDIFRIATPHSLGSVWKIRVWHDNKGLSPAWFLQ

SEQ ID NO: 53377 - protein, 127 aa, Homo sapiens
  misc_feature (1)...(127): Xaa = X or * as defined in Table 2
GWKGIEHTLGRCLEAQGVINYRMLLSWRRWLVAHPVFXSFSCEVGPVGQSXRMTMLHCRHSDPVAKRLSCRRGDFASVVVLCPPPQRLRTLKHFLFFGGLPLSIDFVMTVDFCCHLHLTDFSSNFGF

SEQ ID NO: 53378 - protein, 101 aa, Homo sapiens
KVAGSPSPTPAGQQVLDVNSCLDSSVLDSSFLTFSGLHAEAEGSTGGPAALAYLGLKTLCTSQQAFAGQMKSDLFLDDSKSDLEEPWELRKEGAPRSRDRE

SEQ ID NO: 53379 - protein, 69 aa, Homo sapiens
  DOMAIN (2)..(55): REJ domain identified by PFam, accession name REJ, E-value= 2.5e-17, PFam score of 64.2
REAGGCALNFGPRGSSTVTIPRERLAAGVEYTFSLTVWKAGRKEEATNQTFHVQSSSHICSSGKSYTVP

SEQ ID NO: 53380 - protein, 1003 aa, Homo sapiens
  DOMAIN (520)..(543): POLYCYSTIC KIDNEY DISEASE PROTEIN SIGNATURE domain identified by eMATRIX, accession number PR00500I, p-value=1.107e-31, raw score of 9.22
  DOMAIN (783)..(1000): Deoxyribonuclease I (DNase I) domain identified by PFam, accession name DNase_I, E-value=3.2e-67, PFam score of 236.8
MSAGDLIHLASSDVRAPQPSELGAESPSRMVASQAYNLTSALMRILMRSRVLNEEPLTLAGEEIVAQGKRSDPRSLLCYGGPPGPGCHFSIPEAFSGALGNLRGGNYTVCTKVASMAFQTQAGAQIPIERLASERAITVKVPNNSDWAARGHRSSANSANSVVVQPQASVGAVVTLDSSNPAAGLHLQLNYTLLDGHYLSEEPEPYLAVYLHSEPRPNEHNCSASRRIRPESLQGADHRPYTFFISPGSRDPAGSYHLNLSSHFRWSALQVSVGLYTSLCQYFSEEDMVWRTEGLLPLEETSPRQAVCLTRHLTAFGASLFVPPSHVRFVFPEPTADVNYIVMLTCAVCLVTYMVMAAILHKLDQLDASRGRAIPFCGQRGRFKYEILVKTGWGRGSGTTAHVGIMLYGVDSRSGHRHLDGDRAFHRNSLDIFRIATPHSLGSVWKIRVWHDNKGLSPAWFLQHVIVRDLQTARSAFFLVNDWLSVETEANGGLVEKEVLAASDAALLRFRRLLVAELQRGFFDKHIWLSIWDRPPRSRFTRIQRATCCVLLICLFLGANAVWYGAVGDSAYSTGHVSRLSPLSVDTVAVGLVSSVVVYPVYLAILFLFRMSRSKVAGSPSPTPAGQQVLDIDSCLDSSVLDSSFLTFSGLHAEVRTLLGVLGWAGGPAALAQLGLKTLCTSQQAFVGQMKSDLFLDDSKSLVCWPSGEGTLSWPDLLSDPSIVGSNLRQLARGQAGHGLGPEEDGFSLASPYSPAKSFSASDEDLIQQVLAEGVSSPAPTQDTHMETDLLSSLCAEVHTALPLHCSCLQDSVQWHAVQGLPAFCRGDPVTQEAQETARPAAQNLVLIPLHAAPHQAVAEIDALYDVYLDVIDKWGTDDMLFLGDFNADCSYVRAQDWAAIRLRSSEVFKWLIPDSADTTVGNSDCAYDRIVACGARLRRSLKPQSATVHDFQEEFGLDQTQASGPWGGAGLGSPPPGRTQAAGRALAISDHFPVEVTLKFHR

SEQ ID NO: 53381 - protein, 98 aa, Homo sapiens
DLIHLASSDVRAPQRSQLGAESPSRMVASQAYNLTSALTPIVTRSRVLNEEPLTLAGSQALLNHLCCRYLRIPAAALPDDPHTTGEKARWDCRDKRLR

SEQ ID NO: 53382 - protein, 212 aa, Homo sapiens
MTVTLHSQDVLMLPGDLVGLQHDAGPGALLHCSPAPGHPGPQAPYLSANASSWLPHLPAQLEGTWACPACALRLLAATEQLTVLLGLRPNPGLRLPGRYEVRAEVGNGVSRHNLSCSSDVVSPVAGLGVIYPAPRDSRLYVPTNGSASVLQVDSGAAPQYHGVPNRLQGWAGESHSGLCCLETHPRLHTDFTWEGREMRYEGKGVLTAALLS

SEQ ID NO: 53383 - protein, 265 aa, Homo sapiens
  DOMAIN (137)..(159): POLYCYSTIC KIDNEY DISEASE PROTEIN SIGNATURE domain identified by eMATRIX, accession number PR00500H, p-value=4.571e-27, raw score of 17.80
  DOMAIN (38)..(87): Latrophilin/CL-1-like GPS domain identified by PFam, accession name GPS, E-value=1.6e-13, PFam score of 58.4
MRLGSQVLGRTRDPVGSYRLNLSSHFRWSALEVSVGLYTSLCQYFSEEDVVWRTEGLLPLEETSPRQAVCLTRHLTAFGTSLFVPPSHIRFVFPSSQEPTADVNYIVMLTCAVCLVTYMVMAAILHKLDQLDASRGCAIPFCGQRGRFKYEILVKTGWGRGSGNPPLRIIQKQVTLHLSSKGLLRGAQGLESKLRQGGRTPSRALTSAWRPENVRKELSSTDESRQLSTSSTCCPAGASPLVAPWLLKLSRDSCVQFQVEDSRGF

SEQ ID NO: 53384 - protein, 468 aa, Homo sapiens
  DOMAIN (120)..(442): PKD domain identified by PFam, accession name PKD, E-value= 9.5e-19, PFam score of 75.7
  misc_feature (1)...(468): Xaa = X or * as defined in Table 2
SSPRQQTQLARVHPDGRAQLAPSCLPGLGLCPLPVCPPVCNCPACPCHEHCGEAPXGVAAKRGALRVHPHPSCGGPRAMTVTLHGQDVLMLPGDLVGLQHDAGPGALLHCSPAPGHPGPQAPYLSANASSWLPHLPAQLKGTWACPACALRLLAATEQLTVLLGLRPNLGLRLPGRYEVRAEVANGVSRHNLSCSFDVVSPVAGLRVIYPAPRDGRLYVPTNGSALVLQVDSGANATATARWPGGSVSARFENVCPALVATFVPGCPWETNDTLFSVVALPWLSEGEHVVDVVVENSASRANLSLRVTAEEPICGLRATPSPEARVLQGVLVVLLAGSSGYLVGFKFLESHGSDSGSANSFHCLISQNEFKTLLPDLTRAPRYSPVVEAGSDMVFRWTINDKQSLTFQNVVFNVIYQSAAVFKLSLSADSAPRPRWRLQSPRVGRLSPDPGFFGSPGPCQPRLQAFLI

SEQ ID NO: 53385 - protein, 246 aa, Homo sapiens
  DOMAIN (31)..(241): REJ domain identified by PFam, accession name REJ, E-value= 7.8e-86, PFam score of 298.6
ASTQSLLAWCPAWLSIPSTWPSSFSSGCPGCKAQPVYEVSRSSYVYLEGRCLNCSSGSKRGGYTFTLTVLGRSGEEEGCASIPLSPNRPPLGGSCRLFPLGAVHALTTKVHFECMGWHDAEDAGAPLVYALLLQRCRQGHCEEFCVYKGSLSGYGAVLPPGFRPQFEVGLAVVVQDQLGAAVVALNRSLAITLPEPNGSAMGLTVWLHGLTASVLPGLLRQADPQLVIEYSLALVTVLNETYTESL

SEQ ID NO: 53386 - protein, 217 aa, Homo sapiens
DKHIWLSIWDRPPRSCFTRIQRATCCVLLICLFLGANAVWYGAVGDSAYSTGHVSRLSPLSVDTVAVGLVSSVVVYPVYLAILFLFWMSRSKVAGSPSPTPAGQQVLDIDSCLDSSVLDSSFLTFSGLHAEVINTLADHQHRGTDFGGSPSVLIITVSLRSYKFAISLCTTYLWVINTLADHRHRGTDFGGSPWLLIITVFLRSYKFAISLCTTYLC

SEQ ID NO: 53387 - protein, 1355 aa, Homo sapiens
  DOMAIN (273)..(296): POLYCYSTIC KIDNEY DISEASE PROTEIN SIGNATURE domain identified by eMATRIX, accession number PR00500I, p-value=1.107e-31, raw score of 9.22
  DOMAIN (135)..(255): PLAT/LH2 domain identified by PFam, accession name PLAT, E- value=4.9e-20, PFam score of 80.0
SRDPAGSYHLNLSSHFRWSALQVSVGLYTSLCQYFSEEDMVWRTEGLLPLEETSPRQAVCLTRHLTAFGASLFVPPSHVRFVFPEPTADVNYIVMLTCAVCLVTYMVMAAILHKLDQLDASRGRAIPFCGQRGRFKYEILVKTGWGRGSGTTAHVGIMLYGVDSRSGHRHLDGDRAFHRNSLDIFRIATPHSLGSVWKIRVWHDNKGLSLALGFLQHVIVRDLQTAQSTFFLVNDWLSVETEANGGLVEKEVLAASDAALLRFRRLLVAELQRGFFDKHIWLSIWDRPPRSRFTRIQRATCCVLLICLFLGANAVWYGAVGDSAYSTGHVSRLSPLSVDTVAVGLVSSVVVYPVYLAILFLFRMSRSKVAGSPSPTPAGQQVLDVDSCLDSSVLDSSFLTFSGLHAEVRTLLGVLGWAGGPAALAQLGLKTLCTSQQAFVGQMKSDLFLDDSKSLVCWPSGEGTLSWPDLLSDPSIVGSNLRQLARGQAGHGLGPEEDGFSLASPYSPAKSFSASDEDLIQQVLAEGVSSPAPTQDTHMETDLLSSLSSTPGEKTETLALQRLGELGPPSPGLNWEQPQAARLSRTGLVEGLRKRLLPAWCASLAHGLSLLLVAVAVAVSGWVLLEALYFSLVAKRLHPDEDDTLVESPAVTPVSARVPRVRPPHGFALFLAKEEARKVKRLHGMLRSLLVYMLFLLVTLLASYGDASCHGHAYRLQSAIKQELHSRAFLAITRYGHPVHWSEELWPWMAHVLLPYVHGNQSSPELGPPRLRQVRLQEALYPDPPGPRVHTCSAAGGFSTSDYDVGWESPHNGSGTWAYSAPDLLGAWSWGSCAVYDSGGYVQELGLSLEESRDRLRFLQLHNWLDNRSRAVFLELTRYSPAVGLHAAVTLRLEFPAAGRALAALSVRPFALRRLSAGLSLPLLTSVCLLLFAVHFAVAEARTWHREGRWRVLRLGAWARWLLVALTAATALVRLAQLGAADRQWTRFVRGRPRRFTSFDQVAQLSSAARGLAASLLFLLLVKAAQQLRFVRQWSVFGKTLCRALPELLGVTLGLVVLGVAYAQLAILLVSSCVDSLWSVAQALLVLCPGTGLSTLCPAESWHLSPLLCVGLWALRLWGALRLGAVILRWRYHALRGELYRPAWEPQDYEMVELFLRRLRLWMGLSKVKEVGTAQWGGEGHALGSAQGAAGLTEPLCRPQFRHKVRFEGMEPLPSRSSRGSKVSPDVPPPSAGSDASHPSTSSSQLDGLSVSLGRLGTRCEPEPSRLQAVFEALLTQFDRLNQATEDVYQLEQQLHSLQGRRSSRAPAGSSRGPSPGLRPALPSRLARASRGVDLATGPSRTPLRAKNKVHPSST

SEQ ID NO: 53388 - protein, 3640 aa, Homo sapiens
  DOMAIN (225)..(249): POLYCYSTIC KIDNEY DISEASE PROTEIN SIGNATURE domain identified by eMATRIX, accession number PR00500C, p-value=1.138e-31, raw score of 12.85
  DOMAIN (203)..(286): PKD domain identified by PFam, accession name PKD, E-value= 1.4e-20, PFam score of 81.8
  misc_feature (1)...(3640): Xaa = X or * as defined in Table 2
MPPAAPARLALALGLGLWLGALAGGPGRGCGPCEPPCLCGPAPGAACRVNCSGRGLRTLGPALRIPADATALTAMAKADGDVKKYGSKRGALALTHGHSLLRDVSHNLLRALDVGLLANLSALAELDISNNKISTLEEGIFANLFNLSEINLSGNPFECDCGLAWLPRWAEEQQVRVVQPEAATCAGPGSLAGQPLLGIPLLDSGCGATLVGPHGPLASGQLAAFHIAAPLPVTATRWDFGDGSAEVDAAGPAASHRYVLPGRYHVTAVLALGAGSALLGTDVQVEAAPAALELVCPSSVQSDESLDLSIQNRGGSGLEAAYSIVALGEEPARAVHPLCPSDTEIFPGNGHCYRLVVEKAAWLQAQEQCQAWAGAALAMVDSPAVQRFLVSRVTRSLDVWIGFSTVQGVEVGPAPQGEAFSLESCQNWLPGEPHPATAEHCVRLGPTGWCNTDLCSAPHSYVCELQPGGPVQDAENLLVGAPSGDLQGPLTPLAQQDGLSAPHEPVEAGMGSVELRRPPAHQVMVFPGLRLSREAFLTTAEFGIQELRRPAQLRLQVYRLLSTAGTPENGSEPESRSPDNRTQLAPACMPGGRWCPGANICLPLDASCHPQACANGCHGGGARGGRGGGKQRQPGQPQPAGDGGGAHLWPPRHAQPRGPCTAGSPSEVQPRGGGRLGHGLPVDHQRQAVPDLPERGLQCHLSERGGLQALTDGLQPREQRHRELQRNRGADEQDAGSAGLHSAGRAVPQCHASTDGGRAGGLGRGGGLPVDLWGWGAGPPPVPASVQRVLPGSRPLGGPGAGGAQCHAHLRCPRXVPPDRAGIXCLREPDAAGACERARLPALRGCGCEXRRPEPAGCQPHLCLEGHLPRAPGGQQHGERCGGPGGCARLXGAPRTQRGHEPGRGAGRPRGGQRRGADGRQHHVDLRHGGRHRAVGPGGNSGACVPAGTELHSDRGCGQPRRPPGPEPARAGLRPGGAARXTRRLHPHAAXRAAHGLRHREPGPLPLRLDLRGWLLQHDRAGVPDGDTQLHAERHVPPGAGAVQPREQGALLHQHLRGARGGQRHPAAREAVCAARGRGLAGGMCLAPVPLPLHLGLWHRGSRPHPCQGPXGDVHLPRPRLLSCDSHRVQQHLCCQXLSPGGGAGARAGHQHQGQWLPWAGAAAAVPVLCCGPWAPRQLPVGSGGRWVARGSGGHPRLQQHRXLHRAGPGRQRQRLLAHLSRGRHLPCAAAGHQHAGQRLGRLHHGLRGACGVADGGRLPEPSCRQQKRHPQCRAGWWQWCRIHLVLGGGAELGDLRAIYHPXLPHTRPALGHHDGREPAGLSQRHRGSGCAGACEWPQHQGQRARRQLRGGRVLCALLGAAGHGHQCELVLGCARRQQQAWPSCHHGLPGCWHLLHPAQCLQRSQLGLSHVQPHGGGAHRGPGAVGQQQGGGARAAGPFSDPAGCRLSCHLPPAGHRXAQGRALLPEAWGLPRAGERLQPGELLRGAGHGDRPGAGLPGAGGGRGPAPAGADAAITAQLLGGPRXPARLRHLPDXVPLGGVSHRQLPAAGAPSACGPARRGREPASAGAAAAGAACGALLLCVCRVIWGHATDTEHPGQCDGGPRAPGAHHXGWLIPRVVRHTGPGAGWERVLRPQPGGRRPDAAQFPLGLCGFDTEGGWRVCAELWAPREQHGHHSTGAAGGWRGVHLQPDRVEGRPQGGGHQPDGADPEWPGAHCVLGVCVLQGTGRVRSEPQLLRVLGGPLPQLQQRLQARAVGCTYVQQQDAGAGXDHHIHGQCRHATGAAAGRAAGRRGIHLHAHGAGPLWRGGGLRLHPPVPQPPAAGGLLPPLPTGRCARPHHQGALRMHGLAXRGGCWRPAGVRPAAAALSPGPLRGVLCLQGQPLQLRSRAAPGFQATLRGGPGRGGAGPAGSRCGRPQQVFGHHPPRAQRQRNGAHSLAARAHRXCAPRAAAAGRSPARHRVLVGPGHRAERAPSPDTQEHHGDSGVPEGPHCGXHPADRCCAGPVHGAQQGARMPLVPEADAAQAGGHDAHPAGRDHRGHRDAHRHRRQHPQHHRRPHPPGQLGRAGTTALRAGSRVTISDGGVPGLQPDLCPHAHPHALPRAQRGAPDAGGRGDRGPGQALGPAEPAVLWRRPRAWLPLLHPRGFQRGPGQPQXRGAAHLSGGLQSLSLWLYQQLHRLHQGGLDGIPDTGRRPDPHRAAGLRARHHREGAQQLGLGCPGPPQLRQLRQLRCGPAPGLRRCCGHPGQQQPCGRAASAAQLYAAGRSLPVXGTXALPGSLPTLGAPAQXAQLLGXQEDPPRVTPGCXPPALHLLHFPGEQRPSGELPSEPLQPLPLVGAAGVRGPVHVPVPVLQRGGHGVADRGAAAPGGDLAPPGRLPHPPPHRLRRQPLRAPKPCPLCVSXADSGCKLHRHADMCCVPGDLHGHGRHPAQAGPVGCQPGPRHPFLWAAGPLQVRDPRQDRLGPGLRYHGPRGHHAVWGGQPERPPAPGRRQSLPPQQPGHLPDRHPAQPGXRVEDPSVARQQRFEPCLVPAARHRQGPADGTQRLLPGQXLAFGGDGGQRGPGGEGGAGREXRSPFALPAPAGGXAAAWLLXQAHLALHMGPAASXPFHSHPEGHLLRSPHLPLPGRQRRVVRGCWRLCLQHGACVQAEPAERRHSRCWPGVQRGCLSRLPGHPFSLPDVPEQGGWEPEPHTCRAAGAGHRQLPGLVRAGQLLPHVLRPPRXAGLCWTDEEXLVSGXFXESGVLALRRGNAQLAGPAQXPVHCGXQSAAAGTGPGGPWAVPRGGRLLPGQPLLACQILLSIRXRPDPAGPCRGGQQPSPYPRHPHGNGPAQQPVQHSWGEDRDAGAAEAGGAGATQPRPELGTAPGSEAVQDRTGGGSAEAPAAGLVCLPGPRAQPAPGGCGCGCLRVGGCELPPGRECCVAPVQQRQLPGLIPRLGATEGVAGSPVLLTGGQAAAPGXRXHPGREPGCDACERTCAPRTATPRLCTLPGQGRSPQGQEATWHAAEPPGVHAFSAGDPAGQLWGCLMPWARLPSAKRHQAGAAQPGLPGHHAVXGALAMDGPRAAALRPREPVQPRAGAPTAAAGAAAGSTLPRPSRPQGPHVLGRRRLQHQRLRRWLGESSQWLGDVGLFSAGSAGGMVLGLLCRVXQRGLRAGAGPEPGGEPRPAALPAAAQLAGQQEPRCVPGAHALQPGRGAARRRHAAPRVPGGRPRPGRPQRPPLCAAPPQRGPLAASAHLGVPAAVRRALRRGRGPYLAQGRALARAAARSLGAVAAGGADGGHGTGTPRPAGCRXPPVDPFRARPPAPLHXLRPGGAAELRSPWPGGLAALPAFGQGCPAATLRAPVVRLWQDIMPSSARAPGGHLGPGGARGSLRPAGHPARVFLCGLPLERGPGPVGAVPWDWALYPVSCRVLAPVTPAVCGALGTAAVGRPTAGGCYSPLALPRLAWRAVPAGLGAPGLRDGGVVPAQAAPLDGPQQGQGVPPQSPLXRDGAAALSLLQGLQGIPGCAPTQRWLRCLAPLHLLQPAGWAEREPGPAGDKVXAXALPPPSRVRGPAHPVXPTQPGHRGRLPAGAAAAQPARPQEQPGARRIFPWPIPGPAASTAQPPCPGQSGCGPGHWPQQDTPSGQEQGPPQQHL

SEQ ID NO: 53389 - protein, 6685 aa, Homo sapiens
  DOMAIN (499)..(520): POLYCYSTIC KIDNEY DISEASE PROTEIN SIGNATURE domain identified by eMATRIX, accession number PR00500B, p-value=1.153e-29, raw score of 7.74
  DOMAIN (635)..(5716): PKD domain identified by PFam, accession name PKD, E-value=0, PFam score of 2615.8
HVLCAWVTYMVMAAILHKLDQLDASRGCAIPFCGQRGRFKYEILVKTGWGRGSGTTAHVGIHAVWGGQPERPPAPGTATEPSTATVWDIFQIRHPAQPGVACWKIRVFGTTTKGSALPRFPCSTSSSGTCRRHAAPSSWSMTGFRWRRRPTGAWWRRRCWPRVRPRSVFPLRHAALLRFRRLLGAELQRGFFDKHIWLSIWDRPPRSYFTHIQRATCCVLLICLFLGANAVWYGAVGDSAYSTGRVSRLNPLSVYTVAVGLESSGVVYPVYLAILFLFRMSRSKVAGSPSPTPAGQQVLDVDSCLDSSVLDSSFLTFSGLHAELGLKTLCTSQQAFAGQMKSDLFLDDSKRSGPVPVPFPPPCPKPPPPLSWLPQGALKGPGHAGIKIVLEDIFTLWRQVETKVRAKIRKMKVTTKVNRHDKINGKRKTAKEQSPLLQESLFATGDVSHNLLRALDVGLLANLSALAELDISNNKISTLEEGIFANLFNLSEINLSGNPFECDCGLAWLPRWAEEQQVRVVQPEAATCAGPGSLAGQPLLGIPLLDSGCGEEYVACLPDNSSGTVAAVSFSAAHEGLLQPEACSAFCFSTGQGLAALSEQGWCLCGSAQPSSASFACLSLCSGPPPPPAPTCRGPTLLQHVFPASPGATLLAAFHIAAPLPVTATRWDFGDGSPEVDAAGPAASHRYVLPGRYHVMAVLALGAGSALLGTDVQVEAAPAALELVCPSSVQSDESLDLSIQNRVGSGLEAAYSIVALGEEPARAVHPLCPSDTEIFSGNGHCYRLVVEKAAWLQAQEQCRAWAGATLAMVDSPAVQRFLVSRVTRSLDMWIGFSTVQGVEVGPAPQGEAFSLESCQNWLPGEPHPATAEHCVRLGPTGWCNTDLCSALHSYVCELRPGGPVQDAENLLVGAPSGDLQGPLMPLARQYGLSAPHEPVEVMVFPGLRLSREAFLTTAEFGTQELRRPAQLRLQVYRLLSTAGTPENGSEPESRSPDNRTQLAPACMPGGRWCPGANICLPLDASCHPQACANGCTSGPGLLGAPYALWREFLFSVPAGPPAQYSVTLHGQDVLMLPGDLVGLQHDAGPGALPHCSPAPGHPGPQAPYLSANASSWLPHLPAQLEGTWACPACALRLLAATEQLTVLLGLRPNPGLRLPGRYEVRAEVGNGVSRHNLSCSFDVVSPVAGLRVIYPAPRDGRLYVPTNGSASVLQVDSGASATATARWPGGSVSARFENACPALVATFVPGCPWETNDTLFSVVALPWLGEGEHVMDVVVENSASRANLSLRVTAEEPICGLRATPSPEARVLQGVPVRYSPVVEAGSDMVFRWTINDKQSLTFQNVVFNVIYQSAAVFKLSLTASNHVSNVTVNYNITVERMNRMQGLRVSTVPAVLSPNATLALTAGVLVDSAVEVAFLWTFGDGEQALHQFQPPYNESFPVPDPSVAQVLVEHNVTHTYAAPGEYVLTVLASNAFENRTQQVPVSVRASLPSEAVGVSDGVLVAGRPVTFYPHLLPSPGGVLYTWDFGDGSPVLTQSQPAANHTYPSRGIYHVRLEVNNTVSGAAAQADVRVFEELRGLSVDMSLAVEQGAPVVVSAAVQTGDNITWTFDMGDGTVLSGPEATVEHVYLRAQNCTVTVGAASPAGHLARSLHVLVFVLEVLRVEPAACIPTQPDARLTAYVTGNPARYLFDWTFGDGSSNTTMRGCPTVTHNFTRSGTFPLALVLSSRVNRARYFTSICVEPEVGNVTLQPERQFVQLGDEARLVACAWPPFPYRYTWDFGTEEAVPARVGGPEVTFIYRDPGSYLVTVTASNNISAANDSALVEVQEPMLVTSIKVNGSLGLELHYLWDLGDGGRLEGPEVTHAYNSTGDFTVRVAGCNEVSRSEAWLNVTVKRRVRGLIVNASCTVVPLNGSMSFSTSLEAGSDVRYSWVLCDRCTPISGAENEVGSAQDSIFVYVLQLIEGLQVVGGGRYFPTNHTVQLQAVVRDGTNIYSWTAWRDRGPALAGSGKGFSLTALEAGTYHVQLRATNMLGSAWADCTVDFVEPVGWLMVAASPNPAAVNTSVTLSAELAGGSGVVYTWSLEEGLSWETPEPFTTHSFPTPGLHLVTMTAGNPLGSANATVEVDVQVPVSGLSIRASEPGGSFVAAGSSVPFWGQLATGTNVSWCWAVPGGSSKRGPHVTMVFPDAGTFNIRLNASNAVSWVSATYNLTVEEPIVGLVLWASSKVVAPGQLVHFQILLAAGSAVTFRRQVGGASPEVLPGPRFSHSFPRIGDHVVSVQSKNHVSWAQAQVRIVVLEAVSGLQVPNCCEPGIAMGTERNFTARVQRGSRVAYAWYFSLQKVRGDSLFILSGRDVTYTPVAAGLLEIQENRTLVLEVQDAVQYVALRSGPCFTNRLAQFEAATSPSPRRVAYHWDFGDGSPGQDTDKPRAEHSYLRPGDYRVQVNASNLVSFFVAQATVTVQVLACREPEVDVVLPLQVLMRRSQRNCLDAYVDLRDCVTYQTEYRWEVYRTASCQRPGCPARVALPGVDVSRPQLVLPRLALPVGHYCFVFVVSFGDTPLARSIQANVTVAPERLVPITEGGSYRVWSDTQDLVLDGSESYDPNLEDGDQTPLSFQWACVASTQREAGGCALNFGPRGSSTVTIPRERLAAGVEYTFSLTVWKAGRKEEATNQTCWWRPRALPSLFLMQILCNTTACFSFASFQTCHSSTYSLQATYALVTKATQSPSNTNRSSWLQYTRTHTPVSSALCMPFRRPGWKVANRMSILGGGWHDAEDAGAPLVYALLLQRCCQGHCKEFCVYKSSLSGYGAVLPPGFRPHFEVGLAVVVQDQLGAAVVALNRSLAITLPEPNGSAMGLTVWLHRLTASVLPGLLRQADPQHVIEYSLALVTVLNEGPSRELVCRSCLKQTLHKLEAMMRILQAETTAGTVTPTAIGDSILNITGDLIHLASSDVRAPQRSELGAESPLRMVASQAYNLTSALMRILTRSRVLNEEPAFSRAPANLSDVVQLVFLVDSNPFLFGYISNYTVSTKVASMAFQTQAGAQIPIERLASERAITVKVPNNSDWAARGHRSSANSVVVQPQASVGAVVTLDSSNPVAVLHLQLNYTLLDGRYLSEEPEPYLAVYLHSEPRPNERNCSASRRIRPESLQGADHRPYTFFISPGTRDPVGSYRLNLSSHFRWSALEVSVGLYTSLCQYFSEEDVVWRTEGLLPLEETSPRQAVCLTRHLTAFGASLFMPPSHVRFVFPEPTADVNYIVMLTCAVCLVTYMVMAAILHKLDQLDASRGCAIPFCGQRGRFKYEILVKTGWGRGSGTTAHVGIMLYGVDSRSGHRHLDGDRAFHRNSLDIFQIATPHSLGSVWKIRVWHDNKGLSPAWFLQHIIVRDLQTARSTFFLVNDWLSVETEANGGLVEKEVLAASHAAVLRFRRLLVAELQRGFFDKHIWLSIWDRPPRSCFTRIQRATCCVLLICLFLGANAVWYGAVGDSAYSTGHVSRLSPLSVDTVAVGLVSSVVVYPVYLAILFLFRMSRSKVLDIDSCLDSSVLDSSFLTFSGLHAEVRALLGVLGWAGGPAALAQLGLQTLCTSQQAFAGQVKSDLFLDDSKRSGPVPVPFPPPCPKPPPPLSWLPQGALKGPGHAGIKIVLEDIFTLWRQVETKVRAKIRKMKVTTKVNRHDKINGKRKTAKEQSPLLQESLFATGDVSHNLLRALDVGLLANLSALAELDISNNKISTLEEGIFANLFNLSEINLSGNPFECDCGLAWLPRWAEEQQVRVVQPEAATCAGPGSLAGQPLLGIPLLDSGCGEEYVACLPDNSSGTVAAVSFSAAHEGLLQPEACSAFCFSTGQGLAALSEQGWCLCGSAQPSSASFACLSLCSGPPPPPAPTCRGPTLLQHVFPASPGATLLAAFHIAAPLPVTATRWDFGDGSPEVDAAGPAASHRYVLPGRYHVMAVLALGAGSALLGTDVQVEAAPAALELVCPSSVQSDESLDLSIQNRVGSGLEAAYSIVALGEEPARAVHPLCPSDTEIFSGNGHCYRLVVEKAAWLQAQEQCRAWAGATLAMVDSPAVQRFLVSRVTRSLDMWIGFSTVQGVEVGPAPQGEAFSLESCQNWLPGEPHPATAEHCVRLGPTGWCNTDLCSALHSYVCELRPGGPVQDAENLLVGAPSGDLQGPLMPLARQYGLSAPHEPVEVMVFPGLRLSREAFLTTAEFGTQELRRPAQLRLQVYRLLSTAGTPENGSEPESRSPDNRTQLAPACMPGGRWCPGANICLPLDASCHPRPAPMAARQGPGLLGAPYALWREFLFSVPAGPPAQYSVTLHGQDVLMLPGDLVGLQHDAGPGALPHCSPAPGHPGPQAPYLSANASSWLPHLPAQLEGTWACPACALRLLAATEQLTVLLGLRPNPGLRLPGRYEVRAEVGNGVSRHNLSCSFDVVSPVAGLRVIYPAPRDGRLYVPTNGSASVLQVDSGASATATARWPGGSVSARFENACPALVATFVPGCPWETNDTLFSVVALPWLGEGEHVMDVVVENSASRANLSLRVTAEEPICGLRATPSPEARVLQGVPVRYSPVVEAGSDMVFRWTINDKQSLTFQNVVFNVIYQSAAVFKLSLTASNHVSNVTVNYNITVERMNRMQGLRVSTVPAVLSPNATLALTAGVLVDSAVEVAFLWTFGDGEQALHQFQPPYNESFPVPDPSVAQVLVEHNVTHTYAAPGEYVLTVLASNAFENRTQQVPVSVRASLPSEAVGVSDGVLVAGRPVTFYPHLLPSPGGVLYTWDFGDGSPVLTQSQPAANHTYPSRGIYHVRLEVNNTVSGAAAQADVRVFEELRGLSVDMSLAVEQGAPVVVSAAVQTGDNITWTFDMGDGTVLSGPEATVEHVYLRAQNCTVTVGAASPAGHLARSLHVLVFVLEVLRVEPAACIPTQPDARLTAYVTGNPARYLFDWTFGDGSSNTTMRGCPTVTHNFTRSGTFPLALVLSSRVNRARYFTSICVEPEVGNVTLQPERQFVQLGDEARLVACAWPPFPYRYTWDFGTEEAVPARVGGPEVTFIYRDPGSYLVTVTASNNISAANDSALVEVQEPMLVTSIKVNGSLGLELHYLWDLGDGGRLEGPEVTHAYNSTGDFTVRVAGCNEVSRSEAWLNVTVKRRVRGLIVNASCTVVPLNGSMSFSTSLEAGSDVRYSWVLCDRCTPISGAENEVGSAQDSIFVYVLQLIEGLQVVGGGRYFPTNHTVQLQAVVRDGTNIYSWTAWRDRGPALAGSGKGFSLTALEAGTYHVQLRATNMLGSAWADCTVDFVEPVGWLMVAASPNPAAVNTSVTLSAELAGGSGVVYTWSLEEGLSWETPEPFTTHSFPTPGLHLVTMTAGNPLGSANATVEVDVQVPVSGLSIRASEPGGSFVAAGSSVPFWGQLATGTNVSWCWAVPGGSSKRGPHVTMVFPDAGTFNIRLNASNAVSWVSATYNLTVEEPIVGLVLWASSKVVAPGQLVHFQILLAAGSAVTFRRQVGGASPEVLPGPRFSHSFPRIGDHVVSVQSKNHVSWAQAQVRIVVLEAVSGLQVPNCCEPGIAMGTERNFTARVQRGSRVAYAWYFSLQKVRGDSLFILSGRDVTYTPWPRGCWRSSENRTLVLEVQDAVQYVALRSGPCFTNRLAQFEAATSPSPRRVAYHWDFGDGSPGQDTDKPRAEHSYLRPGDYRVQVNASNLVSFFVAQATVTVQVLACREPEVDVVLPLQVLMRRSQRNCLDAYVDLRDCVTYQTEYRWEVYRTASCQRPGCPARVALPGVDVSRPQLVLPRLALPVGHYCFVFVVSFGDTPLARSIQANVTVAPERLVPITEGGSYRVWSDTQDLVLDGSESYDPNLEDGDQTPLSFQWACVASTQREAGGCALNFGPRGSSTVTIPRERLAAGVEYTFSLTVWKAGRKEEATNQTCWWRPRALPSLFLMQILCNTTACFSFASFQTCHSSTYSLQATYALVTKATQSPSNTNRSSWLQYTRTHTPVSSALCMPFRRPGWKVANRMSILGGGWHDAEDAGAPLVYALLLQRCCQGHCKEFCVYKSSLSGYGAVLPPGFRPHFEVGLAVVVQDQLGAAVVALNRSLAITLPEPNGSAMGLTVWLHRLTASVLPGLLRQADPQHVIEYSLALVTVLNEGPSRELVCRSCLKQTLHKLEAMMRILQAETTAGTVTPTAIGDSILNITGDLIHLASSDVRAPQRSELGAESPLRMVASQAYNLTSALMRILTRSRVLNEEPAFSRAPANLSDVVQLVFLVDSNPFLFGYISNYTVSTKVASMAFQTQAGAQIPIERLASERAITVKVPNNSDWAARGHRSSANSVVVQPQASVGAVVTLDSSNPVAVLHLQLNYTLLDGRYLSEEPEPYLAVYLHSEPRPNERNCSASRRIRPESLQGADHRPYTFFISPGTRDPVGSYRLNLSSHFRWSALEVSVGLYTSLCQYFSEEDVVWRTEGLLPLEETSPRQAVCLTRHLTAFGASLFMPPSHVRFVFPEPTADVNYIVMLTCAVCLVTYMVMAAILHKLDQLDASRGCAIPFCGQRGRFKYEILVKTGWGRGSGTTAHVGIMLYGVDSRSGHRHLDGDRAFHRNSLDIFQIATPHSLGSVWKIRVWHDNKGLSPAWFLQHIIVRDLQTARSTFFLVNDWLSVETEANGGLVEKEVLAASHAGRVALPAPAGG

SEQ ID NO: 53390 - protein, 146 aa, Homo sapiens
  DOMAIN (36)..(51): Intermediate filaments proteins domain identified by eMATRIX, accession number BL00226A, p-value=4.600e-14, raw score of 12.77
  DOMAIN (39)..(114): Intermediate filament proteins domain identified by PFam, accession name filament, E-value=6.8e-30, PFam score of 112.7
GGASGMGGITASTVNQSLLSPLVLEVDPNIQAVRTQEKEQIKTLNNKFASFIDKVRFLEQQNKMLETKWSLLQQQKTARSNMDNMFESYINNLRRQLETLGQEKLKLEAEFTTWGPPLPMPPATKQFNCFFFLVQNKTSASSANVK

SEQ ID NO: 53391 - protein, 231 aa, Homo sapiens
  DOMAIN (61)..(76): Intermediate filaments proteins domain identified by eMATRIX, accession number BL00226A, p-value=4.600e-14, raw score of 12.77
  DOMAIN (61)..(228): Intermediate filament proteins domain identified by PFam, accession name filament, E-value=3.3e-84, PFam score of 293.2
VSGIPGSSFSRVGSSNFRGGLGGGYGGASGMGGITAVAVNQSLLSPLVLEVDPNIQAVRTQEKEQIKTLNNKFASFIDKVRFLEQQNKMLETKWSLLQQQKTARSNMDNMFESYINNLRRQLETLGQEKEQIKTLNNKFASFIDKVRFLEQQNKMLETKWSLLQQQKTARSNMDNMFESYINNLRRQLETLGQEKEQIKTLNNKFASFIDKVRFLEQQNKMLETKWSLCSS

SEQ ID NO: 53392 - protein, 71 aa, Homo sapiens
  DOMAIN (25)..(71): Protein phosphatase 2A regulatory subunit PR55 proteins domain identified by eMATRIX, accession number BL01024A, p-value= 1.000e-40, raw score of 10.26
MKCFSRYLPYIFRPPNTILSSSCHTEADIISTVEFNHTGELLATGDKGGRVVIFQREQESKNQVHRRGEYN

SEQ ID NO: 53393 - protein, 416 aa, Homo sapiens
  DOMAIN (122)..(137): Intermediate filaments proteins domain identified by eMATRIX, accession number BL00226A, p-value=4.600e-14, raw score of 12.77
  DOMAIN (125)..(346): Intermediate filament proteins domain identified by PFam, accession name filament, E-value=2e-54, PFam score of 194.2
  misc_feature (1)...(416): Xaa = X or * as defined in Table 2
ELSSPRSSFSAPSRISAWFGPPASTPASTMSIRGTQKSYKGSTSGPRAFKQAASXQRSGPGFRISSSSFSRVGSSNFRGGLGGGYGGASGMGGITAVTVNQSRALLSPLVLEVDPNIQAVRTQEKEQIKTLNNKFASFIDEVGFLEQQNKMLGTKWSLLDQQKTARSNMDNMFESYINNLRRQLETLAQEKLKLEAELGNMQGLVEDFKNNYEDEINKSTETENEFVLIKKDVDEAYINELYEEEIRELQSQISDTSVVLSIDNSRSLDTDSIIAEVKTEISEMNRNISWLQAETEGLKGGRISLEAGIADAEQRRELVIKDANAKLSELEAALQQTKKLLEMENMSIHTKTTSGYAGGVSLAYGGLTGSGLSYGLSSSSRSGAGSSSFSRTSSTRAMVVKKIKTRDGKLLTLSLR

SEQ ID NO: 53394 - protein, 217 aa, Homo sapiens
  DOMAIN (93)..(148): Glyceraldehyde 3-phosphate dehydrogenase proteins domain identified by eMATRIX, accession number BL00071D, p-value=8.286e- 30, raw score of 19.39
  DOMAIN (3)..(217): glyceraldehyde 3-phosphate dehydrogenases domain identified by PFam, accession name gpdh, E-value=1e-100, PFam score of 339.1
MTAFNSGKVDIVAINDPFIDLNYMVYMFLYDSTHGKFHGTVKAENGTLVINGNPITIFQDQDPSKIKWAPLAKVIHDNFGIIEGFMTTVHTITATQTINGPSGKLSRDGCRALQDIIPVSTGAAKPVGKVIPELNGKLTGMAFHVPTANVSVADLTCRLEKPAKYDDIKKNTHSSTFDAGAAIVLKDHSVKLISWYDNEFGYSNRVVHLMAHNASKE

SEQ ID NO: 53395 - protein, 128 aa, Homo sapiens
  DOMAIN (84)..(101): GLYCERALDEHYDE-3-PHOSPHATE DEHYDROGENASE SIGNATURE domain identified by eMATRIX, accession number PR00078C, p-value=9.368e- 11, raw score of 15.99
  DOMAIN (3)..(125): glyceraldehyde 3-phosphate dehydrogenases domain identified by PFam, accession name gpdh, E-value=2.2e-40, PFam score of 137.5
  misc_feature (1)...(128): Xaa = X or * as defined in Table 2
MTAFNSGKVDIVAINDPFIDLNYMVYMFLYDSTHGKFHGTVKAENGTLVINGNPITHFPGPRSLQNQMGAPAKVIHDNFGIIEGFMTTVHTITATQTINGPSGKLSRDGCRALQDIIPVSTGAAKPVX

SEQ ID NO: 53396 - protein, 378 aa, Homo sapiens
  DOMAIN (270)..(288): GLYCERALDEHYDE-3-PHOSPHATE DEHYDROGENASE SIGNATURE domain identified by eMATRIX, accession number PR00078D, p-value=2.800e- 21, raw score of 11.49
  DOMAIN (31)..(378): glyceraldehyde 3-phosphate dehydrogenases domain identified by PFam, accession name gpdh, E-value=4.2e-125, PFam score of 420.6
  misc_feature (1)...(378): Xaa = X or * as defined in Table 2
ASAHASAVRQSAAIFFCVASRAHIAETPLGKVKVGVNGFGRIGRLVTRAAFNSGKVDIVAINDPFIDLNYMVYMFQYDSTHGKFHGTVKAENGKLVINGNPITIFQERDPSKIKWGDAGAEYRRGSPLGVFNQPWRKAGGSICKGGSQKGSSISAPSAECPPCFVMGCEPMKKYDKQAFKIISNASCTNQLLXHPLAKGXFHDNFGNSLEGLHDHKSMAITANPRKTVDGPSRGKLWPLMGRGALQNIIPASTGAAKAVGKVIPELNGKLTGMAFRVPTANVSVVDLTCRLEKPAKYDDIKKVVKQASEGPLKGILGYTEHQVVSSDFNSDTHSSTFDAGAGIALNDHFVKLISWYDNEFGYSNRVVDLMAHMGFQGS

SEQ ID NO: 53397 - protein, 25 aa, Homo sapiens
RSGNPDPFPESVALRLPAHPLPPDV

SEQ ID NO: 53398 - protein, 64 aa, Homo sapiens
LQPARAGPPPPLAAAPAPALPVPSVRLRAPPAAPSSPAPPAPRPAPVSDASPAVPTSSGVHGEE

SEQ ID NO: 53399 - protein, 57 aa, Homo sapiens
CITVHGTGSLRTSPPEVGCTVGKFSLLSPAEYYACLLLPMMASAHQFETGQRVPRLA

SEQ ID NO: 53400 - protein, 50 aa, Homo sapiens
AAGIPVHVPCSAAVPPARTADRYQPVCGNAAGYPRGLLFLCGGYRLRVDV

SEQ ID NO: 53401 - protein, 84 aa, Homo sapiens
  misc_feature (1)...(84): Xaa = X or * as defined in Table 2
HELQCSLLPVRHATAGHTNGQNRLHWGHVAHSNYGAALKTNGVEVRXFTAAIARCDGNPYESFRKDVRADFQTRIDAIVRCLPK

SEQ ID NO: 53402 - protein, 77 aa, Homo sapiens
  misc_feature (1)...(77): Xaa = X or * as defined in Table 2
RCHEKGRKGHQAPTGSTRPDGTLSACRSCQQGQGMPASAGVPARQMGSTGNLPHLVXPYFLGLSSKAQHTGXLHKKR

SEQ ID NO: 53403 - protein, 363 aa, Homo sapiens
HSSCFCVCSWLSWRLRCAASSPFLSVLCCRCRLVFVVCSGRVRCRCPSWVSLLSSASLCRLSSLSRFPSPLVSLLSSLFLLPSLLLLSSLPLSSSWFFAPLCSRSLLRALIRSSPPPSVSSFVVSCSVGVASLGLISVFVVAASAGSFIVVLELSRLEAIVYVCSRLIIVWALPCGSAAGRFFCLVTCRCLLPYFGFFCVFPVLILSVCWGPWAPWCVGVLVCGRVPLRSRGPESLMLISSVSTQGRTTCRLWQQTVCWGKGARIRGRWASFFSAFFGLLLFLGLVIWGRNVVPLAKGADVKSFLGVNPATWGVVSPTVPPVPFWLLLPVRCTKVATKSFVAIGPGPTVLDLSDKNFATLGPL

SEQ ID NO: 53404 - protein, 86 aa, Homo sapiens
RAGSVKWRLLLSCACSPHAQVLTSPGRTLWGAQVCGIPTGLSDVSLLAEEAIVRRVVTLPSKARSVSRRREQPGGMPTGLVWSNGN

SEQ ID NO: 53405 - protein, 1020 aa, Homo sapiens
  misc_feature (1)...(1020): Xaa = X or * as defined in Table 2
MVIEELKDKFLFPTLAWGDPTLPSALRRFTSEFGMGSGAAPLSSPAPTADRDRTVSRRSKPSSRTTLNGEQPYPWDLLQPQDVMSRHRGAKHRRRYELLGGISLLSPEYLLSVERWPFHSEPPDHYDLLSHLLAPRRPPQSNYPPDTVRNPDYGSTLEHQTLKGGISRSAPCRLASTLQSLPPILHIKAQCSVSSYSKGSRGLSVLPRDRYSYGRRLPGLRSRASLALTPSINLPAPGRRLHRIRPLSCLHSAVFFNKQLHASSVHRALATDEHFYRQVIGEAYRHKMLFVISQSDKAEPTSGGNILSTEQKQNISRKICLLHELFQPVHPVCAVSVRLQWGLRVMAERMIKCLPREASSPVVALLQHPFRTTVAREQARDDFGETVGAILDTWPALSGISSSECLILPYYSPSPVASAAGLSLFVLPILRSLLMTRLASRFGAANLIRRDRPLTREELFRVVPSVFSEDKHESRSERYTYIPTISLLDSLQREGFQPFFACQTRVRDPRRREHTKHMLRLRREGQITGKQVPEIILLNSHDGTSSYQMLPGMFRAVCQNGLVCGESFGEVRVPHKGDVXPRLDLVLWLIKADDRALTVDEHFYHQVIGEVYRHKVLFVISQSDKAEPTSGGGQLSTAQKQNISRKICLLHELFQPVHPVCAVSVRLQWGLKVMAERMIKCLPREATSPVVSQLHPSFRTTVVREQARSDFGETVGAVLDSISAFPLIPAPVRAVIQAVRTTVVSLLMTRLASRFGAANLIRRDRPLTREELFRVVPSVFSEDKHESRSERYTYIPTISLLDSLQREGFQPFFACQTRVRDPGRREHTKHMLRLRREGQITGKQVPEIILLNSHDGTSSYQMLPGLFRAVCQNGLVCGESFGEVRVPHKGDVVSQVIEGAYEVLGIFDRVEEKRDAMQSLLLPPPAQQALAKAALTYRFGEDHQPVTESQILSPRRWQDESNDLWTTYQRIQENLIKGGLSGRNAKGGRSHTRAVRGIDGDVKLNRALWVMAEALLTQLQ

SEQ ID NO: 53406 - protein, 73 aa, Homo sapiens
LRDGRGSMSSSSPNSASGSAICPASSVMPETVSVSRVMPNVTKPAMTAKQTRIRNQMVAITYIESDAWNRSYQ

SEQ ID NO: 53407 - protein, 69 aa, Homo sapiens
PAFAPARAEETAPVKLPTRHCPQPGLRVNVRTSNIKGWYFKVGSMQTGVHTSKPPTYPTHQGSMFSVKL

SEQ ID NO: 53408 - protein, 65 aa, Homo sapiens
  misc_feature (1)...(65): Xaa = X or * as defined in Table 2
GAVAPMHPLAHPVPGAAAQPPPAXQPATPCHQPAXGQPAPPDVPGEPSAGRSLHHAHICLAPNEQ

SEQ ID NO: 53409 - protein, 121 aa, Homo sapiens
NSKVSVKRAAVWVRRWRWRLTMRSTWCRWCVTWKSFSWNWGRESNFTAGNTVLPTGFRNRRPGPPPKLELSRPNGSNNRPIKFKAIPWVRSPDLSPHTVLYTNSSSPSRLSDIFSGDTHER

SEQ ID NO: 53410 - protein, 105 aa, Homo sapiens
  misc_feature (1)...(105): Xaa = X or * as defined in Table 2
VPTDRIRTRLTSVCKRRCEVHQLEDRPFEVYQVAPRRDXSFETSVWNHMRKQPPLDVRQLASXNVLHRQLDIMDSAVASMYSIHLSIKMGIGFSGVTTVVKGTPK

SEQ ID NO: 53411 - protein, 308 aa, Homo sapiens
RLISPSVEKSVPVISQDGQTRGANAFYSVMEQMKMLDTLQNTQLQSAIVKAMYAATIESELDTQSAMDFILGADNKEQQSKLTGWLGEMASYYSAAPVRLGGARVPHLLPGDSLNLQSAQDTDNGYSTFEQSLLRYIAAGLGVSYEQLSRNYSQMSYSTARASANESWAYFMGRRKFVASRQACQMFLCWLEEAIVRRVVTLPSKARFSFQEARTAWGNANWIGSGRMAIDGLKEVQEAVMLIEAGLSTYEKECAKRGDDYQEIFAQQVRETMERRAAGLKPPAWAAAAFEAGVKKSNEEEQDGARAA

SEQ ID NO: 53412 - protein, 56 aa, Homo sapiens
  misc_feature (1)...(56): Xaa = X or * as defined in Table 2
VSSSIIMFGPLSQFPRQQVGSSVKRPSNVVCPGLMFSFFSSAAXIPXXPLIXQPGV

SEQ ID NO: 53413 - protein, 153 aa, Homo sapiens
  DOMAIN (56)..(78): Ribosomal RNA adenine dimethylases proteins domain identified by eMATRIX, accession number BL01131C, p-value=3.893e-18, raw score of 14.23
  DOMAIN (31)..(142): Ribosomal RNA adenine dimethylases domain identified by PFam, accession name RrnaAD, E-value=2.2e-46, PFam score of 151.5
TSPDVLRAGPRVPSVQGTSPSQSCPGQRPHGPNSKAYGRLSVMAQYYCNVIPVLEVPPSAFTPPPKVDSAVVRLVPHATMPHPVKDVRVLSRITTEAFNQRRKTIRNSLGNLFSVEVLTGMGIDPAMRAENISVAQYCQMANYLAENAPLQES

SEQ ID NO: 53414 - protein, 234 aa, Homo sapiens
IPVSERQGSDWRFFSVYVVNKAGGLIYQLDSYAPTGLRLEKTFSYPLDLLLKLHDERVLVAFGQRGRHPEWGHAVLAINGMDVNGRYTADGKKVLEYLGNPANYPVSYLFAQPRLTSNDKLMLALMFHSLFAIGSQACLPEQGKPQGIENAWKTDTFKLHCYQTLTGIKFVVLADPRQAGIDSLLRKIYEIYSDFALKNPFYSLEMPIRCELFDQNLKLALEVAEKAGTFGPGS

SEQ ID NO: 53415 - protein, 63 aa, Homo sapiens
  misc_feature (1)...(63): Xaa = X or * as defined in Table 2
MGFLGGAEVAAVGXRLGCGAASFFLCFLFTLDTGPTPGVSFHSLSASLLTCMLPVCCVDLFLV

SEQ ID NO: 53416 - protein, 93 aa, Homo sapiens
  DOMAIN (2)..(58): RNA recognition motif. domain identified by PFam, accession name rrm, E-value=0.016, PFam score of 21.5
  misc_feature (1)...(93): Xaa = X or * as defined in Table 2
GDIDAIFKDLSIRSVRLVRDKDTDKFKGFCYVEFDEVDSLKEALTYDGALLGDRSLRVDIAEGRKQDKGGFGFRKGGPDDRGFRDDFLWGRGX

SEQ ID NO: 53417 - protein, 279 aa, Homo sapiens
  DOMAIN (120)..(139): Eukaryotic  RNA-binding region RNP-1 proteins domain identified by eMATRIX, accession number BL00030A, p-value=4.429e- 09, raw score of 14.39
MGRVGRAGVQLGRRRTTWAAERTGQAAAGGPGRALRGQRPDLRSGGAADSPAAGRGELYCGVLPRSPWFLSERRRQMADFDTYDDRAYSSFGGGRGSRGSAGGHGSRSQKELPTEPPYTAYVGNLPFNTVQGDIDAIFKDLSIRSVRLVRDKDTDKFKGCGSKEQEEEGIRAAFSCLQGFLKEVCLLCFRDDFLGGRGGSRPGDRRTGPPMGSRFRDGPPLRGSNMDFREPTEEERAQRPRLQLKPRTVATPLNQVANPNSAIFGGARPREEVVQKEQE

SEQ ID NO: 53418 - protein, 241 aa, Homo sapiens
  DOMAIN (56)..(75): Eukaryotic  RNA-binding region RNP-1 proteins domain identified by eMATRIX, accession number BL00030A, p-value=4.429e- 09, raw score of 14.39
HEASCRSERRRQMADFDTYDDRAYSSFGGGRGSRGSAGGHGSRSQKELPTEPPYTAYVGNLPFNTVQGDIDAIFKDLSIRSVRLVRDKVTGKFKGFCYVEFDEVDSLKEALTYDGALLGDRSLRVDFAKGRKTKIRVAFGFRKGGPDDRGFRDDFLGGRGGSRPGDRRTGPPMGSRFRDGPPLRGSNMDFREPTEEERAQRPRIQLKPRTVWRPLNQVANPNSAIFGGARPREEVVQKEQE

SEQ ID NO: 53419 - protein, 345 aa, Homo sapiens
  DOMAIN (70)..(110): kw TRANSCRIPTASE REVERSE II ORF2 domain identified by eMATRIX, accession number DM01354H, p-value=6.850e-32, raw score of 18.00
MEDFTTPLSTLASSMRQKVNKDIQDLDSALQQADVIDIYRTLHPKSTEYTFFSALHCTYSKSDHVIGSKALLSKCKRTEITTNCVSDHSAIKLEFRIKKLTQNRTTTWKLNNLLLNDYWVDNEMKAEIKVFFETTQHDQNFTKARCIQEHRTPYSQSFKLKAETRDPSSFTKNVQKMKRVRDADLAVAALSRLRGKVWVKAWPPLRGCRCVLGCCFLAFCIRSLMDVKHSCPVCQRELFYYHRLPRPSPRSAYLAVRDIGPKMARDTVNLWPQARDPSENASPALLQTHAEKVLVRRVGSGLGTTLPRRGDDPTPERQISFLKCLLKKLSHGFGSEGAMPEEISH

SEQ ID NO: 53420 - protein, 491 aa, Homo sapiens
MGRNQSRKAENSKHESTYSPPKDHSSSQAMEQSWTENGFEKLGFRRKEALYYLDLTASCQSQELFQLYAGMSVVGTSMPVQAVCPYCGNRIITVTTFVPGALTWLLCTTLFLFGYVLGCCFLAFCIRSLMDVKHSCPVCQRELFYYHRLRQMELASSARTVVAPSRPCAGREGRGDANGKNSSPTAGSAMSSEPPPPPQPPTHQAGVGLLDTPRSRERSPSPLRGNVVPSPLPTRRTRTFSATVRASQGPVYKGVCKCFCRSKGHIGFNYPPAGWAGPDIFPGTSLDVGRGSYVPSGKGDEVTLLKCAPIPTPKNEKLAGPWEVVHHSPWHPGTKHETWSGHVISFLGGLVESTPLSLCFVGDFAGRRQQTLEDDILPHETGLQRGNGPSQVSPGGKGYGGAGVGCGVFPAISTAYGPLQQPLHHLKSIKSHLKRRGAHWWLSGGSNPIPGSGSRVGISSQLAQTHGLNPQNPSSSWSWRPQIPRSGPLAA

SEQ ID NO: 53421 - protein, 205 aa, Homo sapiens
  DOMAIN (54)..(77): HIGH MOBILITY GROUP (HMG1/HMG2) PROTEIN SIGNATURE domain identified by eMATRIX, accession number PR00886A, p-value=3.659e- 22, raw score of 10.08
  DOMAIN (20)..(157): HMG (high mobility group) box domain identified by PFam, accession name HMG_box, E-value=2e-20, PFam score of 81.3
SCPALPRLVNNTVRMAKGDPKKPNGKMSAYAFFVQTCREERKKKYQEVPVNFAEFSKKCSRRWKTMSRKEKSKFDKLAKVDKVRYDREMKDYGPAKGGKKKKDSNTFKRPPSEFFLFCSEFHPKIKSNNLNDSEKQPYITKAAKLKEEYEKDVAEYKSKGKFDGAKSPAEVAQIKVEEEDEEDEEEEEEEEDEEDEFKNCLSVSL

SEQ ID NO: 53422 - protein, 331 aa, Homo sapiens
  DOMAIN (117)..(164): HMG1/2 proteins domain identified by eMATRIX, accession number BL00353C, p-value=9.836e-37, raw score of 14.83
  DOMAIN (84)..(152): HMG (high mobility group) box domain identified by PFam, accession name HMG_box, E-value=1.1e-29, PFam score of 112.1
MPSGWSGSPIDWLAWDNLEQPPLYPKKLVQTYSVFPNQDEMSDVVVQPYNSLLTLKRLTQNADCVEIKDYGPAKGGKKKDPNAPKRPPSGFFLFCSEFCPKSKSTNPGIPIGDVAKKLGEMWKNLNDSEKQPYITQAAKLKEKYEKDVAVYKSKGKSDGAKGPAKVAQKKVEEEDEDEEFCILHSAAELGGDLEPHPEKGLPEDDPDIVVKGWLYREPRGGGARPWLPPRRAWFVLTRDSLDQFSSSGKGARRLGSLVLTSLCSVTGPERRRKETGLWSVTVSGRKHSVRLCSPRQAEAERWGVALREVIASKAPLETPTQLLLRDIQPPE

SEQ ID NO: 53423 - protein, 144 aa, Homo sapiens
  DOMAIN (70)..(117): HMG1/2 proteins domain identified by eMATRIX, accession number BL00353C, p-value=6.365e-40, raw score of 14.83
  DOMAIN (34)..(105): HMG (high mobility group) box domain identified by PFam, accession name HMG_box, E-value=3.2e-22, PFam score of 87.2
AAAGSEAGRRRGADPTRGPHVLPGSRQRRPPIFPSLDLSGFFLFCSEFCPEIKSTNPGISIGDVAKEKKKLGEMWNSLNDSEKQPYFTKAAKLKEKYEKDVADYKSKGKFDGAKGPAKVARKKVEEEDEQEEEEEEEEEEEEDE

SEQ ID NO: 53424 - protein, 134 aa, Homo sapiens
  DOMAIN (28)..(77): Matrix protein (MA) p15. domain identified by eMATRIX, accession number PF01140C, p-value=4.160e-10, raw score of 15.21
KAPYSTNSLSLPPFPILFMGSGYRKGPTFQEPKPLPGAAARGPGCDPTQPPRHSAPRDHGPPSPRCSPRPARPRASPAWLPPRAPTPPSPPAPAAAPRSCRGHARASSGRSGTTATPRRRRGGLWNQSPMDIKG

SEQ ID NO: 53425 - protein, 50 aa, Homo sapiens
VTGEQYGSPIRGQHEVHGMPSANTHNTWMGGWRVAGGASAGPLLAETLGL

SEQ ID NO: 53426 - protein, 223 aa, Homo sapiens
MWSAGRGGAAWPVLLGLLLALLVPGGGAAKTGAELVTCGSVLKLLNTHHRVRLHSHDITYGSGSGQQSVTGVEASDDANSYWRIRGGSEGGCPRGSPVRCGQAVRLTHVLTGKNLHTHHFPSPLSNNQEVSAFGEEGEGDDPGTLWTVRCSGTAHWEREAAVRFQHVGTFVFLSVTGEQYGSPIRGQHEVHGMPQCQQHNTWKAMEGIFIKPSVEPSAGHDEL

SEQ ID NO: 53427 - protein, 348 aa, Homo sapiens
  DOMAIN (57)..(100): kw TRANSCRIPTASE REVERSE II ORF2 domain identified by eMATRIX, accession number DM01354T, p-value=1.000e-40, raw score of 9.48
  DOMAIN (1)..(179): Reverse transcriptase domain identified by PFam, accession name rvt, E-value=1.5e-14, PFam score of 61.8
MIISTDAEKAFDNIQQCFMLKTLNKLGIDGTYLKIIRAIYDKTTANIILNGQKLEAFPLKTGTRQGCPLSPLLFNIVLEVLARAIRQEKEIKGIQLGKEEVKLSLFADDMTVYLENPIVSAQNLLKLIGNFSKVSGYKINVEKSQAFLYTNNRQTESQILSELPFTIASKRIKYLGIQLTGDVKDLFKKNYKPLLNEIKEDTNKWKNIPCSWVGRINIVKMAILPKGTFHSQQALEYGTKLVGGTTPGKGGQTHLGLPVFNTVKEYVSSTNVSNHPLILPEWGLCSRHCARCFIQIALFRPHYNPRSAIYMNPSKKAMETGLLSFSENKAKDRLLQGFEQNVKNLRNT

SEQ ID NO: 53428 - protein, 359 aa, Homo sapiens
  DOMAIN (201)..(214): ATP-citrate lyase / succinyl-CoA ligases family proteins domain identified by eMATRIX, accession number BL01216B, p-value= 7.923e-13, raw score of 13.10
  DOMAIN (190)..(325): CoA-ligases domain identified by PFam, accession name ligase- CoA, E-value=1.7e-16, PFam score of 63.4
MTATLAAAADIATMVSGSSGLAAARLLSRSFLLPHNGIRHCAYTASLRQHLYVDKNTKIICQGFTGKQGTPFHSQQALEYGTKLVGGTTPGKGGQTHLGLPVFNTVKEAKEQTGATGSVIYVPPPFAAAAINEAIEAEIPLVVCYPRGIPQPGLGHSSSHKTCGPGKDKAYWGPNCPGVINPGECKIGIMPGHIFHKKGRIGIVSTSGTLTYEAGHQTTQKLGLGQSLCVGIGGDPFNGTDFIDCLEILFERFLPQEGIILIGEIGGNAEENAAEILEPLYSGSKFARPVVSFIAGLTAPPGRRNGVMPGAIISGREKVGAKRERSSALQSAGVVVSMSPCTAGEPRFYKEFEKREDRL

SEQ ID NO: 53429 - protein, 313 aa, Homo sapiens
  DOMAIN (157)..(208): Ribosomal protein L30 proteins domain identified by eMATRIX, accession number BL00634, p-value=6.625e-26, raw score of 34.38
  DOMAIN (153)..(205): Ribosomal protein L30p/L7e domain identified by PFam, accession name Ribosomal_L30, E-value=2.2e-23, PFam score of 81.9
  misc_feature (1)...(313): Xaa = X or * as defined in Table 2
FFTELEETILKFIWNQKRACISKARVNTNDKSGGITLPDFKLYNEAIVAKTTWYWYKSRHIDQEKRREEKKEXKKDPSVPETLKKKQRNFTELKIQCLSKKFAQKMLQTARRKLIYEKVKHCHKEYRKMYRTEIRMARMATKAGNFYVPAEPKLAFVIRIRGINGVSPKVRKVLQLFLLYQIFNGAFVKLNKASINMLRIVEPYIAWRYPNLKSVNELIYKCGYGKINKKXIALTDNALTARSLGKYGIICREDLIHEIYTVGKCFKEANNFLWPFKLSSPRGGMKKKTTHFVEGGDAGKREVQINRLIRRMN

SEQ ID NO: 53430 - protein, 187 aa, Homo sapiens
GTMEGVEEKKKEVPAVPETLKKKRRNFAELKIKRLRKKFAQKMLRKARRKLIYEKAKHYHKEYRQMYRTEIRMARMARKAGNFYVPARTQIWRFVIRIRGINGSEPQRFRKVLQLLRPFVKIFNGTPFVKLQQGFRFNMLRDCRSHILAWGYPNLKSVNELIYKRGYGQNQFDLHFPTEKRSHPGSQ

SEQ ID NO: 53431 - protein, 110 aa, Homo sapiens
PRVRPRVRDSKMASVGEVSGPQYPVKDKKLLEVQTGGSFPSWILMRGPSSPSGIFGAFQRGLLRGTYNKYINVKKGSDLGGFTMVLACYVLFSYSFSYKHLKHERLRKYH

SEQ ID NO: 53432 - protein, 30 aa, Homo sapiens
  misc_feature (1)...(30): Xaa = X or * as defined in Table 2
PRVRLRCXMVDEYCGCEWGKXLNGGRVLWM

SEQ ID NO: 53433 - protein, 189 aa, Homo sapiens
  DOMAIN (8)..(30): TRANSFORMING PROTEIN P21 RAS SIGNATURE domain identified by eMATRIX, accession number PR00449A, p-value=4.706e-19, raw score of 13.20
  DOMAIN (9)..(189): Ras family domain identified by PFam, accession name ras, E- value=1.6e-84, PFam score of 294.2
QACIMREYKLVVLGSGGVGKSALTVQFVQGIFVEKYDPTIEDSYRKQVEVDAQQCMLEILDTAGTEQFTAMRDLYMKNGQGFALVYSITAQSTFNDLQDLREQILRVKDTDDVPMILVGNKCDLEDERVVGKEQGQNLARQWNNCAFLESSAKSKIYVNEIFYDLVRQINRKTPVPGKAPQKSPSCQLL

SEQ ID NO: 53434 - protein, 41 aa, Homo sapiens
SPHGEPLLGQCRREMWGWSLHTESPLGQWGSQILKLQNDLL

SEQ ID NO: 53435 - protein, 42 aa, Homo sapiens
  misc_feature (1)...(42): Xaa = X or * as defined in Table 2
TPLXKWLRGVMAVTVVTPQTGIIAIPDPHHEWGSTGYPRLPA

SEQ ID NO: 53436 - protein, 404 aa, Homo sapiens
GLDSGPESGLRAQPGLLAGKRKMSVLRRMMRVSNRSLLAFIFFFSLSSSCLYFIYVAPGIANTYLFMVQARGIMLRENVKTIGHMIRLYTNKNSTLNGTDYPEGNNSSDYLVQTTTYLPENFTYSPYLPCPEKLPYMRGFLNVNVSEVSFDEIHQLFSKDLDIEPGGHWRPKDCKPRWKVAVLIPFRNRHEHLPIFFLHLIPMLQKQRLEFAFYVVEQTGTQPFNRAMLFNVGFKEAMKDSVWDCVIFHDVDHLPENDRNYYGCGEMPRHFAAKLDKYMYILPYKEFFGGVSGLTVEQFRKINGFPNAFWGWGGEDDDLWNRVHYAGYNVTRPEGDLGKYKSIPHHHRGEVQFLGRYKLLRYSKERQYIDGLNNLIYRPKILVDRLYTNISVNLMPELAPIEDY

SEQ ID NO: 53437 - protein, 139 aa, Homo sapiens
  DOMAIN (36)..(88): Ribosomal protein L31e proteins domain identified by eMATRIX, accession number BL01144, p-value=1.000e-40, raw score of 25.07
  DOMAIN (31)..(125): Ribosomal protein L31e domain identified by PFam, accession name Ribosomal_L31e, E-value=8.3e-60, PFam score of 212.1
CTFEKAPPFQLGRGRMVPAKKGGEKKTGRAINEVVTREYTINIHKRIHGVGFKKRAPWALKEIRKFAMKEMGTPDVRIDTRLNKAVWAKGIRNVLYRIHVRLSRKRNEDEDSPNKLYTLVTYVTVTTFKNLQTVNVDEN

SEQ ID NO: 53438 - protein, 74 aa, Homo sapiens
  DOMAIN (32)..(72): Thymosin beta-4 family proteins domain identified by eMATRIX, accession number BL00500, p-value=1.000e-40, raw score of 9.77
  DOMAIN (33)..(73): Thymosin beta-4 family domain identified by PFam, accession name Thymosin, E-value=9.1e-23, PFam score of 89.1
KNQKRQLSGGHCADQTSLVLARLAPLFPTTMSDKPDMAEIEKFDKSKLKKTETQEKNPLPSKETTEQEKQAGKS

SEQ ID NO: 53439 - protein, 192 aa, Homo sapiens
KRQPTSAMKDPSRSSTSPSIINEDVIINGHSHEDDNPFAEYMWDGKMEGRNFNRQIGRRELWGRKDFLNRCFPKEMLGEEGKEGALNWVLFPSFEILPHQTMGPNPRTSFNDPCLSSDGSFSWEDLVVKSNLNPNAKEFVPGGEVRKYLSRRGPLLVDVAQFPHCEGSIRRLNCKSSLGHCVTLYAIAQSFC

SEQ ID NO: 53440 - protein, 59 aa, Homo sapiens
  DOMAIN (44)..(59): WILM'S TUMOUR PROTEIN SIGNATURE domain identified by eMATRIX, accession number PR00049D, p-value=1.458e-09, raw score of 0.00
TQEAKGCSKPRSHHCTPAWVTERKSTLCGRERRPGRRGGAGTTARAARSEAPPPPPPPP

SEQ ID NO: 53441 - protein, 171 aa, Homo sapiens
  DOMAIN (104)..(140): Synapsins proteins domain identified by eMATRIX, accession number BL00415B, p-value=9.860e-10, raw score of 9.91
MDFSKVPPHAAFRAQPPPALTWGLAKGSGRGAGEGGERPDRRRPAARTGTPAWRPAGRRRLPPRSPPPAPVPVRPALPHPVRPGKETGKTRRRRHYSPGRPLRGAAAAAAAAAVAQTASPSWAEGGRSGAGGSAESPAFSSPALPCPEGLLCPSAVPVPSKQSVSEVLAIF

SEQ ID NO: 53442 - protein, 236 aa, Homo sapiens
  DOMAIN (155)..(178): Immunoglobulins and major histocompatibility complex proteins domain identified by eMATRIX, accession number BL00290A, p-value= 1.529e-14, raw score of 20.89
  DOMAIN (35)..(219): Immunoglobulin domain identified by PFam, accession name ig, E-value=4.4e-21, PFam score of 73.0
SMAGFPLLLTLLTHCAGSWAQSVLTQPPSASGTPGQRVTISCSGASSNIGTNDVYWYQQLTGTAPKLLIYRNNQRPSGVPDRFSGSKSGSSASLAISGLQSEDEADYYCAAWDDSLSGPVFGGGTKLTVLGQPKAAPSVTLFPPSSEELQANKATLVCLISDFYPGAVTVAWKADSSPVKAGVETTTPSKQSNNKYAASSYLSLTPEQWKSHRSYSCQVTHEGSTVEKTVAPTECS

SEQ ID NO: 53443 - protein, 234 aa, Homo sapiens
  DOMAIN (153)..(176): Immunoglobulins and major histocompatibility complex proteins domain identified by eMATRIX, accession number BL00290A, p-value= 1.529e-14, raw score of 20.89
  DOMAIN (37)..(217): Immunoglobulin domain identified by PFam, accession name ig, E-value=6.9e-18, PFam score of 62.7
ASAMAWIPLFLGVLAYCTGSVASYELTQPPSVSVSPGQTASITCFGDKLGDKYSSWYQQKPGQSPLLVLYQDTNRPSGIPERFSGSNSGNTATLTISETQAMDEGDYYCQAWDSNTVVFGGGTKLTVLSQPKAAPSVTLFPPSSEELQANKATLVCLISDFYPGAVTVAWKADSSPVKAGVETTTPSKQSNNKYAASSYLSLTPEQWKSHRSYSCQVTHEGSTVEKTVAPTECS

SEQ ID NO: 53444 - protein, 542 aa, Homo sapiens
  DOMAIN (271)..(294): Immunoglobulins and major histocompatibility complex proteins domain identified by eMATRIX, accession number BL00290A, p-value= 1.563e-15, raw score of 20.89
  DOMAIN (55)..(458): Immunoglobulin domain identified by PFam, accession name ig, E-value=5.1e-18, PFam score of 63.1
GLPRRPTRPPTRSGVSPPWPGPHSGVLFPLLLHCTGSLSQAVLTQPSSLSASPGASVKLTCTLRSDINVGSPFIYWYQQKPGSPPQFLLRYKSDSDNQQGSGVPSRFSGSKDASANAGILLISGLQSEVRDDYYCQAWDSSTAHSDTGRCGIVGRPPVRQCWPLLLLGLAMVAHGLLRPMVAPQSGDPDPGASVGSSRSSLRSLWGRLLLQPSPQRADPRCWPRGFWSEPQSLCYVFGTGTKVTVLGQPKANPTVTLFPPSSEELQANKATLVCLISDFYPGAVTVAWKADGSPVKAGVETTKPSKQSNNKYAASSYLSLTPEQWKSHRSYSCQLQWGLGLGASQGGFLYEPVSQCVVFGGGTKLTVLGQPKAAPSVTLFPPSSEELQANKATLVCLISDFYPGAVTVAWKADSSPVKAGVETTTPSKQSNNKYAASSYLSLTPEQWKSHRSYSCQKPNHASHGTSRMPSVSAPVSGLKSCWSGTGDRSALGQMPGPCHGIPDPMQQASDSGQPKAAPLGSLCSKPSSEELSGQQGPHWCVS

SEQ ID NO: 53445 - protein, 319 aa, Homo sapiens
  DOMAIN (93)..(136): Histone H2B proteins domain identified by eMATRIX, accession number BL00357, p-value=7.557e-23, raw score of 7.74
  DOMAIN (19)..(139): Core histone H2A/H2B/H3/H4 domain identified by PFam, accession name histone, E-value=2.1e-38, PFam score of 141.0
VFLLLYLVAMPDPAKSAPAPKKGSKKAVTKAQKKDGKKRKRSRKESYSVYVYKVLKQVHPDTGISSKAMGIMNSFVNDIFERIAGEASRLAHYNKRSTITSREIQTAVRLLLPGELAKHAVFIENLLNYRKYLVKSSEKDRNYPCPLPGLKSKVDICTPYCLLLLPQPRHYPGKDTKEETEDFPNSPPPINREEDKRYTTVMGPCLRQAALEGELLACPVMEDQQANWVHEPITFNTFKEIRKSIRENGPASPFTRGLIEVIADSSDLVASTQKLTQPKETPSAPYNDISDLTNQDSWFIGFPPIWNAGETDLSNNKTT

SEQ ID NO: 53446 - protein, 153 aa, Homo sapiens; identical to SEQ ID NO: 42423
  DOMAIN (111)..(153): Histone H2B proteins domain identified by eMATRIX, accession number BL00357, p-value=1.000e-40, raw score of 7.74
  DOMAIN (37)..(153): Core histone H2A/H2B/H3/H4 domain identified by PFam, accession name histone, E-value=8.6e-55, PFam score of 195.4

SEQ ID NO: 53447 - protein, 130 aa, Homo sapiens; identical to SEQ ID NO: 47063
  DOMAIN (88)..(130): Histone H2B proteins domain identified by eMATRIX, accession number BL00357, p-value=1.000e-40, raw score of 7.74
  DOMAIN (14)..(130): Core histone H2A/H2B/H3/H4 domain identified by PFam, accession name histone, E-value=3.7e-54, PFam score of 193.3

SEQ ID NO: 53448 - protein, 150 aa, Homo sapiens
SAQLSAELLPVFLSEAVGACAVRGLLAGRVPPQGPWELQGILLLSQNELYRQILLLMHLLPQDLLLLKPCQSSYCYCQEVLDRLIQCGLLVAEETPGSRPACDTGRQRLSRKLLWKPSGDFTDSDSDDFGEADGRYFRSWATQSSCSSSC

SEQ ID NO: 53449 - protein, 122 aa, Homo sapiens
  misc_feature (1)...(122): Xaa = X or * as defined in Table 2
PDPAANAPAAAKPAAAKALPVFLLLLSGGAGPAHPMRAPGCXGELGYTEQLFQFLQATAQEEGIFEYTDPKLAISAVWTFRDLGVLQQTPSPAGPRLHLSPTFASLDNQEKLEQFIRQFICS

SEQ ID NO: 53450 - protein, 59 aa, Homo sapiens
EVVGRRWGAALTPACPLQLSQQSHCPDFFLFLCRLLSPLLKAFAQAAAFLRQGQLPDTG

SEQ ID NO: 53451 - protein, 807 aa, Homo sapiens
PGVLSTATFRESGLSPCSKLKHPGPRGRLQYSPPTAGQGRLENGAGHPQSTGPVATLSVAEYGTQGGASGPARIPIGSRGCLLAGRAEASLWSSGFGMKLEAVTPFLGKYRPFVGRCCQTCTPKSWESLFHRSITDLGFCNVILVKEENTRLFSWALLRVLKLLFLNVQLHKGQMKMVQKAAQQVGQVGTSLWLSPEQGLPLVLLSTHKTLLDGILLPFMLLSQGLGVLRVAWDSRACSPALRALLRKLGGLFLPPEASLSLDSSEGLLARAVVQAVIEQLLVSGQPLLIFLEEPPGALGPRLSALGQAWVGFVVQAVQVGIVPDALLVPVAVTYDLVPDAPCDIDHASAPLGLWTGALAVLRSLWSRWGCSHRICSRVHLAQPFSLQEYIVSARSCWGGRQTLEQLLQPIVLGQCTAVPDTEKEQEWTPITGPLLALKEEDQLLVRRLSCHVLSASVGSSAVMSTAIMATLLLFKHQKGVFLSQLLGEFSWLTEEILVRGFDVGFSGQLRSLLQHSLSLLRAHVALLRIRQGDLLVVPQPGPGLTHLAQLSAELLPVFLSEAVGACAVRGLLAGRVPPQGPWELQGILLLSQNELYRQILLLMHLLPQDLLLLKPCQSSYCYCQEVLDRLIQCGLLVAEETPGSRPACDTGRQRLSRKLLWKPSGDFTDSDSDDFGEADGRYFRLSQQSHCPDFFLFLCRLLSPLLKAFAQAAAFLRQGQLPDTELGYTEQLFQFLQATAQEEGIFECAAPKASPSSAVWTFRDLGVLQQTRSPAGPRLHLGPLLLPALDNQEKLRTVHPAGSLVG

SEQ ID NO: 53452 - protein, 260 aa, Homo sapiens
ASSQLPCSMAQCCATWAPLKMRWLCSTAWSTSSLSLPPSWSSLQASQPSCCHATSLAPPCAGQCLARAWPVLSFLCTCALGLLASIAMTFATQGKALLAACTFGSSELLALAPYCPFDPTRIYSSSLCLWGIALRCSAWAENVFAVRCAQLTHQLLELRPWWGKKQPTHMMRENPELVEGRDLLSCTSSEPLTLCRDDVLPRPDGQLRTLQATLLCDPGPGFLGAGLRGLKWTLGGPSGAFQPSSPTTPAHLHLKIETLF

SEQ ID NO: 53453 - protein, 114 aa, Homo sapiens
FRRGYRYVILDIPLLFETKKLLKYMKHTVVVYCDRDTQLARLMRRNSLNRKARMARHVLDNSGEWSVTKRQVILLHTELERSLEYLPLRFGVLTGLAAIASLLYLLTHYLLPYA

SEQ ID NO: 53454 - protein, 380 aa, Homo sapiens
  DOMAIN (18)..(36): URIDINE KINASE SIGNATURE domain identified by eMATRIX, accession number PR00988A, p-value=1.794e-10, raw score of 6.39
FCSSWLRSLADSSLSWKMFLVGLTGGIASGKSSVIQVFQQLGCAVIDVDVTARHVVQPGYPAHRRIVEVFGTEVLLENGDINRKVLGDLIFNQPDRRESLNAITHPEIRKEMMKETFKYFLRGYRYVILDIPLLFETKKLLKYMKHTVVVYCDRDTQLARLMRRNSLNRKDAEARINAQLSLTDKARMARHVLDNSGEWSVTKRQVILLHTELERSLEYLPLRFGVLTGLAAIASLLYLLTHYLLPYAYTASAIPPSGAASRGPGARCSAIRKRAPARPTSAVSPPGAPRSPARGLRAIDRAAGTRNLNATLPPPGPPAPPSPPSPPSSITLHVFHQLQPDITRGREGTDFQWEKFPGRVLVADSRRALRCLAPAPTWLV

SEQ ID NO: 53455 - protein, 410 aa, Homo sapiens
TPLFLRKGTADGSARTTVIHLGFTKGKQRCVETQAAAVAGDVGRTAAGGRVGKESGVISSDDRPGLPVGQSQPEGGEQEATDTVSVHATTSQAWPGGADSKELSSKAEERETGKDQQTELPLCLPLRDFPDSAPVMSSDSGHATESLHLASSDSKPPMPTPNEGPGSTVGHAGPPRTVKADLCTEPQLALRGLQVSLPRLHLVGVIYAEHQASGLEGCGHAGSCSPDGSPRAPGATLCLSKPLSFRTKRCLPCWLPASAPVGIPGAPVHIPGAPVCIPGAPACISNAPVHIPGAPVGIPGAPVCIPGAAVCVPNTPMCIPSAPMCIPNTPVCIPNTPVCIPNTPVCIPGAAVCILGAPRAHPWCSSCVHPGAPECYLGCGLTQADRLEPAVLDAGLQEPLFALCGQALPS

SEQ ID NO: 53456 - protein, 135 aa, Homo sapiens
LCRICQIAGGSPSNPLLEPCGCVGSLQFVHQECLKKWLKVKITSGADLGAAKTCEMCKQGLLVDLGDFNMIEFYQKHQQSQAQNELMNSGLYLVLLLHLYEQRFAELMRLNHNQVEREREEVARSKLGTRAKSSR

SEQ ID NO: 53457 - protein, 63 aa, Homo sapiens
KGQPQCRGHAVPSSCSPEHHAAWYCSWCGLWPLSCPPAFRKPEVPSPRLRCAVCLARVTYHMR

SEQ ID NO: 53458 - protein, 298 aa, Homo sapiens
TQKAICMCLGLCKKIHHLLSLQCLISQIKMIMGAGWQSSGFTDEKETSKIKADPEKLKKLQESLLEEDSEEEGDLCRICQIAGGSPSNPLLEPCGCVGSLQFVHQECLKKWLKVKITSGADLGAVKTCEMCKQGLLVDLGDFNMIEFYQKHQQSQIKTEATVVEHKDIYNVTETQLVPEARSVLLVGAGQMLLTGANRALNSDYSSMRPKVKAQNELMNSGLYLVLLLHLYEQRFAELMRLNHNQVERERVRVTRVLGGLSPNVSCGVVSGVGSFQWVRGLTDLKNEASDLHAQIPAE

SEQ ID NO: 53459 - protein, 198 aa, Homo sapiens
  DOMAIN (58)..(77): GLYCERALDEHYDE-3-PHOSPHATE DEHYDROGENASE SIGNATURE domain identified by eMATRIX, accession number PR00078B, p-value=8.364e- 20, raw score of 7.45
  DOMAIN (16)..(196): glyceraldehyde 3-phosphate dehydrogenases domain identified by PFam, accession name gpdh, E-value=3.4e-78, PFam score of 263.8
MIAAFNPGKVDTVTTNGPFIDLNYMVYMFHYDPTHGKFHDVPMFVMGMNHKHENKLTVISNASCTTNCLDPLAKVIHDNFGIREGLMTTVHSIIATQKTVDGPSRKLWHDSHGAFQNTIPASTGAAKIKKVVRQASQGPLKGILGYTEHQVVPLEFKSNTRPSTFEAGAGIAVNDHFVKLISWYGNEFAYSNKVIKPM

SEQ ID NO: 53460 - protein, 76 aa, Homo sapiens
AALGKGPWSSELPPQLKNGGAGPRQMENPGGGMEKGRSGNGTFEQQTLQPAALPCPFPPPTHPPEVSVLGHLGTLL

SEQ ID NO: 53461 - protein, 378 aa, Homo sapiens
  DOMAIN (123)..(146): RHODOPSIN-LIKE GPCR SUPERFAMILY SIGNATURE domain identified by eMATRIX, accession number PR00237C, p-value=1.360e-13, raw score of 15.69
  DOMAIN (61)..(268): 7 transmembrane receptor (rhodopsin family) domain identified by PFam, accession name 7tm_1, E-value=3.7e-53, PFam score of 171.0
QQTLQPAALPCPFPPPTHPPEVLPTAMNTTSSAAPPSLGVEFISLLAIILLSVALAVGLPGNSFVVWSILKRMQKRSVTALMVLNLALADLAVLLTAPFFLHFLAQGTWSFGLAGCRLCHYVCGVSMYASVLLITAMSLDRSLAVARPFVSQKLRTKAMARRVLAGIWVLSFLLATPVLAYRTVVPWKTNMSLCFPRYPSEGHRAFHLIFEAVTGFLLPFLAVVASYSDIGRRLQARRFRRSRRTGRLVVLIILTFAAFWLPYHVVNLAEAGRALAGQAAGLGLVGKRLSLARNVLIALAFLSSSVNPVLYACAGGGLLRSAGVGFFAKLLEGTGSEASSTPRGGSLGQTVKSGPAALEPGPSESLTASSPLKLNELN

SEQ ID NO: 53462 - protein, 64 aa, Homo sapiens
  misc_feature (1)...(64): Xaa = X or * as defined in Table 2
ASVVPVTSALAMCSPKSGIGDGFAVLRVEDVAQKXXXKAALGVASSPAWQQTREREHVQGNSPL

SEQ ID NO: 53463 - protein, 449 aa, Homo sapiens
  DOMAIN (51)..(106): Tubulin subunits alpha beta, and gamma proteins. domain identified by eMATRIX, accession number BL00227B, p-value=1.000e- 40, raw score of 19.29
  DOMAIN (1)..(432): Tubulin/FtsZ family domain identified by PFam, accession name tubulin, E-value=6e-293, PFam score of 986.6
RECISIHVGQAGVQIGNACWELYCLEHGIQPDGQMPSDKTIGGGDDSFNTFFSETGAGKHVPRAVFVDLEPTVVDEVRTGTYRQLFHPEQLITGKEDAANNYARGHYTIGKEIVDLVLDRIRKLADLCTGLQGFLIFHSFGGGTGSGFASLLMERLSVDYGKKSKLEFAIYPAPQVSTAVVEPYNSILTTHTTLEHSDCAFMVDNEAIYDICRRNLDIERPTYTNLNRLIGQIVSSITASLRFDGALNVDLTEFQTNLVPYPRIHFPLATYAPVISAEKAYHEQLSVAEITNACFEPANQMVKCDPRHGKYMACCMLYRGDVVPKDVNAAIATIKTKRTIQFVDWCPTGFKVGINYQPPTVVPGGDLAKVQRAVCMLSNTTAIAEAWARLDHKFDLMYAKRAFVHWYVGEGMEEGEFSEAREDLAALEKDYEEVGVDSVEAEAEEGEEY

SEQ ID NO: 53464 - protein, 373 aa, Homo sapiens
  DOMAIN (52)..(107): Tubulin subunits alpha beta, and gamma proteins. domain identified by eMATRIX, accession number BL00227B, p-value=1.000e- 40, raw score of 19.29
  DOMAIN (1)..(346): Tubulin/FtsZ family domain identified by PFam, accession name tubulin, E-value=1.2e-209, PFam score of 709.9
  misc_feature (1)...(373): Xaa = X or * as defined in Table 2
MRECISIHVGQAGVQIGNACWELYCLEHGIQPDGQMPSDKTIGGGDDSFNTFFSETGAGKHVPRAVFVDLEPTVVDEVRTGTYRQLFHPEQLITGKEDAASNYARGHYTIGKEIVDLVLDRIRKLFGGGTGSGFASLLMERLSVDYSKKSKLEFAIYPAPQVSTAVVEPYNSILTTHTTLEHSDCAFMVDNEAIYDICRRNLDIERPTYTNLNRLIGQIVSSITASLRFDGALNVDLTEFQTNLVPYPRIHFPLATYAPVISAEKAYHEQLSVAEITNACFEPANQMVKCDPRHGKYMACCMLYRGDVVPKDVNAAIATIKTKRTIQFVDWCPTGFKVXLGDMEAFQQAADAQNNTGLEGPHPLGRLSLFHGL

SEQ ID NO: 53465 - protein, 972 aa, Homo sapiens
  DOMAIN (318)..(373): Tubulin subunits alpha beta, and gamma proteins. domain identified by eMATRIX, accession number BL00227B, p-value=1.000e- 40, raw score of 19.29
  DOMAIN (267)..(620): Tubulin/FtsZ family domain identified by PFam, accession name tubulin, E-value=6.1e-234, PFam score of 790.6
MDVYCAHESLRHTKSPEATGQTSGQRPEALQAFWPAFGSSPVTGSSPVTEVTTKGRWSSSRQVLWDRIPLAKSRPAISNRQSQRTNIPWWESCPPILNLEREQPPRFAQPGTYASRWKALEEMEKQQREQVDRNIREAKEKLEAEMEAARHEHQLMLMRQDPGLALVSCMQQGQSMSRSPKKVFKHLYELNLTKLQSLGSRSRLRWKDSPFWGEEAGGKRPPLVSLALHRSPSLLLLFVPKHPSKGRPDCTVQRSPKPTEKSQLLDLRECISIHVGQAGVQIGNACWELYCLEHGIQPDGQMPSDKTIGGGDDSFNTFFSETGAGKHVPRAVFVDLEPTVVDEVRTGTYRQLFHPEQLITGKEDAANNYARGHYTIGKEIVDLVLDRIRKLADLCTGLQGFLIFHSFGGGTGSGFASLLMERLSVDYGKKSKLEFAIYPAPQVSTAVVEPYNSILTTHTTLEHSDCAFMVDNEAIYDICRRNLDIERPTYTNLNRLIGQIVSSITASLRFDGALNVDLTEFQTNLVPYPRIHFPLATYAPVISAEKAYHEQLSVAEITNACFEPANQMVKCDPRHGKYMACCMLYRGDVVPKDVNAAIATIKTKRTIQFVDWCPTGFKVKQGFLLGLDPLLLPSSATSLHGGTGDVCRVLWCDLSSSLPPVDNSTCFSGGGRGVKQTLWESLVVVLFSALALLNAGYARSEADWGHSSDAFSPAPAGNQGPPPMTGMNMNNRATIPGPPMGPGPAMGPEGAANMGTPMMPDNGAVIMASMSFQCCLEAFGVTLDSAFSPYPCLLNSIFSQQMLSALSSKCIPCPITSVKVLNDWVPTAPTPSVPTPSAPTPFVPAPSALLTSTAPTPSALLTSTAPTPSAPTPFTPAPSALLTSTAPTPSAPAPSALLTSTAPTPSAPTPSVPAPSALLTSTASTPPAPILSASTSAAPTPSAPTLSAPTICCTYIICTYTLCTYILRIYTL

SEQ ID NO: 53466 - protein, 52 aa, Homo sapiens
GFPLAFHPVFNAHEPFRRGTGVDLGQGHPASSWQDSLFLFLAIFFFFWLLSI

SEQ ID NO: 53467 - protein, 138 aa, Homo sapiens; identical to SEQ ID NO: 41847
  misc_feature (1)...(138): Xaa = X or * as defined in Table 2

SEQ ID NO: 53468 - protein, 221 aa, Homo sapiens
MAAAEEEDGGPEGPNRERGGAGATFECNICLETAREAVVQCGQRPAPESRGGFQPFGDTGGFHFSFGVGAFPFGFFTIVFNAHEPFRRGTAATQKSICSVAPFPDPGFFYYRVRKVISAPVGEPASLWSVTPLHSKGFIFVSAFLGEWAWLGDVTVDPGFCHWIWNEDLVSQSSMIPATAIGSAFQEAVVVTRAPPPLPLNPSCRDCHSNIHVSKMAAALA

SEQ ID NO: 53469 - protein, 216 aa, Homo sapiens
SWAGGGFWFVGACVCVFGGTEGYVGRNKTGHGSSRRRRSGAPNVPNRERGGAGRPKTPFECNICLETARELVLSVLANLYFWTISHQVLETRPERQECPVCKAGISREKVVPLYGRGSQEAPRIPRLKTPPPPPRGQRPAPESRGGFQPFGDTGGFHFSFGVGAFPFGFFTTVFNAHEPFRRGTGVDLGQGHPASSWQDSLLLFLAIFFFFWLLSI

SEQ ID NO: 53470 - protein, 37 aa, Homo sapiens
RPRVIGGSPSSAPAQMQAPSGPPSCWEVQRARAFFHA

SEQ ID NO: 53471 - protein, 47 aa, Homo sapiens
IQTKTVAQCVEYYYIWKKMIKFDCGRAPGLEKRVKREPEEVERTEEK

SEQ ID NO: 53472 - protein, 440 aa, Homo sapiens
MRQRRAELLSKDKRVRTDGNNKCSPSAIGKRKERGTNDWIEGDNNQESQGLNCSDTLNRDLGPNTRGFLYAGLSGLDPDPSLPTPDMSSEVLEDNLDTLSLYSGKDSDSVKLLEEYADSESQASLQGRSRCWQHPHPAPLSYPPAASGSQLSLQGKFPSAKPPLLGGYTCTAQRTQWALTKRSLRATRESVSRQQGVYGLVGRKRTRHHRGVLGLLGIPSARPERPGTGSEAGPTRLPGAAVARRRPARPVRGRLGDPAPTAAQTSGPASLPPPPPPRSYGDPHQNGYPDPDPAPSASPDLPPAAGDTRGSGGRRKKRRTGTARLNTPGRKAPKQKAAAGRKGRAHQPAPRTPEPQRRRPIRPPNQTDRLRHPHRRAGRGPPPGGAGGTANPSTGANGGAATARRTAGARTRGARGASERAGRHGSRPASWLTATPPPGT

SEQ ID NO: 53473 - protein, 144 aa, Homo sapiens
  DOMAIN (43)..(144): Troponin domain identified by PFam, accession name Troponin, E-value=3.5e-05, PFam score of 30.7
PTRPSSPEETDGPWDPEGHPGGPLTDPPNAPVLALPPAIPGLSLSMADGSSDAAREPRPAPAPIRRRSSNYRAYATELQDLCRQLHARVDKVDEERYDIEAKVTKNITEIADLTQKIFDLRGKFKRPTLRRVRISADAMMQALL

SEQ ID NO: 53474 - protein, 136 aa, Homo sapiens
SSSPEETDGPWDPEGHPGGPGTEPPNAPVLALPPAIPGLRLSMADGSSDAVREPRPAPTPIRRRSSNYRAYATERRGEKGRALSTRCQPLELAGLGFAELQDLCRQLHARVDKVDEERYDIEAKVTKNITEIADLT

SEQ ID NO: 53475 - protein, 162 aa, Homo sapiens
  DOMAIN (100)..(135): Troponin domain identified by eMATRIX, accession number PF00992A, p-value=1.931e-26, raw score of 16.67
  misc_feature (1)...(162): Xaa = X or * as defined in Table 2
SSPEETVGPWDPEGHPGGPLTDPPNAPVLALPPAIPGLSLIMADGSSDAVRAAGXGVAGTPRARAREPRPAPAPIRRRSSNYRAYATEPHAKKKSKISASRKLQLKTLLLQIAKQELEREAEERRGEKGRALSTRCQPLELAGLGFAELQDLCRQLHARVDK

SEQ ID NO: 53476 - protein, 229 aa, Homo sapiens
  DOMAIN (159)..(194): Troponin domain identified by eMATRIX, accession number PF00992B, p-value=6.455e-23, raw score of 26.31
  DOMAIN (50)..(191): Troponin domain identified by PFam, accession name Troponin, E-value=1.1e-30, PFam score of 115.4
VSAWRNGSSDAAREPRPAPAPIRRRSSNYRAYATEPHAKKKSKISASRKLQLKTLLLQIAKQELEREAEERRGREGARSLAPRCQPLELAGLGFADLPGLCCRQFHARVDKVDEERYDIEAKVSKNITEIANLTQKIFDLRSKFKRPTLRRVRISADAMMQALLGARAKESLDLRAHLKQVKKEDPEKENREVGDWRKNIDALSGMEGRMKKWRELSLPAYCPCPEEGH

SEQ ID NO: 53477 - protein, 162 aa, Homo sapiens
NMLSSLGSLLLCGSITLALGNAQKLPKGKRPNLKVHINTTSDSILLKFLRPSPNVKLEGLLLGYGSNVSPNQYFPLPAEGKFTEAIVDAEPKYLIVVRPAPPPSQKKSCSGKTRSRKPLQLVVGTLTPSSVFLSWGFLINPHHDWTLPSHCPNDRFYTIRYR

SEQ ID NO: 53478 - protein, 143 aa, Homo sapiens
HLAGHGGSSPRSVWQSHCIRYTVCPSAEMAIPWRSMNWDGRPSGKGDSLLHPRRKPLPPNNVTGKPGSAGTLVMYLPFPAMISVLLANISSSWRASLSPEAGTVGCFISVSILSKGVPVGWVLTLRGGVVIGPDEMILPTTVL

SEQ ID NO: 53479 - protein, 330 aa, Homo sapiens
KTMWKVEFGVRFSITRLLLEHQPKQTMYIPLPKPPLWPEEPKTEAPKQTPRAPPKPKTSPRPRIPQTQPEETDQSTQEPFTTKIPRTTELAKTTQGLEMLSCLIHNPKMHKDSTNEQIAASLQACYYEQLLMYIRVTDVDSVGPGNGKEAVTAPQAPTLFWLNHKAQLAKDWAGKDVNITPTFATSKKENKPPNNLQICNVSKIHQRAKVAGKPEIKDKHIQKEMPLDAIEASKINLVKIFNEFLKAWKCRLSFEYRIPENQGHKGSFYLLVGSSRTSWLLTEKIGSSKRVLRMPPMDILKTTQILLSFLWSINLTPRGKNNHLVAPAHR

SEQ ID NO: 53480 - protein, 336 aa, Homo sapiens
  DOMAIN (8)..(53): kw TRANSCRIPTASE REVERSE II ORF2 domain identified by eMATRIX, accession number DM01354N, p-value=1.000e-40, raw score of 13.17
  DOMAIN (92)..(335): Reverse transcriptase domain identified by PFam, accession name rvt, E-value=1.8e-45, PFam score of 164.5
IQTTIREYYKHLYANKLENLEEMDTFLDTYTLPRLNQEEVESLNRPITGAEIVAIINSFPTKKSPGPDGFTAEFYQRYKEELVPFLLKLFQSIEKEGILPNSFYEASIILIPKPGRDTTKKENFRPISLMNIDAKILNKILANGIQQHIKKLIHHDQVDFIPGMQGWFNIRKSINVIQHINRAKDKNHMIISIDAENAFDNIQQPFMLKTLNKLGIDGTYFKIIRAIYDKPTANIILNEQKLEAFPLKTGTRQGYPLSPLLFNIVLEVLARAIRQEKEIKEKKIPRNPTYKGCEGPLQGELQTTAQGNKRGYKQMEEHSMLMGRKNQYRENGHTAQ

SEQ ID NO: 53481 - protein, 51 aa, Homo sapiens
  misc_feature (1)...(51): Xaa = X or * as defined in Table 2
PIQSFFLVLKKPPLRKGVYLSSKSLSRWFFKVQANXRSQPQKAFSRLSCHC

SEQ ID NO: 53482 - protein, 214 aa, Homo sapiens
MGQSHIEEVPEEDYLCSLSSWRVFKIEVLMNGRKHFVEKRYSEFHALHKKGPDLFIRAHCDLWGLIGGLMSYIICIHLNLTKGTHGLPGVLLGNHRLKIKPRAHVNGSSTCAVASASPPESSLQPSLNLTLQSKGPWDTKWESYREPRGNRNIQKGKLRRGMERHSRVQPMRRVSGTATMSTQGRWVNKEECEQGPEATEITDRELNAQMKDRQ

SEQ ID NO: 53483 - protein, 98 aa, Homo sapiens
  DOMAIN (15)..(35): kw TRANSCRIPTASE REVERSE II ORF2 domain identified by eMATRIX, accession number DM01354W, p-value=1.628e-12, raw score of 12.64
  misc_feature (1)...(98): Xaa = X or * as defined in Table 2
KEDTNKWKNIPCSWLGRINIVKMAIMPKVNLXIQCHPHQATNDFSSQNWKKTTLKFIWEPKKEPALPSQSXAKRAKLGGITLPDFQTITYKATVTKTA

SEQ ID NO: 53484 - protein, 212 aa, Homo sapiens
  DOMAIN (42)..(147): PX domain identified by PFam, accession name PX, E-value=1.4e -08, PFam score of 41.9
PSNRREFGESWPETQAPGALRPLLPAPGTPRARERPAGWPARPMEVYIPSFRYEESDLERGYTVFKIEVLMNGRKHFVEKRYSEFHALHKKLKKCIKTPEIPSKHVRNWVPKVLEQRRQGLETYLQAVILENEELPKLFLDFLNVRHLPSLPKAESCGSFDETESEESSKLSHQPVLLFLRDPYVLPAASDFPNVVIEGVLHGIFYPHLQPR

SEQ ID NO: 53485 - protein, 88 aa, Homo sapiens
AGNRLRFQLELEFVQCLANPNYLNWYPQCLHMLELLQYEHFRKELVNAQCAKFIDEQQILHWQHYSRKRMRLQQALAKQQQQNNTSGK

SEQ ID NO: 53486 - protein, 329 aa, Homo sapiens
MIGPPGSWLAGWQLEAFLSWLRALAPWWPLGSSISSGRFFVLAGGRLGRGVGLSAQCRDVSTLRDEALTWREVVSVRCEEDSTCREDASRMRGSRFPEGEREGPSLRRWEVSTRRDDVSTRQKRGKLRYCHSRERHNTMTWKHHGPSKAKTLDSCPSGAPTARAPPPRYFGASAGGAIPGLVGDGRSRPAPYPTVPRDRKREPWFPELRPRLWAFALSGWWRFGVFVCYGRCCRYGDRGYFKDKAFVNYLKYLLYWKDPEYAKYLKYPQCLHMLELLQYEHFRKELVNAQCAKFIDEQQILHWQHYSRKRMRLQQALAEQQQQNNTSGK

SEQ ID NO: 53487 - protein, 161 aa, Homo sapiens
RGFRNFARVSGLLLCQAGGVLVSSFVMAAAVAMETDDAGNRLRFQLELEFVQCYANHNTLIFLPQRGYFKDKAFVNYLKYLLYWKDPEYAKYLKYPQCLHMLGAAPNMEHFRKEAGWNAQCAKFIGWNRQVSTLGKHYSRKRMRLQQALAEQQQQNNTSGK

SEQ ID NO: 53488 - protein, 94 aa, Homo sapiens
  misc_feature (1)...(94): Xaa = X or * as defined in Table 2
HEGQVHVLLASAHVDVAIVLGAGSMVEGEARPEQAAQHHQGIAPLHLDAPGPSWTQSRSPRNRANQNHTCSEATXSHPEQLPQTLWECHAPRSP

SEQ ID NO: 53489 - protein, 146 aa, Homo sapiens
MVQIKEETRLVSVIDQIDKAVAIIPRGALFKTPFGPTHVNRTFEGLSLSEAKKLSSYFHFREPVELKNKTLLEMADLDPSLDFMDSLEHDIPKGSWSIQMESGNALVVVRSLLWPGLTFYHAPRTKNYGYVYVGTGEKNMDLPFML

SEQ ID NO: 53490 - protein, 57 aa, Homo sapiens
HGQRFLHGPVHHHSHYDNPHHSLHHHRCLHHCHLHHHRHHLHHHPLHCYHHHPGQNG

SEQ ID NO: 53491 - protein, 134 aa, Homo sapiens
GSTHASGSPPGEIVSLGILSEGQFGIPKGIVFSMPVKFENGTWVVLTDLKDVEISEQIMTRMTSDLIQEKLVALGDKIHFQPYQSGHKDLVPDEEKNLAMSDAAEFPNQIPQTTFEKPQSLEFLNDFEGKAVES

SEQ ID NO: 53492 - protein, 1346 aa, Homo sapiens
  DOMAIN (669)..(686): Zinc finger present in dystrophin CBP/p300. domain identified by eMATRIX, accession number PF00569, p-value=9.419e-17, raw score of 13.42
  DOMAIN (657)..(696): Zinc finger present in dystrophin, CBP/p300 domain identified by PFam, accession name ZZ, E-value=0.00038, PFam score of 27.2
LYLTTSRREEHLKSLVVETQDLASPVLRSVSICTKVEEAFRQAHVIVVLDDSTNKEVFTLEDCLRSRVPLCRLYGYLIEKNAHESVRVIVGGRTFVNLKTVLLMRYAPRIAHNIIAVALGVEGEAKAILARKLKTAPSYIKDVIIWGNISGNNYVDLRKTRVYRYESAIWGPLHYSRPVLNLIFDSEWVKREFVAILKNLTTTGRQFGGILAAHSIATTLKYWYHGSPPGEIVSLGILSEGQFGIPKGIVFSMPVKFENGTWVVLTDLKDVEISEQIMTRMTSDLIQGPQPKECDHREQELDGKSNGALRRAGHMAIAPQHTGLLMIKLSEIRNCDSDQEAQAKFPAPYPLNQLCDSLITHNQIEKLDQRTQPRTHHLSNRIHVALKSYFQTDILSFLMLQTKSCSDMLQQSSEICEMDPDKQDALNSIENSIYRTAFKLQSVQTLCQLDLIDSSLIQQVLLRPSFWEARKHSLSVQQLSQALQELFQKAREENPGQVHPRAPELTLSLLTTMYNSHKETVTSKQVLFKDTLQVFNLKIVPPTCLALFQLYAENSRGGYDSGPRMTRRVLRKLLTDLQQIPTFVGESRALCPVESATRSCFQGVLSPAIKEEKFLSWVQSEPPILLWLPTCHRLSAAERVTHPARCTLCRTFPITGLSDVSCASILTGRYRCLKCLNFDICQMCFLSGLHSKSHQKSHPVIEHCIQQMSAMQNTKLLFRTLRNNLLQGRCRKKEAARRQQLLDQVNPKGVPHHAQARSVGCCGEFKTGTSLDIKMEEQIVSHAGEMLSSVVVVSCKDSVPHQVVSLTMEGIAIPQLSAKSVGSFEAFYNSIKPIQIINSAIERMKPGKFPYGKTNLFRISSVYIQYTLRCDMRQSLLTKDLTKAGEFTIHSAPQEGKLTPSPVDFTIIPATLQNIKERALLPRFLIREHPNSMNCVIVQLLTGELVVKRHGAATRLFTCRMLKTNFKVEFEATIDMRLHANHLVTENFLLQLCRTQPRRREAQKTGVALWISCWNLGYINEEKETRISALGCSCATMFLKWPAPLQIICRDGRRLQIVATAVYKWSVMKSNLSFRCVGAKGWNMVPQEPGPDWVRLLKKQLNQYKDKLQAIYTSQEERICRFETRIHKLKTNQDSLWTKLQQIRRDLQARLQPPGPSSSSFQNVGNKVDHSSTEKVPKGGDYLQIKNATEDASTGEPLPKLDEVDRSHRSHTNAEHALRNPESPETTLHSTRAQSQTQKMPQKVISALPSYQEGLKQDIPKMVPAEMSSPALAAVEKKEAGNIKERKDELEEEELQELLSKLMDAFNLETPSGPESSVNMDLYSGAQRVCRAFSALVDQIALPNLK

SEQ ID NO: 53493 - protein, 78 aa, Homo sapiens
SAFGLLLAWFRFLAAKQAKNVALDCGGVSRLVIFVSWRNPQVAPTSAHQNRPSRNPVSRPPNTQRVARRKHYALADGY

SEQ ID NO: 53494 - protein, 274 aa, Homo sapiens
  misc_feature (1)...(274): Xaa = X or * as defined in Table 2
VLLACFWPGSDFWPRSRRKTYGTAPQSCYSFYVALDCGGVSRLVIFVSWRNPQVAPTSAHQNRPSRNPVSRPPNTQRVARRKHYALADGYTERRWTNAPCRAESSFPPNCPSAAPIPDSYDKXPSRATLFTSHLTVEAFPVWSYLYPGETPRLHPRAHTRTVPAAIRYPDRQTPNGLRGANTMHSQMDTLNGDGRTHLAGQRARSPRTARPQRQYRIHTTSDLPGLVRKYASGCCLRIWYCCAWIERALSLQVGGGVFGDPLSEGQAECDHGST

SEQ ID NO: 53495 - protein, 1038 aa, Homo sapiens
  DOMAIN (722)..(733): LACI BACTERIAL REGULATORY PROTEIN HTH SIGNATURE domain identified by eMATRIX, accession number PR00036B, p-value=7.375e- 12, raw score of 10.57
  DOMAIN (767)..(1000): Periplasmic binding proteins and suga domain identified by PFam, accession name Peripla_BP_like, E-value=1.4e-05, PFam score of 3.5
MLQQDSNDDTKDVSLFDAEEETTNRPRKVKIRHPVASFFHLFFRVSAIIVCLLCELLSSSFITCMSKKWLAVVIVGVVLQGANLYGYLRCKGQEVRETFAEPSLQATQMKLKRARLADDLNEKIAQRPGPMELVEKNILPVDSSVKEAIIGKTLKIYYLGAPAEAATKEDERTTSGPGHHATNYHFLLKFDFYLSWLHFVHKDAILSGHPLVRLLSTRVLRGPNDVFHGVSSVDSVLAIFVLAEPMGSLSASLENQLEAFLDGTLPSANEIPPLQSSSEDREPFSLIEDLQNDLLSHSGMLDHSHSPMETSETQFAAGFRLLRSQNRKPGQKQPKGTLEQTSEYPGNRGIPIIRQSLVFRVSVTGTTVNFCDASTNHNRVFKVLQALPLDSLHNVLVFLSMPVVAFSVINIVLTLSSFLWLNRPLACLFILARLHQYFIMTYGIVIDRSMIANIIDTTPAESYALMTPPMSSTLGFSGVLAALIACWIQIKPATSRLRSVLFRGANILVSVLLILLVAALFYKDYASLFRNNKELVKSLSPSNSIVASWSWYSHQRLANLPLVRIGEDAHRNPLMQNEQRKNLTILMVGATSRAENFSLNGYPRETNPRLAKDNVVYFPNTASCGTATAVSVPCMFSDMPREHYKEELAQHQEGVARISFSERASTVLWNDNDGGCKGACDRVGCLNLVYIGEACNDHLAKKPPKGQREKHLPGATTEYAGVSYQTVSRVVNQASHVSAKTREKVEAAMAELNYIPNRVAQQLAGKQSLLIGVATSSLALHAPSQIVAAIKSRADQLGASVVVSMVERSGVEACKAAVHNLLAQRVSGLIINYPLDDQDAIAVEAACTNVPALFLDVSDQTPINSIIFSHEDGTRLGVEHLVALGHQQIALLAGPLSSVSARLRLAGWHKYLTRNQIQPIAEREGDWSAMSGFQQTMQMLNEGIVPTAMLVAHFRLRVCAVVTSPSLSPSLAPVPSVAAAVLLVSLSPVKTKPVVEHKYAGGQCLVHIQALMNEDTEKHQVHYSTPKCGRHAQWSDAY

SEQ ID NO: 53496 - protein, 132 aa, Homo sapiens
  misc_feature (1)...(132): Xaa = X or * as defined in Table 2
TSSLSLSGKSGRYIVFLRRSVGIQSPSAVATVRLLLAGSDRRFAAGSAGCAVLSRAERSXEPGCCYRIRRSAFRLRAGSIGNRDKPVAWPDTGSGDNTEVYFRAHQAGILPDTVLAGPAQRVAVSGGTPVDW

SEQ ID NO: 53497 - protein, 62 aa, Homo sapiens
GNRAGALPGATLLILAGFLPSAHQNRPSRNPVSRPPNTQRVARRKHYALADGYTERRWTNAP

SEQ ID NO: 53498 - protein, 185 aa, Homo sapiens
  misc_feature (1)...(185): Xaa = X or * as defined in Table 2
MPDLVEGREKSDKGAQPQPRTQSRSARTNGSGVRILHSLWRIIGIPLLLGYSLVCSRVLLACFWPGSDFWPRSRRKTYGTAPQSCYSFYVALDCGGVSRLVIFVSWRNPQVAPTSAHQNRPSRNPVSRPPNTQRVARRKHYALADGYTERRWTDAPCRAESSFPPNCPLXRQYRIHIVDASVCGP

SEQ ID NO: 53499 - protein, 157 aa, Homo sapiens
PESFSCIAAERFLARRRKKKSEVTSRPKQARAWRPVLKLASDGKARLAVCCRRWSRDLALSPGRPPAPVPGIRSPRMSESFFLGLFGHSWPVATERTFFPARVSPPAGDSGLLSRDAGTPVACEASFIFIAPSSPCRIIPGSGRNEGLLLLASTGTS

SEQ ID NO: 53500 - protein, 212 aa, Homo sapiens
LSVVRSRIHMGVGVGVGCPVRYRNQDDHELQITHGNKILCGIVCDKGAQPQPRTQSRSARTNGSGVRILHSLWRIIGIPLLLGYSLVCSRVLLACFWPGSDFWPRSRRKTYGTVPQSCYSFYVALDCGGVSRLVIFVSWRNPQVAPTSAHQNRPRRNPVSRPPNTQRVARRKHYAPADGYTERRWTIAPCRAESSFPPNCPSAAPIPDSYDK

SEQ ID NO: 53501 - protein, 1003 aa, Homo sapiens
  DOMAIN (69)..(118): Sodium:galactoside symporter family proteins domain identified by eMATRIX, accession number BL00872A, p-value=2.800e- 39, raw score of 30.73
  DOMAIN (324)..(354): Phosphoribulokinase domain identified by PFam, accession name PRK, E-value=0.0089, PFam score of 13.2
  misc_feature (1)...(1003): Xaa = X or * as defined in Table 2
MVYKMRYRSQHPYSIKEKQMKSEVLSVKEKIGYGMGDAASHIIFDNVMLYMMFFYTDIFGIPAGFVGTMFLVARALDAISDPCMGLLADRTRSRWGKFRPWVLFGALPFGIVCVLAYSTPDLSMNGKMIYAAITYTLLTLLYTVVNIPYCALGGVITNDPTQRISLQSWRFVLATAGGMLSTVLMMPLVNLIGGDNKPLGFQGDLSPMFSTPEEIARPGPYENDVHVVGASSLAAGHKTLIPELVRSAEQHMGTRRYLRGRRVAVIPPTGLRLPARARQWRRFMVQHTRPGHDAGGKASPRHQALSTQLLDAIMPYCGNTLRLGVTGTPGAGKSTFLEAFGMLLIREGLKVAVIAVDPSSPVTGGSILGDKTRMNDLARAEAAFIRPVPSSGHLGGASQRARELMLLCEAAGYDVVIVETVGVGQSETEVARMVDCFISLQIAGGGDDLQGIKKGLMEVADLIVINKDDGDNHTNVAIARHMSRVPCIFCDDRLCIVFLETLRSTCFLEPLWPICCPRTAMATLGPRNRYGFDPLAVSSGTRSCSLGVPRAHRFALAGSRDPGYTHKRVLAIFQAFNAFPEPPANTPEDPAGLSLLPSGHTSAREPGLCLPINSLCPIVQSLWPSSLRSTQPLTPLPSCPSQAHHPGSVAPCGAAWYPAGHTHRKLPGVFSQRPRSHGGGTRWHSSTSVGTDQAAGTGADSPGRSDARRQGSAGKRAAGPSLGQSQDGDPARTSRQQGHSAAAGNRGRAGFGQRHRAERQQLWGPSSREGGVGAREEQEQFGDRGSGVAGLESGSRSGDWLPQFAGQWPRLREAVSQRRAHAAHGRTAAACGYCTHFGGLSEYLCYWGIRWFVLECFWPAFGLVPIFGRRSRRKTYGTVPQSCXLFLRRTXRGGVSRLVIFVSWRNPQVAPTSAHQNRPSRNPVSRPPNTQRVARRKHYALADGYTERRWTNAPCRAESSFPPNCPSGAPIPDSYDKXPSRSGVLIKACLRARAPTRYPVYRT

SEQ ID NO: 53502 - protein, 196 aa, Homo sapiens
  misc_feature (1)...(196): Xaa = X or * as defined in Table 2
ILHAPAPPFSASASHEQPEWSDKGAQPQPRTQSRSARTNGSGVRILHSLWRIIGIPLLLGYSLVCSRVLLACFWPGSDFWPRSRRKTYGTAPQSCYSFYVALDCGGVSRLVIFVSWRNPQVAPTSAHQNRPSRNPVSRPPNTQRVARRKHYALADGYTERRWTNAPCRAESSFPPNCPFAAPIPDSYDKXPFRIVS

SEQ ID NO: 53503 - protein, 200 aa, Homo sapiens
RASVQQKKLSTDDKGAQPQPRTQSRSARTNGSGVRILHSLWRIIGIPLLLGYSLVCSRVLLACFWPGSDFWPRSRRKTYGTAPQSCYSFYVALDCGGVSRRSYLYPGETPRVAPTSAHQNRPSRKPGTRPPNTQRVARRKHYALADGYTERSATNAPCRAESSFPPELPVPQVPNTGFIRQVTFRDCFVNTPQAAASGFW

SEQ ID NO: 53504 - protein, 176 aa, Homo sapiens
QRYSDNPPNDKGAQPQPRTQSRSARTNGSGVRILHSLWRIIGIPLLLGYSLVCSRVLLACFWPGSDFWPRSRRKTYGTAPQSCYSFYVALDCGGVSRLVIFVSWRNPQVAPTSAHQNRPSRNPVSRPPNTQRVARRKHYALADGYTERRWTNAPCRAVEPFPPNCPWEAQYRIIRK

SEQ ID NO: 53505 - protein, 157 aa, Homo sapiens
LKQKRDKEDRSSRVSAVLLIKHRRPLPLPIGLKACHCSCTAKCLGGCESPRKGGQLLIFEGHVKIDLEIFTKSLWLTRQLIVKKETEKAVKHASNICIMRTGLTFQSHKIEDGLFGLLVIATEAEWSYVCQSTNPVDVYPLTAVPACCIISASDVPR

SEQ ID NO: 53506 - protein, 152 aa, Homo sapiens
  DOMAIN (115)..(127): Signal peptidases I serine proteins domain identified by eMATRIX, accession number BL00501C, p-value=8.688e-10, raw score of 9.61
  DOMAIN (27)..(128): Signal peptidase I domain identified by PFam, accession name Peptidase_S26, E-value=2.3e-07, PFam score of 27.2
  misc_feature (1)...(152): Xaa = X or * as defined in Table 2
CVNSQIGRGHKITTYPFSPRKSGRKGMAQSQGWVKRYIKAFCKGFFVAVPVAVTFLDRVACVARVEGASMQPSLNPGGSQSSDVVLLNHWKVRNFEVHRGDIVSLVSAKNPEQKIIKRVIALEGDIVRFPXDFCMPMPHISCGPQSAGRNWN

SEQ ID NO: 53507 - protein, 158 aa, Homo sapiens
  DOMAIN (60)..(80): BACTERIAL LEADER PEPTIDASE 1 (S26) FAMILY SIGNATURE domain identified by eMATRIX, accession number PR00727C, p-value=9.250e- 16, raw score of 13.04
MDATSSSFWKPAILLNIVKWTEAPPNYCLAQNVHNVKVGNLRYRACKPKTIGHKNRYVKVPRGHIWVEGDHHGHSFDSNSFGPISSISVDGTIHPVTQDKKLGGILGVSLFIALNCLWNWQIIDVEKCFSDEYTSQRTLGIQRLLFYHTVGSAMAVIF

SEQ ID NO: 53508 - protein, 197 aa, Homo sapiens
  DOMAIN (85)..(101): Signal peptidases I serine proteins domain identified by eMATRIX, accession number BL00501B, p-value=3.200e-09, raw score of 12.58
  DOMAIN (15)..(111): Signal peptidase I domain identified by PFam, accession name Peptidase_S26, E-value=2.9e-08, PFam score of 30.2
PLTPFSPRKSGRKGMAQSQGWVKRYIKAFCKGFFVAVPVAVTLLDRVACVARVEGASMQPSLNPGGEPVASDVVLLNHWKVTEFSEVHRGDIVFIGAPKNPEQKIIKRVICSLKGDIFQNHRTQKPDVKVPRGSHLGLEGDHSWDTVFDSNSFGPVSLGLLHAHATHILWPPERWQKLESVLPPERLPGTERRGMTA

SEQ ID NO: 53509 - protein, 188 aa, Homo sapiens
  DOMAIN (80)..(101): RNA polymerases L / 13 to 16 Kd subunits proteins domain identified by eMATRIX, accession number BL01154A, p-value=3.323e- 12, raw score of 18.70
  DOMAIN (64)..(167): RNA polymerases L / 13 to 16 kDa subunit domain identified by PFam, accession name RNA_pol_L, E-value=0.0013, PFam score of 3.2
NKYRLQPSPPRLALWDRASDPPAPPEDPETAPAMEEDQELERKISGLKTSMVEGERKTTLELVQAAGTDRPCVTFVLHEEDHTLGNFLRYMIMKNPEKVEFCGYTYGHPSFQRAKLNLPHSRFRGYPFPAVEPISREALNELMNVCQPCAFTSFRASIKDYKESKSKQEMESTFLVLLWQFYKGGTVL

SEQ ID NO: 53510 - protein, 70 aa, Homo sapiens
  DOMAIN (10)..(65): kw TRANSCRIPTASE REVERSE II ORF2 domain identified by eMATRIX, accession number DM01354Q, p-value=1.000e-40, raw score of 9.23
  misc_feature (1)...(70): Xaa = X or * as defined in Table 2
MNIDAKNLNKILAKRIQQHIKKLIHHDQVGFIPGMQGWFNIRKSINVIQHIXKAKDKXHMIISIGCRKSL

SEQ ID NO: 53511 - protein, 60 aa, Homo sapiens; identical to SEQ ID NO: 37268

SEQ ID NO: 53512 - protein, 1014 aa, Homo sapiens; identical to SEQ ID NO: 37215
  DOMAIN (380)..(421): kw TRANSCRIPTASE REVERSE II ORF2 domain identified by eMATRIX, accession number DM01354I, p-value=1.000e-40, raw score of 15.55
  DOMAIN (626)..(901): Reverse transcriptase domain identified by PFam, accession name rvt, E-value=1.1e-83, PFam score of 291.4

SEQ ID NO: 53513 - protein, 1052 aa, Homo sapiens
  DOMAIN (406)..(447): kw TRANSCRIPTASE REVERSE II ORF2 domain identified by eMATRIX, accession number DM01354I, p-value=1.000e-40, raw score of 15.55
  DOMAIN (652)..(927): Reverse transcriptase domain identified by PFam, accession name rvt, E-value=3.2e-82, PFam score of 286.6
MGKKQSRKTGNSKKQSTSPPPKDRSSSPAMEQRWTENDFDELREEGFRRSNYELQEEIQTKGKEVKNFEKNLDECITRITNREKCLKELMKLKAKPRELCEECRSLRSQCDQVEERVSVMENEMNEMKRERKFREKRIKRNEQRLQEIWDYVKRPNLRLIGVPKSDGENGTKLENTLQDIIQENFPNLARQANIQIQEIQRTPQRYSSRRATPRHIIVRFTKVKMKEKMLRAAREKDFKPTTIKRDKEGHYIMVKGSIQQEELTILNIYAPNTGAPRFIKQVLSDLQRDLDSHTLIMGDFNTPLSTLDRSTRQKVNKDTQELNSALHQADLIDIYRTLHPKSTEYTFFSAPHHTYSKIDHILGSKALLSKCKRTEIITNYLSDHSAIKPELRIKKLTQNCSTTWKLNNLLLNDYWVHNEMKAEIKMFFETNENKDTTYQNLWDTFKAVCRGKFIALNAHKRKQERSKIDTLTSQLKELEKQEQTHSKASRRQEITKIRAELKEIETQKTLQKINDSRSWFFEKINKIDRPLARPKKKKREKNQIDAIKIDKGDITTNPTEIQTTIREYYKRLYANKLANLEEMDKFFDTYTLPRLNQEEVESLNRPKTGAEIVAIINSVPTKKSPGPDGFTAKFYQSYKEELVPFLLKLFQSIEKERILPNSFYEDSIILIPKPGRDTTKKENFRPISLMNIDAKILNKILANQIQQHIKKLIHHDQVGFIPGMQGWSTIHKSINVIQHINRTKDKKHMIISIDAEKAFDKIQQPFMLKTLNKLGIDGTYLKIISAIYDKPTANIILNGQKLEALPLKTGTRQGCPLSPLLFNIVLEVLARAIRQEKEIKGIQLGKEEVKLSLFADDMIVYLENPIVSVQNLHKLISNFSKVSGYKINVQKSQAFLYTNNRETENQIMSELPFTIASKRIKYLGIHLTRDVKDLFKENYKPLLNEIKEDTNKWKNIPCSWVGRINIVKMAILPKVIYRFNAIPIKLPMTFFTELEKTTLKFIWNQKRAHIAKSILSQKNKAGGIMLPDFKLYHKATVTKTAWYWYQNRDIDQ

SEQ ID NO: 53514 - protein, 519 aa, Homo sapiens
  DOMAIN (394)..(421): CYTIDINE DEAMINASE HYDROLASE ZINC AMINOHY domain identified by eMATRIX, accession number PD02269B, p-value=5.390e-09, raw score of 18.48
  DOMAIN (378)..(458): Cytidine and deoxycytidylate deaminase domain identified by PFam, accession name dCMP_cyt_deam, E-value=2e-05, PFam score of 31.4
  misc_feature (1)...(519): Xaa = X or * as defined in Table 2
QQRRXMCQNLMTHQNQRSGRSQNDFXRRRKNISERSAVYRXRQLYIRRQPYAERPSHVEDKGHKYLVFEANTGTENGYQGEESLFNKAYYGGGTNFFRKESQKLQQSAKKRDAELANGALGIIELNNDYTLKKVMKPLITSNTVTDEIERANVFKMNGKWYLFTDSRGSKMTIDGINSNDIYMLGYVSNSLTGPYKPLNKTGLVLQMGLDPNDVTFTYSHFAVPQAKGNNVVITSYMTNRGFFEDKKATFAPSFLMNIKGNKTSVVKNSILEQGQLTWLQVAKRAGLGGGQSGRTVLRERVRIEIASTHIALAVECVSVRVWKVPRLPSRQKYAKHASQLVSNQKSEEEEYMKTFNISQQDLELVEVATEKITMLYEDNKHHVGAAIRTKTGEIISAVHIEAYIGRVTVCAEAIAIGSAVSNGQKDFDTIVAVRHPYSDEVDRSIRVIPTYGTDEWEQWWNAFNEENLFCSEEMPSSDDEATADSQHSTPPKKKRKYIYVLVIAITMVMRFWQYINGRG

SEQ ID NO: 53515 - protein, 52 aa, Homo sapiens
ISFELIPSIVIFEPRESVNKYHLPFILKTFARSISSVTVFEVISGFITFFNV

SEQ ID NO: 53516 - protein, 200 aa, Homo sapiens
  misc_feature (1)...(200): Xaa = X or * as defined in Table 2
QQRRXMCQNLMTHQNQRSGRSQNDFXRRRKNISERSAVYRXRQLYIRRQPYAERPSHVEDKGHKYLVFEANTGTENGYQGEESLFNKAYYGGGTNFFRKESQKLQQSAKKRDAELANGALGIIELNNDYTSEKSNEAADHFKHVPQAKGNNVVITSYMTNRGFFEDKKATFAPSFLMNIKGNKTSVVKNSILEQGQLTVN

SEQ ID NO: 53517 - protein, 1206 aa, Homo sapiens; identical to SEQ ID NO: 48807
  DOMAIN (154)..(195): kw TRANSCRIPTASE REVERSE II ORF2 domain identified by eMATRIX, accession number DM01354I, p-value=1.000e-40, raw score of 15.55
  DOMAIN (400)..(675): Reverse transcriptase domain identified by PFam, accession name rvt, E-value=8.7e-88, PFam score of 305.1

SEQ ID NO: 53518 - protein, 210 aa, Homo sapiens; identical to SEQ ID NO: 43848
  misc_feature (1)...(210): Xaa = X or * as defined in Table 2

SEQ ID NO: 53519 - protein, 852 aa, Homo sapiens
  DOMAIN (194)..(235): kw TRANSCRIPTASE REVERSE II ORF2 domain identified by eMATRIX, accession number DM01354I, p-value=1.000e-40, raw score of 15.55
  DOMAIN (442)..(665): Reverse transcriptase domain identified by PFam, accession name rvt, E-value=2.6e-48, PFam score of 173.9
WRKIYQANGKTKKAGVAILVSDKTDFKPTKIKRDKEGHYIMVKGSIQQEELTILNIYAPNTGAPRFIKQVLSDLQRDLDSYTIIMGDFNTPLSTLDRSMRQKVNKNTQELNSALHQADLIDIYRTLHPKSTECTFFSAPHHMYSKIDHIVGCKALLSKFKRTEIITNCLSDHSAIKLELRIKKLTQNCSTTWKLNNLLLNDYWVHNEMKAEIKMFFETNENKDTTYQNLWDTFKAVCRGKFIALNAHKRKQERSKIDTLTSQLKELEKQEQTHSKASRRQEITKVRAELKEIETQKTLQKINEFRSWFFERINTIDRPLARLIKKKREKNQIDAIKNDKGDITTDPTETQTTIREYYKHLYANKLENLEEMDKFLDTYTLPRLNQEEVESLNRPITGSGIVAIINSLPTKKSPGPDGFTAEFYQRYKEELVPFLLKLFQSIEEEGILPNSFYEASIILIPKLGRDIAKKENFRPISLMNIDAKILNKILAHRIQQHIKKLIHHDQVGFIPGMQGWFDIRKSINVIQHINRTKDKNHMIISIDAEKAFDKIQQPFMLKTLNKLVLEVLVRAIRQEKEIKCIQLGKEEVKLSLFADDMIVYVENPIVSAQNLLKLISNFSKVSGYKINVQKSQAFLYTNNRQTESQIMSELPFTIASKSIKYLGIQLTRHVKDLFKDNYKPALNEIKEDTNKWKNIPCSWIGRINIVKELEKTTLNFIWNQKRARIAKSILSQTNKAGGIMLPDFKLYYKATVTQTACVCKAHLSDYPVTSLNKILAKSCPSMTSPPSSATARKAERGEEVAEEKLEASRGWFLRFMERSHFHNIKAQGKAASVVVETAASYQEDLAKTTDEGH

SEQ ID NO: 53520 - protein, 1029 aa, Homo sapiens; identical to SEQ ID NO: 37415
  DOMAIN (514)..(539): 7 kw REVERSE TRANSCRIPTASE RNA POLYMERASE domain identified by eMATRIX, accession number DM00895E, p-value=4.103e-10, raw score of 15.72
  DOMAIN (485)..(760): Reverse transcriptase domain identified by PFam, accession name rvt, E-value=1.1e-82, PFam score of 288.2

SEQ ID NO: 53521 - protein, 247 aa, Homo sapiens
  misc_feature (1)...(247): Xaa = X or * as defined in Table 2
MLGKKKPVCEVGGDSGVPKKEFQEGRQVLFKLWRGQANKVGDNSIDSWKNAGRVFKDSDKFDANDPILKDQTQEWSGSATFTSDGKIRLFYTDYSGKHYGKQSLTTAQVKVSKSVXHTQNQRSGRSQNDFXRRRKNISXRSAVYRXRQLYIRRQPYAERPSHVEDKGHKYLVFEANTGTENGYQGEESLFNKAYYGGGTNFFRKESQKLQQSAKKRDAELANGALGIIELNNDYTLKKVVKPLITSN

SEQ ID NO: 53522 - protein, 279 aa, Homo sapiens
  misc_feature (1)...(279): Xaa = X or * as defined in Table 2
QQRRXMCQNLMTHQNQPSGRSQNDFXRRRKNISERSAVYRXRQLYIRRQPYAERPSHVEDKGHKYLVFEANTGTENGYQGEESLFNKAYYGGGTNFFRKESQKLQQSAKKRDAELANGALGIIELNNDYTLKKVMKPLITSNTVTDEIERANVFKMNGKWYLFTDSRGSKMTIDGINSNDIYMLGYVSNSLTGPYKPLNKTGLVLQMGLDPNDVTFTYSHFAVPQAKGNNVVITSYMTNRGFFEDKKATFAPSFLMNIKGNKTSVVKNSILEPGQLAVN

SEQ ID NO: 53523 - protein, 1056 aa, Homo sapiens; identical to SEQ ID NO: 34350
  DOMAIN (316)..(361): kw TRANSCRIPTASE REVERSE II ORF2 domain identified by eMATRIX, accession number DM01354N, p-value=1.000e-40, raw score of 13.17
  DOMAIN (400)..(675): Reverse transcriptase domain identified by PFam, accession name rvt, E-value=2.4e-85, PFam score of 297.0
  misc_feature (1)...(1056): Xaa = X or * as defined in Table 2

SEQ ID NO: 53524 - protein, 1085 aa, Homo sapiens; identical to SEQ ID NO: 45261
  DOMAIN (154)..(195): kw TRANSCRIPTASE REVERSE II ORF2 domain identified by eMATRIX, accession number DM01354I, p-value=1.000e-40, raw score of 15.55
  DOMAIN (400)..(675): Reverse transcriptase domain identified by PFam, accession name rvt, E-value=3.6e-89, PFam score of 309.6

SEQ ID NO: 53525 - protein, 1308 aa, Homo sapiens; identical to SEQ ID NO: 47991
  DOMAIN (110)..(151): kw TRANSCRIPTASE REVERSE II ORF2 domain identified by eMATRIX, accession number DM01354I, p-value=1.000e-40, raw score of 15.55
  DOMAIN (356)..(631): Reverse transcriptase domain identified by PFam, accession name rvt, E-value=1.8e-86, PFam score of 300.7

SEQ ID NO: 53526 - protein, 1046 aa, Homo sapiens; identical to SEQ ID NO: 47545
  DOMAIN (272)..(317): kw TRANSCRIPTASE REVERSE II ORF2 domain identified by eMATRIX, accession number DM01354N, p-value=1.000e-40, raw score of 13.17
  DOMAIN (356)..(631): Reverse transcriptase domain identified by PFam, accession name rvt, E-value=5.8e-89, PFam score of 309.0

SEQ ID NO: 53527 - protein, 1070 aa, Homo sapiens; identical to SEQ ID NO: 36416
  DOMAIN (154)..(195): kw TRANSCRIPTASE REVERSE II ORF2 domain identified by eMATRIX, accession number DM01354I, p-value=1.000e-40, raw score of 15.55
  DOMAIN (400)..(594): Reverse transcriptase domain identified by PFam, accession name rvt, E-value=8.6e-35, PFam score of 129.0

SEQ ID NO: 53528 - protein, 1043 aa, Homo sapiens; identical to SEQ ID NO: 45120
  DOMAIN (272)..(317): kw TRANSCRIPTASE REVERSE II ORF2 domain identified by eMATRIX, accession number DM01354N, p-value=1.000e-40, raw score of 13.17
  DOMAIN (356)..(631): Reverse transcriptase domain identified by PFam, accession name rvt, E-value=7.2e-87, PFam score of 302.0
  misc_feature (1)...(1043): Xaa = X or * as defined in Table 2

SEQ ID NO: 53529 - protein, 1108 aa, Homo sapiens; identical to SEQ ID NO: 40447
  DOMAIN (272)..(317): kw TRANSCRIPTASE REVERSE II ORF2 domain identified by eMATRIX, accession number DM01354N, p-value=1.000e-40, raw score of 13.17
  DOMAIN (356)..(631): Reverse transcriptase domain identified by PFam, accession name rvt, E-value=2.6e-81, PFam score of 283.5

SEQ ID NO: 53530 - protein, 1048 aa, Homo sapiens; identical to SEQ ID NO: 47549
  DOMAIN (110)..(151): kw TRANSCRIPTASE REVERSE II ORF2 domain identified by eMATRIX, accession number DM01354I, p-value=1.000e-40, raw score of 15.55
  DOMAIN (356)..(631): Reverse transcriptase domain identified by PFam, accession name rvt, E-value=2.7e-88, PFam score of 306.8

SEQ ID NO: 53531 - protein, 210 aa, Homo sapiens; identical to SEQ ID NO: 43848
  misc_feature (1)...(210): Xaa = X or * as defined in Table 2

SEQ ID NO: 53532 - protein, 1117 aa, Homo sapiens; identical to SEQ ID NO: 45269
  DOMAIN (154)..(195): kw TRANSCRIPTASE REVERSE II ORF2 domain identified by eMATRIX, accession number DM01354I, p-value=1.000e-40, raw score of 15.55
  DOMAIN (400)..(675): Reverse transcriptase domain identified by PFam, accession name rvt, E-value=5.1e-89, PFam score of 309.1

SEQ ID NO: 53533 - protein, 279 aa, Homo sapiens
  misc_feature (1)...(279): Xaa = X or * as defined in Table 2
QQRRXMCQNLMTHQNQRSGRSQNDFXRRRKNISERSAVYRXRQLYIRRQPYAERPSHVEDKGHKYLVFEANTGTENGYQGEESLFNKAYYGGGTNFFRKESQKLQQSAKKRDAELANGALGIIELNNDYTLKKVMKPLITSNTVTDEIERANVFKMNGKWYLFTDSRGSKMTIDGINSNDIYMLGYVSNSLTGPYKPLNKTGLVLQMGLDPNDVTFTYSHFAVPQAKGNNVVITSYMTNRGFFEDKKATFAPSFLMNIKGNKTSVVKNSILEQGQLTVN

SEQ ID NO: 53534 - protein, 109 aa, Homo sapiens
  misc_feature (1)...(109): Xaa = X or * as defined in Table 2
YVHCKPSGWTVRTFDKPRKRFIAFFIAGILFRAIKNHFLPRETLQCLPYILTGFRRGQSEYFSIFSNMDLADTVMFLXGAIRFSDLVNEQIQHTFLIPGETICRLSEVV

SEQ ID NO: 53535 - protein, 1084 aa, Homo sapiens; identical to SEQ ID NO: 44902
  DOMAIN (110)..(151): kw TRANSCRIPTASE REVERSE II ORF2 domain identified by eMATRIX, accession number DM01354I, p-value=1.000e-40, raw score of 15.55
  DOMAIN (356)..(631): Reverse transcriptase domain identified by PFam, accession name rvt, E-value=2.3e-81, PFam score of 283.7

SEQ ID NO: 53536 - protein, 1031 aa, Homo sapiens; identical to SEQ ID NO: 45111
  DOMAIN (110)..(151): kw TRANSCRIPTASE REVERSE II ORF2 domain identified by eMATRIX, accession number DM01354I, p-value=1.000e-40, raw score of 15.55
  DOMAIN (356)..(631): Reverse transcriptase domain identified by PFam, accession name rvt, E-value=6.5e-79, PFam score of 275.6

SEQ ID NO: 53537 - protein, 892 aa, Homo sapiens; identical to SEQ ID NO: 48827
  DOMAIN (414)..(439): 7 kw REVERSE TRANSCRIPTASE RNA POLYMERASE domain identified by eMATRIX, accession number DM00895E, p-value=4.103e-10, raw score of 15.72
  DOMAIN (385)..(660): Reverse transcriptase domain identified by PFam, accession name rvt, E-value=1.1e-82, PFam score of 288.2

SEQ ID NO: 53538 - protein, 1111 aa, Homo sapiens; identical to SEQ ID NO: 36440
  DOMAIN (154)..(195): kw TRANSCRIPTASE REVERSE II ORF2 domain identified by eMATRIX, accession number DM01354I, p-value=1.000e-40, raw score of 15.55
  DOMAIN (400)..(675): Reverse transcriptase domain identified by PFam, accession name rvt, E-value=2.8e-88, PFam score of 306.7

SEQ ID NO: 53539 - protein, 765 aa, Homo sapiens; identical to SEQ ID NO: 48832
  DOMAIN (123)..(164): kw TRANSCRIPTASE REVERSE II ORF2 domain identified by eMATRIX, accession number DM01354I, p-value=1.000e-40, raw score of 15.55
  DOMAIN (369)..(644): Reverse transcriptase domain identified by PFam, accession name rvt, E-value=4.2e-89, PFam score of 309.4
  misc_feature (1)...(765): Xaa = X or * as defined in Table 2

SEQ ID NO: 53540 - protein, 1270 aa, Homo sapiens; identical to SEQ ID NO: 44884
  DOMAIN (154)..(195): kw TRANSCRIPTASE REVERSE II ORF2 domain identified by eMATRIX, accession number DM01354I, p-value=1.000e-40, raw score of 15.55
  DOMAIN (400)..(675): Reverse transcriptase domain identified by PFam, accession name rvt, E-value=1.1e-87, PFam score of 304.7

SEQ ID NO: 53541 - protein, 321 aa, Homo sapiens
  DOMAIN (8)..(35): Protamine P1 proteins domain identified by eMATRIX, accession number BL00048, p-value=7.395e-10, raw score of 6.39
  misc_feature (1)...(321): Xaa = X or * as defined in Table 2
CVGQLAAAKRXRNSSXIQRLSRCVCSCGKPERRXXHINLHVLSKGRRQLNQTAGKTRAVSLKTAISSTPTIRSXKIRRKNGPVLQPLHLTEKSVYSTLTIPTKAINTLYSKPTREQKTDTKAKNLYLTKRTTAAARTSSVKKARSFSRALKNAMLSXRTAPSVSXSXIMITHXKKXXSRCITSNTVTDEIERANVFKMNGKWYLFTDSRGSKMTIDGINSNDINMLGYVSNSLTGPYKPLNKTGLVLQMGLDPNDVTLTNSHFAVPQAKGNNVVITSYMTNRGFFEDKKATFAPSFLMNIKGNKTSVVKNSILEQGQLTVN

SEQ ID NO: 53542 - protein, 1513 aa, Homo sapiens; identical to SEQ ID NO: 47687
  DOMAIN (959)..(970): NEUROKININ RECEPTOR SIGNATURE domain identified by eMATRIX, accession number PR00244D, p-value=1.000e-13, raw score of 6.84
  DOMAIN (413)..(688): Reverse transcriptase domain identified by PFam, accession name rvt, E-value=3.2e-82, PFam score of 286.6

SEQ ID NO: 53543 - protein, 1076 aa, Homo sapiens; identical to SEQ ID NO: 45268
  DOMAIN (110)..(151): kw TRANSCRIPTASE REVERSE II ORF2 domain identified by eMATRIX, accession number DM01354I, p-value=1.000e-40, raw score of 15.55
  DOMAIN (356)..(631): Reverse transcriptase domain identified by PFam, accession name rvt, E-value=8.3e-88, PFam score of 305.1

SEQ ID NO: 53544 - protein, 1183 aa, Homo sapiens; identical to SEQ ID NO: 46162
  DOMAIN (272)..(317): kw TRANSCRIPTASE REVERSE II ORF2 domain identified by eMATRIX, accession number DM01354N, p-value=1.000e-40, raw score of 13.17
  DOMAIN (356)..(630): Reverse transcriptase domain identified by PFam, accession name rvt, E-value=2.4e-71, PFam score of 250.4

SEQ ID NO: 53545 - protein, 1046 aa, Homo sapiens; identical to SEQ ID NO: 48846
  DOMAIN (294)..(339): kw TRANSCRIPTASE REVERSE II ORF2 domain identified by eMATRIX, accession number DM01354N, p-value=1.000e-40, raw score of 13.17
  DOMAIN (378)..(653): Reverse transcriptase domain identified by PFam, accession name rvt, E-value=9.3e-78, PFam score of 271.7

SEQ ID NO: 53546 - protein, 1019 aa, Homo sapiens; identical to SEQ ID NO: 38238
  DOMAIN (336)..(377): kw TRANSCRIPTASE REVERSE II ORF2 domain identified by eMATRIX, accession number DM01354I, p-value=1.000e-40, raw score of 15.55
  DOMAIN (582)..(857): Reverse transcriptase domain identified by PFam, accession name rvt, E-value=2.2e-88, PFam score of 307.0

SEQ ID NO: 53547 - protein, 1071 aa, Homo sapiens
  DOMAIN (336)..(377): kw TRANSCRIPTASE REVERSE II ORF2 domain identified by eMATRIX, accession number DM01354I, p-value=1.000e-40, raw score of 15.55
  DOMAIN (582)..(816): Reverse transcriptase domain identified by PFam, accession name rvt, E-value=1.9e-13, PFam score of 58.1
  misc_feature (1)...(1071): Xaa = X or * as defined in Table 2
MGKKQNRKTGNSKTQSASPPPKERSSSPATEQSWMENDFDELREEGFRRSNYSELREDIQTKGKEVENFEKNLEECITRITNTEKCLKELMELKTKARELREECRSLRSRCDQLEERVSAMEDEMNEMKREGKFREKRIKRNEQSLQEIWDYVKRPNLRLIGVPESDVENGTKLENTLRDIIQENFPNLARQANVQIQEIQRTPQRYSSRRATPRHIIVRFTKVEMKEKMLRAAREKDRSTRQKVNKDTQELNSALHQADLIDIYRTLHPKSTEYTFFSAPHHTYSKIDHIVGSKTLLSKCKRTEIITNYLSDHSAIKLELRIKNLTQSRSTTWKLNNLLLNDYWVHNEMKAEIKMFFETNENKDTTYQNLWDAFKAVCRGKFIALNAYKRKQERSKIDTLTSQLKELEKQEQTHSKASRRQEITKIRAELKEIETQKTLQKINESRSWFFERINKIDRPLARLIKNKREKNQIDTIKNDKGDITTNPTEIQTTIREYYKHLYANKLENLEEMDTFLDTYTLPRLNQEEVESLNRPITGSEIVAIINSLPTKKSPGPDGFTAEFYQRYKEELVPFLLKLFQSIEKEGILPNSFYEASIILIPKPGRDTTKKENFRPISLMNIDAKILNKILANRIQQHIKKLIHHDQVGFIPGMQGWFNIHKSINVIQHINRAKDKNHMIISIDEEKAFDKIQQPFMLKTLNKLGDKIPRNPTYKGCEGPLQGELQTTAQGNKRGHKQMEEHSMLMGRKNQYHENGHTAQGILXIQCHPHQATNDFLHRIGKNYFKVHMEPKKSPHRQVNPKPKEQSWRHHTTXLQTILQGYSNQNSMVLVPKQRYRSMEQNRALRNNAAYLQLSDLXQPXEKQAMGKGFPIXXMVLGKLASHMXKAETGSLPYTLYKNQFKMDXRFKRXTXNHKNPRRKPRHYHSGHRHGQGLHVQNTKSNGNKSQNXQMGSNXTKELLHSKRNYHQSEQATYNMGENFHNLLIXQRANIQNLQXTQTNLQEKNKEPHQKVGEGHEQTLLKRRHLCSQKTHEKMLIITGHQRNANQNHYEISSHTSXNGNHXKVRKQQRI

SEQ ID NO: 53548 - protein, 639 aa, Homo sapiens
  DOMAIN (154)..(195): kw TRANSCRIPTASE REVERSE II ORF2 domain identified by eMATRIX, accession number DM01354I, p-value=1.000e-40, raw score of 15.55
  DOMAIN (402)..(593): Reverse transcriptase domain identified by PFam, accession name rvt, E-value=4.3e-09, PFam score of 43.7
  misc_feature (1)...(639): Xaa = X or * as defined in Table 2
MVKGSIQQEELTILNTYAAHTGAPRLIKQVLSDLQRDLDSHTIIMGDFNTPLSTLDRSTRQKVNKDTQELKSALHQADLTDIYRTLHHKSTEYTFFSAPHHIYSKIDHILGSKALLSKCKRTEIITNYLSDHSAIKLELWIKNLTQNHSTTWELNNLLLNDYWVHNEMKAEIKMFFETNENKDTTYHNLWDTFKAVCRGKFIPLNAHKRKQERSKIDTLTSQLKELEKQEQTNHSKASRRQEITKIRAELKEIETQKTLXKINESRSWFFERINKIDRLLARLIKKKREKNQIDAIKNDKGDITTDPTEIQTTIREYCKHLYANKLENLEEMDKFLDTYTLPRLNQEEVESLNRPITGAEIVAIINSLPTKKSPGPDGFTAKFYQRYKEELVPFLLKLFQSIEKEGILPNSFYEASIILIPKPGRDTTKKENFRPISLMNIDAKILNKKLAKRIQQHIKKLIHHDQVGFIPGMQGWFNIRKSINVIQHINRAKDKNHMIISIDAEKAFDKIQQPFMLKTLNKLGIKYLGIHLTRDVKDLFKENYKPLLKEIKEDTNKWKNIPCSWVGRINIVKMAILPKMCLXRRWTPLCLLTAAASLNREXERLVQPLLWRQMYCGPRHCRQVPQHRRLNWSPSLRLS

SEQ ID NO: 53549 - protein, 968 aa, Homo sapiens; identical to SEQ ID NO: 36619
  DOMAIN (272)..(317): kw TRANSCRIPTASE REVERSE II ORF2 domain identified by eMATRIX, accession number DM01354N, p-value=1.000e-40, raw score of 13.17
  DOMAIN (356)..(634): Reverse transcriptase domain identified by PFam, accession name rvt, E-value=5.8e-38, PFam score of 139.6

SEQ ID NO: 53550 - protein, 231 aa, Homo sapiens
  misc_feature (1)...(231): Xaa = X or * as defined in Table 2
QQRRXMCQNLMTHQNQRSGRSQNDFXRRRKNISERSAVYRXRQLYIRRQPYAERPSHVEDKGHKYLVFEANTGTENGYQGEESLFNKAYYGGGTNFFRKESQKLQQSAKKRDAELANGALGIIELNNDYTLKKVMKPLITSNTVTDEIERANVFKMNGKWYLFTDSRGSKMTIDVPQAKGNNVVITSYMTNRGFFEDKKATFAPSFLMNIKGNKTSVVKNSILEQGQLTVN

SEQ ID NO: 53551 - protein, 1115 aa, Homo sapiens; identical to SEQ ID NO: 36443
  DOMAIN (323)..(369): kw TRANSCRIPTASE REVERSE II ORF2 domain identified by eMATRIX, accession number DM01354O, p-value=1.000e-40, raw score of 8.73
  DOMAIN (356)..(631): Reverse transcriptase domain identified by PFam, accession name rvt, E-value=3.2e-86, PFam score of 299.8

SEQ ID NO: 53552 - protein, 1121 aa, Homo sapiens
  DOMAIN (194)..(235): kw TRANSCRIPTASE REVERSE II ORF2 domain identified by eMATRIX, accession number DM01354I, p-value=1.000e-40, raw score of 15.55
  DOMAIN (442)..(667): Reverse transcriptase domain identified by PFam, accession name rvt, E-value=7e-52, PFam score of 185.8
WRKIYQANGKQKKAGVAILVSDKTDFKPTKIKRDKEGHYIMVKGSIQQEELTILNIYAPNTGAPTFIQQVLSDLQRDLDSHTLIIGDFNTPLSTSDRSTRQKVNKDTQELNSALHQADLIDIYRTLHPKSTEYTFFSAPHHTYSKIDHILGSKALLSKCKRTEIITNYLSDHSAIKLELMIKNLTQNHSTIWKLNNLLLNDYWVHKEMKAEIKMFFETNENKDTTYQNLWDTFKAVCRGKFIALNAHKRKQERSKIDTLTSQLKELEKQEQTLSKASRRQEITKIRAELKEIETQKTLQKINESRSRFFERINKIDSLLARLIKKKREKNQIDAIKNDKGDITTNPTEIQTTIREYYKHLYANKLENLEEMDKFLDTYTLPRLNQEEVESLNRPITGAEIVAIINSLPTKKSPGPDGFTAEFYQRYKEEQVPFLLKLFQSIEKEGILPNSFYVSSIILIPKPGRDTTKRENFRPISLMNIDAKILNKILANRIQQHIKKLIHHDQVGFIPGMQGWFNICKSINVIQHINRTKDKNHMIISIDAEKAFDKIQQPFMLKTLNKLVLEVLARAIRQEKEIKGIQLGKEEVKLSLFADDMIVYLENPIVSAQNLLKLISNFSKVSGYKINVQKSQAFLYTNNRQTESQIMSELPFTIASKRIKYLGIQLTRDVKDLFKENYKPLLKEIKEDTNKWKNIPCSWVGRINIVKMAILPKVIYRFNAIPIKLPMTFFTELGKTALKFIWNQKRARITKSILSQKNKAGGITLPDFQLYCKATVTKTAWFPSGDVGLEADFSPSHTLKTQFFSCLAEFAAASCFFQRMNGFGMAMTTTYSTGAAESPLPSCSIDQGDDTKLHRARSPGRTFPAAAGIPAAAAPDGPPLSLLHKLWFPVELGGRALPRAEESHGEVAALGVMVVAQGGKNQGEEARSTPWLRPTSHLPPCSSSSAWWTEQTDAHPLLFLLCLGIYLLNALSNLSMVALVRSDGALRSPMYYFLGHLSLVDVCFTTVTVPRLLAGLLHPGQAISFQACFAEMYFFVALGITESYLPAAMSYDRATAACRPLRYGALVTPWALRLAARYDRLASVVYAVITPTLNPFINSLRNKEVKGALKRGLRWRAAPQEA

SEQ ID NO: 53553 - protein, 869 aa, Homo sapiens
  DOMAIN (272)..(317): kw TRANSCRIPTASE REVERSE II ORF2 domain identified by eMATRIX, accession number DM01354N, p-value=1.000e-40, raw score of 13.17
  DOMAIN (357)..(598): Reverse transcriptase domain identified by PFam, accession name rvt, E-value=1.1e-66, PFam score of 234.9
MGDFNTPLSTLDRSTRQKANKDTQELNSALHQVDLIDIYRTLHPKSTEYTFFSAPHHTYSTTDHILGSKALLSKCRRTEIITNYLSDHSAIKLELRIKNLTQNRSTTWKLNNLLLNDYGVHNEMKAEIKMFFETNENKDTTYQNLWDTFKAVCRGKFIALNAHKRKQERSKIDTLTSQLKELEKQEQTHSKASRRQEITKIRAELKEIETQKTLQKINESRSWFFERINKIDRPLARLIKKKREKNQIDAIKNDKGDITTDPTEIQTTIREYYKHLYANKLENLEEMDKFLHTYTLPRLNQEEVESLNRPITGSEIVAIINSLPTKKSPGPDGFTAEFDQRYKEELVPFLLKLFQSIEKEGILPNSFYEASIILIRKPGRDTTKKENFRPISLMNTDAKILNKILAKRIQQHIKKLIHHDQVGFIPGMQGWFNIHKSINVIQHINRAKDKNHMIISIDAEKAFDKIQQPFMLKTLSKLGIDGTYFKIIRAIYDKPTANIILNGQKLEAFPLKTGTRQGCPLSPLLFNIVLEVLARAIRQEKEIKLISNFSKVSGYKINVQKSQAFLYTNNRQTESQIMSQLPFTIASKRIKYLGIQLTRDVKDLFKENYKPLLKEIKEDTNKWKNIPCSWVGRINIMKMAILPKVIYRFNAIPIKLPMTFFTELEKTTFKFIWNQKRARITKSILSQKNKAGGITLPDFKLYYKATVTKTAWYWYQNRDIDQWNRTEPSEIMLHIYNYLIFDKPEKNKQWGKDSLFNKWCWENWLAICRKLKLDPFLTPYTKINSRWIKDLNVRPKTIKTLEENLGITIQDIGIGKDFMSKTPKAMATKAKIDKWDLIKLKSFCTAKETTIRVNRKPTEREKIFATYSS

SEQ ID NO: 53554 - protein, 1033 aa, Homo sapiens; identical to SEQ ID NO: 44316
  DOMAIN (272)..(317): kw TRANSCRIPTASE REVERSE II ORF2 domain identified by eMATRIX, accession number DM01354N, p-value=1.000e-40, raw score of 13.17
  DOMAIN (356)..(631): Reverse transcriptase domain identified by PFam, accession name rvt, E-value=4e-87, PFam score of 302.9
  misc_feature (1)...(1033): Xaa = X or * as defined in Table 2

SEQ ID NO: 53555 - protein, 210 aa, Homo sapiens; identical to SEQ ID NO: 43848
  misc_feature (1)...(210): Xaa = X or * as defined in Table 2

SEQ ID NO: 53556 - protein, 210 aa, Homo sapiens; identical to SEQ ID NO: 43848
  misc_feature (1)...(210): Xaa = X or * as defined in Table 2

SEQ ID NO: 53557 - protein, 1361 aa, Homo sapiens
  DOMAIN (277)..(322): kw TRANSCRIPTASE REVERSE II ORF2 domain identified by eMATRIX, accession number DM01354N, p-value=1.000e-40, raw score of 13.17
  DOMAIN (363)..(638): Reverse transcriptase domain identified by PFam, accession name rvt, E-value=2.1e-85, PFam score of 297.1
TWKGTTSTSRCKIMPKYRSTRQKVNKDTQELNSALHQADLIDIYRTLHTKSTEYTFFSAPHHTYSKIDHIVGSKALLSKCKRTEIITNYLSDHSAIKLELRIKNLNQSRSTTWKLNNLLLNDYWVHNEMKAEIKMFFETKENKDTTYQNLWDAFKAVCRGKFIALNAHKRKQERSKIDTLTSQLKELEKQEQTHSKASRRQEITKIRAELKEIETQKTLQKINESRSWFFERINKIDRPLARLIKKKREENQIDTIKNDKGDITTDPTEIQTTIREYYKHLYANKLENLEEMDKFLDTYTLPRLNQEEVESLNRPITGAEIVAIINSLPTKKSPGPDGFTAEFYQRYKEELVPFLLKLFQSIEKEGILPNSFYEASIILIPKPGRDTTKKENFRPISLMNIDAKILNKILANRIQQHIKKLIHHDQVGFIPGMQGWFNIRKSINVIQHINRAKDKNHMIISIDAEKAFDKIQQPFMLKTLNKLGIDGTYFKIIRAIYDKPTANIILNGKKLEAFPLKTGTRQGCPLSLLLFNIVLEVLARAIRQEKEIKGIQLGKEEVKLSLFADDMIVYLENPIVSAQNLLKLISNFSKVSGYKINVQKSQAFLYTNNRQTESQIMSELPFTIASKRIKYLGIQLTRDVKDLFKENYKPLLKEIKEDTNKWKNIPCSWVGRINIVKMAILPKVIYRFNAIPIKLPMTFFTELEKTTLKFIWNQKRARIAKSILSQKNKAGGITLPDFKLYYKATVTKTAWYWYQNRDIDQWNRIEPSEITPHTYNYLIFDKPEKNKQWGKDSLFNKWCWENWLAICRKLKLDPFLTPYTKINSRWIKDLNVRPKTIKTLEENLGITIQDIGVGKDFMSKTPKAMATKAKIGKWYLIKLKSFCTAKETTIRVNRQPTTWEKIFATYSSDKGLISRIYNELKQIYKKKTNNPIKKWAKDMNRHFSKEDIYAAKKYVKKCSSSLAIREMQIKTTMRYHLTPVRMAIIKKSGNNSKKNKAGGIMPADFKLYYKAMGTKTAWDMDETENHHAQQTNTRTEKQTPHVLTHKWELNNENTWTQGGEHPTLGLVMRFGAREGIALGEIPNVNGWLIVIALENGRRQKIGIKKWGCCYKKYLQTWKQFWNQVMGRGWKNLEEQASKSLYCSEWGKKDNFGEDSEEESCRESLNLLSDYLLGCNQNMSRNMDSKGLSDEVSDANKEPHIGNWTKNSLAASVIIPVGSGSAQPSASECTSSKLWQCPYETNFAGMENARVKGASSTLILRPTDDLWTQEENYRRMEPPHRGPTGEMLSKKARLELPRRVHTRAMPSGMMGVRPPQRPNNCRATSLQLQPVRTAAQAETSFITGERFPEALEVKHYNSVSRM

SEQ ID NO: 53558 - protein, 929 aa, Homo sapiens
  DOMAIN (272)..(317): kw TRANSCRIPTASE REVERSE II ORF2 domain identified by eMATRIX, accession number DM01354N, p-value=1.000e-40, raw score of 13.17
  DOMAIN (358)..(685): Reverse transcriptase domain identified by PFam, accession name rvt, E-value=1.5e-10, PFam score of 48.5
MGDFNIPLSTLDRSTRQKVNKDTQELNSALHQVDLIDIYRTLHPKSTEYTFFSALHHTYSKIDHILGSKALLSKCKRTEIITNYLSDHSAIKLELRIKNLTQNCSTTWKLNNLLLNDYWVHNEMKAEMKMFFETNENKDTTYQNLWDAFKAVCRGKFIALNAHKRKQERSKIDTLTSQLKELEKQEQTHSKASRRQEITKIRAELKEIETQKTLQKINESRSWFFERINKIDRPLARLIKKKREKNQIDAIKNDKGDITTDPTEIQTTIREYYKHLYANKLENLEEMDKFLDTYTLPRLNQEEVESLNTPITGAEIVAIINSLPTKKSPGPDGFTAEFYQRYKEELVPFLLKLFQSTEKEGILPNSFYEASIILIPKPGRDTTKKENFRPISLMNIDAKILNKILAKRIQQHIKKLIHHDQVGFIPGMQGWFNIRKSINVIQHINKSQNKNHMIISIDAEKAFHKIQQPFMLKTLNKLGGATQAFAKENNQKAYKETYGVSHITRHDMLQIPKQQQNEKYQVPQFDQSTIKNIESAKGLDVWDSWPLQNADGTVAEYNGYHVVFALAGSPKDADDTSIYMFYQKVGDNSIDSWKNAGRVFKDSDKFDANDPILKDQTQEWSGSATFTSDGKIRLFYTDYSGKHYGKQSLTTAQVNVSKSDDTLKINGVEDHKTIFDGDGKTYQNVQQFIDEGNYTSGDNHTLRDPHYVEDKGHKYLVFEANTGTENGYQGEESLFNKAYYGGGTNFFRKESQKLQQSAKKRDAELANGALGIIELNNDYTLKKVMKPLITSNTVTDEIERANVFKMNGKWYLFTDSRGSKMTIDGINSNDIYMLGYVSNSLTGPYKPLNKTGLVLQMGLDPNDVTFTYSHFAVPQAKGNNVVITSYMTNRGFFEDKKATFAPSFLMNIKGNKTSVVKNSILEQGQLTVN

SEQ ID NO: 53559 - protein, 300 aa, Homo sapiens
  DOMAIN (166)..(211): kw TRANSCRIPTASE REVERSE II ORF2 domain identified by eMATRIX, accession number DM01354N, p-value=1.000e-40, raw score of 13.17
MGTVFTLRFDDNVDLEDPAFLGSRRIPTNENKDTTYQNLWDALKAVCRGKFIALNAHKRKQERSKIDTLTSQLKELEKQEQTHSKASRRQEITKIRAELKEIETQKTLQKINESRSWFFERINKIDRQLARLIKKKREKNKIDAIKNDEGDITTDPTEIQTTIREYYKHLYANKLENLEEMDKFLDTYTLPRLNQEEVESLNRPITGAEIVAIINSLPTKKSPGPDGSTAKFYQKYKEELVPQKAVCKWRSKESQSEQGKPAFPKLKNLESDDQGQEASSMGERSAKRKIPSASIRSIND

SEQ ID NO: 53560 - protein, 1213 aa, Homo sapiens; identical to SEQ ID NO: 48849
  DOMAIN (294)..(335): kw TRANSCRIPTASE REVERSE II ORF2 domain identified by eMATRIX, accession number DM01354I, p-value=1.000e-40, raw score of 15.55
  DOMAIN (540)..(815): Reverse transcriptase domain identified by PFam, accession name rvt, E-value=7.7e-89, PFam score of 308.6

SEQ ID NO: 53561 - protein, 1228 aa, Homo sapiens
  DOMAIN (562)..(607): kw TRANSCRIPTASE REVERSE II ORF2 domain identified by eMATRIX, accession number DM01354N, p-value=1.000e-40, raw score of 13.17
  DOMAIN (647)..(872): Reverse transcriptase domain identified by PFam, accession name rvt, E-value=5.7e-49, PFam score of 176.1
MHIVVETALSASWQNKAKPPARVLLQVVPNVWFLVAVVWELYPSLDLMDRSIECSSSPATEQSWTENDYDKLREEGFRRSNYSELQEDIQTKGKDVENFEKNLEECITRITNTQKCLKELMELKTKARELREECRSLRSRCDQLEERVSVMEDEMNEMKQEGKFREKRIKRNEQSLQEIWDYVKRPNLRLIGVPESDGENGTKLKNTLQDIIQENFPNLARQAKVQIQEIQRMPQRYSLTRATPRHIIVRFTKVEMKEKMLRAAREKGAPRFIKQVLSDLQRDLDSHTLIMGDFNTPLSTLDRSTRQKVNKDTQELNSALHQVDLIDIYRTLHPKSTEYTFFSAPHHTYSKIDHILGSKALLSKCKRTEIITNYLSDHSAIKLELRIKNLTQNRSTTWKLNNLLLNDYWVHNEMKLEIKMFFETNENKDTTYQNLWDAFKAVYRGKFIALNAHKRKQERSKIDTLTSQLKELEKQEQTHSKASRRQEITKIRAELKEIETQKTLQKINESRSWFFERINKIDRLLARLIKRKREKNQIDAIKNDKGDITTNPTEIQTTIREYYKHLYANKLENLEEMDKFLDTYTLPRLNQEEVESLNRPITGSEIVAIINSLPTKKSPGPDGFTAEFHQRYKEELVPFLLKLFQSIEKEGILPNSFYEASIILIPKLGRDTTKKENFRPISLMNIDAKILNKILANRIQQHIKKLIHHDQVGFIPGMQGRFNIRKSINVIQHINRTKDKNHMIISIDAEKAFDKIQQPFMLKTLNKLVLEVLARAIRQEKEIKGIQLGKEEVKLSLFADDMIVYLENTIVSAQNLLKLISNFSKVSGYKINVQKSQAFLYTNNRQTESQIMSELPFTIASKRIKYLGNQLTRDVKDLFKENYKPLLKEIKEDTNKWKNIPCSWVGRINIVKMAILPKVIYRFNSIPIKLPMPFFTELEKTTLKFIWNQKRARIAKSILSQKNKAGGIMLPDFKLYYQTTVTKTAWYWYQNRDIDQWNRTEPSEITPHIYNYLIFDKPEKNKQWGKDSLFNKWCWEDWLPICGKLKLDPFLTPYTKINSRWIKDLNVRPKTIKTLEENLGITIQDISMGKDFMSKTPKAKATKAKIDKWDLIKLKSFCTAKETTIRVNRQPTKWEKIFATYSSDKGLISRIYNELKQIYKIKTNNPIEKWVKDMNRHFSKEDIYAAKKHMKKCSPSLAIREMQIKTTMRYHLIPVRMAIIKKSANNRC

SEQ ID NO: 53562 - protein, 1144 aa, Homo sapiens
  DOMAIN (110)..(151): kw TRANSCRIPTASE REVERSE II ORF2 domain identified by eMATRIX, accession number DM01354I, p-value=1.000e-40, raw score of 15.55
  DOMAIN (357)..(632): Reverse transcriptase domain identified by PFam, accession name rvt, E-value=9.2e-89, PFam score of 308.3
  misc_feature (1)...(1144): Xaa = X or * as defined in Table 2
MGDFNTPLSTLDRSTRQKVNKDTQELNSALHQADLIDIYRTLHPKSTEYTFFSAPHHTYSKIDHILGSKALLSKCKRTEIITNYLSDHSAIKLELRIKNLTQNRSTTWKLNNLLLNDYWVHNEMKAEIKMFFETNENKDTTYQNLWDAFKAVCRGKFIALNAHKRKQERSKIDTLTSQLKELEKQEQTHSKASRRQEITKIRAELKEIETQKTLQKINESRSWFFERINKIDRPLARLIKKKREKNQIDAIKNDKGDITTDPTEIQTTIREYYKHLYANKLENLGEMKDXFLDTYTLPRLNQEEVKSLNRPITGAEIVAIINSLAIKKSPGPDGFTAEFYQRYKEELVPFLLKLFQSIEKEGILPNSFYEASIILIPKPGRDTTKKENFRPISLMNIDAKILNKILANRIQQHIKKLIHHDQVGFIPGMQGWFNIHKSINVIQHINRARDKNHMIISIDAEKAFDKIQQPFMLKTLNKLGIDGTYLKIIRAIYDKPTANIILNGQKLEAFPLKTGTRQGCPLSPLLFNIVLEVLARAIRQEKEIKGIQLGKEEVKLSLFADDMIVYLENPIVSAQNLLKLISNFSKVSGYKINVQKSQAFLYTNNRQTESQIMSELPFTIASKRIKYLGIQLTRDVKDLFKENYKPLLKEIKEDTNKWKNMPCSWVGRINIVKMAILPKVIYRFNAIPIKLPMAFFTELEKTTLKFIWNQKRARIAKSILSQKNKAGGITLPNFELYYKATVTKTAWYWYQNRYIDQWNRTEPSEITPHIYNYLIFDKPGKNKQWGKDSLFNKWCWENWLAICRKLQLDPFLTPYTKINSRWIKDLNVRPKTIKTLEEDLGITIQDIGMGKDFMSKTPKAMATKDKIDKWDLIKLKSFCTAKETTIRVNRQPTKWEKIFATYSFDKGLISRIYNELQQIYKKKTNNPIKKWAKDMNRHFSKEDIYAAKKHMKKYSSSLAIREMQIKTTMRYHLTPVRMATIKNSGNNRSLCFYKENLSLCLAILLSVPVQEGGARSFLAPAGGVAGRATSHYGGHMATAERLSVELSGQALKEFQKGPLSPKQFKGHHSQQLRWTHRLNPSYGQSKTPKNTLLKMRGPTTWALGGTDVAASTDNNGNAHFETLQVMDMPRPWCCLLDGALLVSV

SEQ ID NO: 53563 - protein, 1021 aa, Homo sapiens
  DOMAIN (378)..(423): kw TRANSCRIPTASE REVERSE II ORF2 domain identified by eMATRIX, accession number DM01354N, p-value=1.000e-40, raw score of 13.17
  DOMAIN (467)..(868): Reverse transcriptase domain identified by PFam, accession name rvt, E-value=8.2e-12, PFam score of 52.7
MEGEMNEMKREGKFREKRIKRNEQSLQEIWDYVKRPNLRLIGVPESDGENGTKLENTLQDIIQENFPNLARQANVQIQEIQRTPQRYSSRRATPRHIIVRFTKVEMKEKMLRAAREKDRSTRQKVNKDTQELNSALHQADLIDIYRTLHLKSTEYTFFSAPHHTYSKIDHILGSKALLSKCKRTEIITNYLSDHSAIKLELRIKNLTQNRSTTWKLNNLLLNDYWVHNKMKAEIKMFFETNENKDTTYQNLWDAFKAVCRGKFIALYAHWRKQERSKMDTLTSQLEELEKLEQTHSKASRRHEIAKIRAELKEIETQKTFQKVNESSSWFFERINKIDRPLARLIKKKREKNQIDTIKNDKGDITTDPTEIQTTIREYYKHLYANKLENLEEMDKFLDTYTLPRLNQEEVESLNRPITGSAIVAIINSLPTKKSPGPDGFTAEFHQRYKEELVPFLLKLFQSIEKEGILPNSFYEASIILIPKPGRDTTKKENFRPISLMNIDAKFLNKILAKRIQQHIKKLIHHDQVGFIPGMQGWFNIRKSINVIQHINRAKDKNHMIISIDAEKAFDKIQQPFMLKTLNKLELEKTTLNFIWNQKRARIAKSILSQKNKAGGITLPDFKLYYKATVTKTAWYWYQNRDIDQWNRTEPSEITPHTYNCLIFDKPEKNKKWGKDSLFNKWCWENWLAICRKLKLDPFLTPYTKINSRWIKDLNVRPKTIKTLEENLGITIQDIGMGKDFMSKTPKAMATKDKIDKWDLIKLKSFCTAKETTIRVNRQPTTWEKIFATYSSDKGLISRIYNELNQIYKKKTNNPIKKWAKDMNRHFSKEDIYAAKKHMKKCSSSLAIREMQIKTTMRYHLTPVRMAIIKKSGNNRCWRGCGEIRTLLHCWWDCKLVQPLWKSVWRFLRDLELEIPFDPAIPLLGIYPNDYKSCCYKDTCTRMFIAALFTIAKTWNQPKCPTMIDWIKKMWHIYTMEYYAAIKNDEFMSFVGTWMKLEIIILSKLSQEQKTKHRIFSLIGGN

SEQ ID NO: 53564 - protein, 789 aa, Homo sapiens
  DOMAIN (193)..(238): kw TRANSCRIPTASE REVERSE II ORF2 domain identified by eMATRIX, accession number DM01354N, p-value=9.833e-38, raw score of 13.17
TTNCLSDHSAIKLELRIKKLTENHTTTWKLNNLLLNDYWVDNEMKAEIKMFFEINEKKDTTSQNLWDTFKAVCRGKLIALNAHKRKQERSKIDTLTSQLKKLEKQEQRNSKASRKQEITKIRAELKEIETQKKTLQKINESRSWFFEKINKIDGPLARLIKKKREKNQVDAIKNDKGDIITDPTEMQTTIREYYKYLYANKLENLEEMDKFLNTYTLQRLNQEGIESLNRPITGSEIEAIINSLPTKKSPGPDGFTAKFYQRYKEELVYPEPRSESECLSNIREFLRGCGASLRLESIREDRNGRSQKTVHTEGDMNMNIKKIVKQATVLTFTTALLAGGATQAFAKENNQKAYKETYGVSHITRHDMLQIPKQQQNEKYQVPQFDQSTIKNIESAKGLDVWDSWPLQNADGTVAEYNGYHVVFALAGSPKDADDTSIYMFYQKVGDNSIDSWKNAGRVFKDSDKFDANDPILKDQTQEWSGSATFTSDGKIRLFYTDYSGKHYGKQSLTTAQVNVSKSDDTLKINGVEDHKTIFDGDGKTYQNVQQFIDEGNYTSGDNHTLRDPHYVEDKGHKYLVFEANTGTENGYQGEESLFNKAYYGGGTNFFRKESQKLQQSAKKRDAELANGALGIIELNNDYTLKKVMKPLITSNTVTDEIERANVFKMNGKWYLFTDSRGSKMTIDGINSNDIYMLGYVSNSLTGPYKPLNKTGLVLQMGLDPNDVTFTYSHFAVPQAKGNNVVITSYMTNRGFFEDKKATFAPSFLMNIKGNKTSVVKNSILEQGQLTVN

SEQ ID NO: 53565 - protein, 991 aa, Homo sapiens
  DOMAIN (132)..(173): kw TRANSCRIPTASE REVERSE II ORF2 domain identified by eMATRIX, accession number DM01354I, p-value=1.000e-40, raw score of 15.55
  DOMAIN (390)..(665): Reverse transcriptase domain identified by PFam, accession name rvt, E-value=2.8e-84, PFam score of 293.4
APRFIKQVLSDLQRDLDSHTIIMGDFNTPLSTLDRSTRQKVHKDTQELNSALHQADLIDIYRTLHPKSTEYTCFSAPHHTYSKIDHIVGSKALLSKCKRSEIITNCLSDHSAIKLELRIKKLTQNRSTTWKLNNLLLNDYWVHNEMKAEIRMFFETNENKDTTYQNLWDTFKAVCRGKFIALNAHKRKQERSKIDTLTSQLKELEKQEQTHSKASRRQEITKIRAELKEIETQKTLQKINESRSWFFERINKIDRPLSRLIKKKREKNQIDAIKNDKWDITHRIPTEIETIIREYYKHLCANKLENLEEMDKFLDTYTLPRLNQEEVESLHRLITGSEIEAITNSLTTKKSPGPDGFTAEFYQRYKKELVPFLLKLVQSIEKEGILPNSFYEASIIPIPKPGRDKTKKENFRPISLMNIDAKIPNKILANRIQQHIKKLIHHDQVGFIPGMQGWFNIRKSINVVQHINRTKDKNHMIISIDAEKAFDKIQQPFMLKTLNNLGIDGMYLKIIRAIYDKPTANIILNGQKLEAFPLKTGTRQGCPLSPLLFNIVLEVLARAIRQEKEIKGIQLGKEEVTLSLFADDMIVYLENPIVSAQNLLKLISTFSKVSGYKINVQKSQAFLYTNNRQTESQIMSELPFTIASKRIKYLGILLTRDVKDLFKENYKPLLKEIKEDTNKWKNIPCSWVGRINIVKMAILPKVIYRFNAISIKLPMTLFTELEKTTLKFIWKQKRARIAKSILSQKKCAGGITLPDFKLYCKATVTKTAWYWYQNRDIDQWNRTDPSEITPHTYNYLIFDKPEKNKQWGKDSLFNKWCWENWLAICRKLKLDPFLTPYTKINSRWIKDLNIRPKTIKTLEENLGITIQDIGMGKDFMSKTPKAMATKAKIDKWDLIKLKSFCTAKETTIRVNRQPTTWEKIFATYSSDKGLISRIYNELKQIYKKKTNNPIKKWAKDMNRHFSKEDIYAAKKHMKKMVMYRWVFGVDVLSVC

SEQ ID NO: 53566 - protein, 120 aa, Homo sapiens
  misc_feature (1)...(120): Xaa = X or * as defined in Table 2
PDKEGNEIWVDMYTVKPSGWTVRTFDKPRKRFIAFFIAGILFRAIKNHFLPRETLQCLPYILTGFRRGQSEYFSIFSNMDLADTVMFLXGAIRFSDLVNEQIQHTFLIPGETICRLSEVV

SEQ ID NO: 53567 - protein, 104 aa, Homo sapiens
ARPRLGPTPAISICRNSSSMPLSHWQSSQEERLKPSRKKITKKHTKKRTASLILHAMICCRSLNSSKTKNTKCLNSINQRLKILSLQKDLMCGTAGRCKTLTEQ

SEQ ID NO: 53568 - protein, 1484 aa, Homo sapiens
  DOMAIN (521)..(562): kw TRANSCRIPTASE REVERSE II ORF2 domain identified by eMATRIX, accession number DM01354I, p-value=1.000e-40, raw score of 15.55
  DOMAIN (774)..(1049): Reverse transcriptase domain identified by PFam, accession name rvt, E-value=8.7e-88, PFam score of 305.1
KKSGNNRLMRVHGKKRFLWQKQGVCEVEIQAQRESARDGTDREDAESPHAEVTVPRGTRTEILTLWASRDRPASACGVTVPKGSTTHPGGMDRVCGVDTAVLHWMKQVQGISNLEVETGPRRRDMDEAGSRHSQQTNIGTENQTPHVLTHKWQLNRNSACDKLHKPHSVPGGVAAGDVGGKTISNPGVCAIEYQVDGSPHIWEDVNKGVYIEEDRAPLMERSSSPAMEQSWMENDFDELREEGFRRSNYSELREDIQTKGKEVENFEKSSEEYITRIANTQKCLKELMELKTKAPELREECRSLRSQCDQLEERASVIDTHSLKIKGWRKIYQANGKQKKAGVAILVSDKTDFKPTKIKRDKEGHYIMVKGSNQQEELTILNKYAPNTGAPRFIKQVLSDLQRDLDSHTLIMGDFNTPLSTLDRSTRQKVNKDTQELNSALHQADLIDIYRTLHPKSTEYTFFSAPHHTYFKTDHIVGSKVLLSKCKRTEIITNYLSDHSAIKLKLRIKNLTQSRSTPWKLNNLLLNDYWVHNEMKAEIKMFFETNENKDTTYQNLWDTFKAVYRGKFIALNAHKRKQERAKIDTLTSQLKELEKQERANSKASRRQEITKIRAELKEIETQKTLQKISESRSWFFERIKKIDRPLSRLIKKKREKNQIDTIKNDKGDITTDPTEIQTTIREYYKHLYANKLENLEEMDTFLDTYTLPRLNQEEVESLNRPITGSEIVAIINSLPTKKSPGPDGFTAEFYQRYKEELVPFLLKLFQSIEKEGILPNSFYEASIILIPKPGRDTTKKENFRPISLMNIDAKILNKILANRIQQHIKKLIHHDQVGFIPGMQGWFNIRKSINVIQHINRAKDKNHMIISIDAEKAFDKIQQPFMLKTLNKLGIDGMYFKIIRAIYDKPTANIILNGQKLEAFPLKTGTRQGCPLSPLLFNIVLEVLARAIRQEKEIKGIQLGKEEVKLSLFADDMIVYLENPIVSAQNLLKLISNFSKVSGYKINVQKSQAFLYTNNRQTESQIMGELPFTIASKRIKYLGIQLTRDVKDLFKENYKPLLKEIKEDTNKWKNIPCSWVGRINIVKMAILPKVIYRFNAIPIKLPMTFFTELEKTTLKFIWNQKRARIAKSILSQKNKAGGITLLDFKLYYKATVTKTAWYWYQNRDIDQWNRTEPSEIMPHIYNYLIFDKPLLEKNKQWGKDSLFNKWCWENWLAICRKLKLDPFLTPYTKINSRWIKDLNVKPKTIKTLEENLGITIQDIGVGKDFMSKTPKAMATKDKIDKWDLIKLKSFCTAKETTIRVNRQPTTWEKIFATYSSDKGLISRIYNELKQIYKKKTNNPIKKWAKDMNRHFSKEDIYAAKKHMKKCSSSLAIREMQIKTTMRYHLTPVRMAIIKKSGNNRQTGSGVDLQHTPADLQQRGLTVRRKMNKHKGIASTSTKRTSTQKPHLKVTKIKDQRPTLQELLKEALNMERNNQYQPLQNHAKM

SEQ ID NO: 53569 - protein, 791 aa, Homo sapiens [sequence omitted]

SEQ ID NO: 53570 - protein, 248 aa, Homo sapiens
  DOMAIN (137)..(151): C2H2-TYPE ZINC FINGER SIGNATURE domain identified by eMATRIX, accession number PR00048A, p-value=6.250e-14, raw score of 10.52
  DOMAIN (111)..(197): Zinc finger, C2H2 type domain identified by PFam, accession name zf-C2H2, E-value=0.028, PFam score of 21.0
PGAAWSRPDLRGCCTEPQPALRMLVLASPCPQPLAFSSVETMEGPPRRTCRSPEPGPSSSIGSPQASSPPRPNHYLLIDTQGVPYTVAWLDEESQREPGASGAPGQKKCYSCPVCSRVFEYMSYLQRHRFSHSEVKPFECDICGKAFKRSQHLSARHHSIHLGGWVGGPTACRFCPRRFRDAGELAQHSRVHSGERPVSVSTLPSPLYGAEHTAETHAVEASHEAGLPGAPGTHRTLQGALDSCPDTW

SEQ ID NO: 53571 - protein, 380 aa, Homo sapiens
  DOMAIN (135)..(153): Cadherins extracellular repeat proteins domain proteins domain identified by eMATRIX, accession number BL00232C, p-value= 2.579e-09, raw score of 10.65
  DOMAIN (165)..(256): Cadherin domain identified by PFam, accession name cadherin, E-value=1.9e-08, PFam score of 41.5
MGHHLMIDKLVALGGLYYAIQRHYATKCSVLKNDQILVIGLFMIQNVIYRKHFANPLSALFLQQGIELFAAIAEIHITTVAERNHAITQIRLEAQTIFDSLKEWHNAIRKSLDYEALQAFEFRVGATDRGFPALSSEALVRVLVLDANDNSPFVLYPLQNGSAPCTELVPRAAEPGYLVTKVVAVDGDSGQNAWLSYQLLKATEPGLFGVWAHNGEVRTARLLSERDVAKHRLVVLVKDNGEPPRSATATLQVLLVDGFSQPYLPLPRAAPAQAQADSLTVYLVVALASVSSLFLFSVLLFVAVRLCRRSRAAPVGRCSVPECPFPGHLVDVSGTGTLSQSYQYEVCLTGGSGANEFKFLKPVIPNLLSRDSEMEKAPPF

SEQ ID NO: 53572 - protein, 419 aa, Homo sapiens
  DOMAIN (54)..(102): Cadherins extracellular repeat proteins domain proteins domain identified by eMATRIX, accession number BL00232B, p-value= 7.369e-18, raw score of 32.79
  DOMAIN (76)..(284): Cadherin domain identified by PFam, accession name cadherin, E-value=4e-32, PFam score of 120.2
MVCYIQENLPFLLKPSVENFYILITEGALDREIRAEYNITITVTDLGTPRLKTEHNITVLVSDVNDNAPAFTQTSYTLFVRENNSPALHIGSVSATDRDSGTNAQVTYSLLPPQDPHLPLASLVSINADNGHLFALRSLDYEALQAFEFRVGATDRGSPALSREALVRVLVLDANDNLPFVLYPLQNGSAPCTELVPRAAEPGYLVTKVVAVDGDSGQNAWLSYQLLKATEPGLFGVWAHNGEVRTARLLSERDAAKHRLVVLVKDNGEPPRSATATLHVLLVDGFSQPYLPLPEAAPAQAQAEADLLTVYLVVALASVSSLFLLSVLLFVAVRLCRRSRAASVGRCSMPEGPFPGRLVDVSGTGTLFQSYQYEVCLTGGSETGEFKFLKPITPHLPPHRGGKEIEENSTLPNSFGFNY

SEQ ID NO: 53573 - protein, 1888 aa, Homo sapiens
  DOMAIN (903)..(921): URIDINE KINASE SIGNATURE domain identified by eMATRIX, accession number PR00988A, p-value=6.230e-09, raw score of 6.39
  DOMAIN (154)..(1687): Cadherin domain identified by PFam, accession name cadherin, E-value=2.6e-166, PFam score of 565.9
SSSDSGSLKGACTEVKMEPAGERFPEQRQVLILLLLLEVTLAGWEPRRYSVMEETERGSFVANLANDLGLGVGELAERGARVVSEDNEQGLQLDLQTGQLILNEKLDREKLCGPTEPCIMHFQVLLKKPLEVFRAELLVTDINDHSPEFPEREMTLKIPETSSLGTVFPLKKARDLDVGSNNVQNYNISPNSHFHVSTRTRGDGRKYPELVLDTELDREEQAELRLTLTAVDGGSPPRSGTVQILILVLDANDNAPEFVQALYEVQVPENSPVGSLVVKVSARDLDTGTNGEISYSLYYSSQEIDKPFELSSLSGEIRLIKKLDLKTMSSYDLDIEASDGGGLSGKCSVSVKVLDVNDNFPELSISSLTSPIPENSPETEVALFRIRDRDSGENGKMICSIQDDVPFKAIKPSVENFYRLVTEGALDRETRAEYNITITITDLGTPRLKTEQSITVLVSDVNDNAPAFTQTSYTLFVRENNSPALHIGSVSATDRDSGTNAQVTYSLLPPRDPHLPLTSLVSINTDNGHLFALQSLDYEALQAFRVSALGATDRGFPALSSEALVRVLVLDANDNSPFVLYPLQNGSAPCTELVPRAAEPGYLVTKVVAVDGDSGQNAWLSYQLLKATEPGLFGVWAHNGEVRTARLLSERDVAKHRLVVLVKDNGEPPRSATATLQVLLVDGFSQPYLPLPEAAPAQAQADSLTVYLVVALASVSSLFLFSVFLFVAVRLCRRSRAASVGRCSVPEGPFPGHLVDVSGTGTLSQSYQYEVCLTGGSEKLVLDQSLDREKVSEFSLTLTAVDGGSPPRSGTTLINVVVLDINDNAPEFEKPVYEVHVPESSPLDSLIIKASATDLDAGINGELSYSFSHVSRDVRKTFEIHPISGEVYLKAPLDFEIIQSYIINIQAIEGGSLSGKSSILVRVVDVNDNPPEIAMTSLTSPIPENSSPEMVVAVFSIRDQDAGDNGRTVCSIQDNLPFVLKPTFKNFYALVTEHPLDREVRNEYNITITVTDLGTPRLKTEHNITVLVSDVNDNAPIFTQTSYTLFVRENNSPALHIGSVSATDRDSGTNAQVTYSLLPPQDPHLPLTSLVSINADNGHLFALRSLDYEALQEFGFRVGAADHGSPALSSEVLVRVLVLDANDNSPFVLYPLQNGSAPCTELVPRAAEPGYLVTKVVAVDGDSGQNAWLSYQLLKATEPGLFGVWAHNGEGRTARLLSERDAAKHRLVVLVKDNGEPPRSATATLHVLLVEGFSQPYLPLTEAAPSQAQADSLTVYLVVALASVSSLFLFSVFLFVAVRLCRRSRAASMGRCSVPECPFPGHLVDVSGTGTLSQSYQYEVCLTGGSGANEFKFLKPIIPNFLPQSTEPSSQEAESSKTEETEKGSFVVNLAKDLGLAEGELAARGTRVVSDDNKQYLLLDSHTGNLLTNEKLDREKLCGPKEPCMLYFQILMDDPFQIYRAELRVRDINDHAPVFQDKETVLKISENTAEGTAFRLERAQDPDGGLNGIQNYTISPNSFFHINISGGDEGMIYPELVLDKALDREEQGELSLTLRALDGGSPSRSGTSTVRIVVLDVNDNAPQFAQALYETQAPENSPIGFLIVKVWAEDVDSGVNAEVSYSFFDASENIRTTFQINPFSGEIFLRELLDYELVNSYKINIQAMDGGGLSARCRVLVEVLDTNDNPPERDRYHHFPTLLLRILLRRRWLFLRLMTETSGENGKMVCYIQENLPFLLKPSVENFYILITEGALGQRDQSRVQHHYSPSLTWGTPGLENRGTTLTVLGLPTFNGQRPPPFTQTSLHPVRPREQQAPPCTSAASAPQTETRAPTPRSPTRCCRPKTRTCPSPPWSPSTRTTATCSPSGRWTTRPCRLSSSAWAPQTAAPPR

SEQ ID NO: 53574 - protein, 97 aa, Homo sapiens
  misc_feature (1)...(97): Xaa = X or * as defined in Table 2
MLFLKDASLGERKNENLGSFWSTGCISKYPPGHACPQATAITNPNGEDTGICEFQSSWGLTCIYWILEHVMLPTLTYQVSHLSLHKGLPLLRXFPLL

SEQ ID NO: 53575 - protein, 42 aa, Homo sapiens
  misc_feature (1)...(42): Xaa = X or * as defined in Table 2
RSRCISASPRRPASFRKSIPEEEDESLNIXKGQVSILFFYIK

SEQ ID NO: 53576 - protein, 78 aa, Homo sapiens
METLYRVPFLVLECPNLKLKKPPWLHMPSAMTVYALVVVSYFLITGGIIYDVIVEPPSVGSMTDEHGHQRPVAFLAYR

SEQ ID NO: 53577 - protein, 1192 aa, Homo sapiens
  DOMAIN (300)..(310): HOMEOBOX SIGNATURE domain identified by eMATRIX, accession number PR00024C, p-value=1.900e-09, raw score of 7.49
  DOMAIN (298)..(310): Homeobox domain identified by PFam, accession name homeobox, E-value=0.0095, PFam score of 17.5
MAFLFEFSDLVSLLSIGTMLAYSLVAFSVLVLRYQPDENFSKNEKPKEEVVEMNSVPKAESPACVPEASSTPASLWSPVSTIPTPRWGRIVYGCAFLLVVLLSMLCLVLAHWPKRLFSGELIYIAAAVLLLVLIVGFTFTVWRQPQSNTPLYFKPPHISTSQNLSLPEHPMEYLLRTGIEPDVRGVLTVNALPAGPPVACSPLVSISAHVYLMMQMTTETWAQCGVWMLIALECPNLKLKKPPWLHMPLAMTMYALVVVSYFLITRGIVYDVTVEPPGVGSMTDEQGHQRPVAFLAYRVWFKNHRAKLKKAKCKHIHQKQETPQPPIPEGGVSTSVGLRNADTLPRLPNAAHPIGLVYTGHRVPSFQLILYPNLKCAAFMERKQGNCPVFKGIDQNTMLGFTRAAVGLGEQASTAGTRPLPSGPEVGPSQLATTTTHTCTAPEVVPLLHEAAVPPYERPGLLALGARESAWGSKVFTGVNLLVLSCVIFSGFIKGDLHNWQLTDADYKWAELGWSNDTHSSGSLGSGGFVPFGFGVILHGAATCFFAFVGFDGIATTGEEALHPHRLHPHRSIPLGTVTSIFICFLAYFGVSAALTLMCPYYLICPENPLPEAFVHIGWAPIRYAVAVGTLCALSSSSMAEDRLLFCGLARIHAHTSTPVVATVVAGTLAVQRHIRGPRRPVLIAAPTYPPERTSQNRVPGTHCRGSQVRVPSPQSLGSTPALVMGRARLRHPTPSPASASPLEAPCPSPLGAMGANLTCADWRRHSGCVTGAEAHRARPPSPPMTLACTRVTVTGDRAAASASHSHASASHSRSRHPWRPARMRTPDSGGASRTQRPERAGSSRARHACACTQILTRMYTQTATCTCTRTQTPNACVWPDLDPHVRPDPTHMMLFLKDASLGERKNENLGSFWSTGCISKYPPGHACPQATAETNPNGEDTGIYTSAPLIPTNAQHGHATGPTTPHGAEVHPWATETRPDRCPRTTPRAHLTEQSPRDAPPRFTGTGCVDPKPLEHPRSPVMGRARLCHPTLSSKCVTVRSPVPVSPRSHAHQSHLRGLAEMQRLRHWCKRAPSTAPIAPNDARVHPCHSYGDRAAASASYSHASASHTRSRHPLEASAHAHAHPAAAARRQQQSPTRMCTQTPTRMCTYPDPDTYTLTGVCARTDADTHVQTQQSPTHTCACTDADTRTH

SEQ ID NO: 53578 - protein, 586 aa, Homo sapiens
  DOMAIN (308)..(347): BIR repeat proteins domain identified by eMATRIX, accession number BL01282B, p-value=1.900e-09, raw score of 30.49
  DOMAIN (313)..(351): Zinc finger, C3HC4 type (RING finger) domain identified by PFam, accession name zf-C3HC4, E-value=1.5e-06, PFam score of 25.5
SVRPGPGHVRVRFFSLSPLPLRPWPLCPAARRTMGSILSRRIAGVEDIDIQANSAYRYPPKSGNYFASHFFMGGEKFDTPHPEGHLFGENMDLNFLGSRPSQFPYVTPAPHEPVKTLRSLVNIRKDSLRLVRYKDDADSPTEDGDKPRVLYSLEFTFDADARVAITIYCQASEEFLNGRAVYSPKSPSLQSETVHYKRGVSQQVSLPSFKIDFSEWKDDELNFDLDRGVFPVVIQAVVDEGDSVVEVTGHAHVLLAGFEKHMDGSFSVKPLKQKQIVDRVSYLLQEIYGIENKNNQETKPSDDENSDNSNECVVCLSDLRDTLILPCRHLCLCTSCADTLRYQANNCPICRLPFRALLQIRAVRKKPGALSPVSFSPVLAQSLEHDEHSCPFKKSKPHPASLASKKPKRETNSDSVPPGYEPISLLEALNGLRAVSPAIPSAPLYEEITYSGISDGLSQASCPLAAIDHILDSSRQKGRPQSKAPDSTLRSPSSPIHEEDEEKLSEDVDAPPPLGGAELALRESSSPESFITEEVDESSSPQQGTRAASIENVLQDSSPEHCGRGPPADIYLPALGPDSCSVGIDE

SEQ ID NO: 53579 - protein, 1033 aa, Homo sapiens
  DOMAIN (103)..(138): Prion protein domain identified by eMATRIX, accession number BL00291A, p-value=5.880e-10, raw score of 4.49
RPREGPTWPQLPGSSPRRLFPWSPGSSSRGLFPWSPGSSSRGLFPWSPGSSSRGLFPWSPGSSSRGLFPWSPGSSSRGLFPWSPGSSSRGLFPWSPGSSSRGLFPWSPGGSSRGSSRGHPGPPPGGSSRGHPGPPPGALPVVTRVLLPGLFPWSPGSSSRGLFPWSPGSSSRGLFPWSPGSSSRGLFPWSPGSSSRGSSRGHPGPPPGALPVVTRVLLPGLFPWSPGSSSRRTLPVVTRLLLSGTLPVVTRVLLSGAVCQEKWGWIWASGNYFASHFFMGGEKFDTPHPEGYLFGENMDLNFLGSRPVQFPYVTPAPHEPVKTLRSLVNIRKDSCGWYKDDADSPTEDGDKPRVLYSLEFTFDADARVAITIYCQASEEFLNGRAVDSPLFCGNQLGSFDWFQFQRCLELEVRVGGVRRGPCVLCTAPRVTGALERSLSARVEGLVETTYVGRFLGTCHQTLQAQIKRLEMNKVNKSTMEEELREKADRSALAGKASRVDLETVALELNEMIQGILFKVTIHEDSWKKAMEELSKDVNTKLVHSDLDPLKKEMEEVWKIVRKLLIEGLRLDPDSAAGFRRKLFKRVKCISCDRPVEMMTGPQLITIRKAHLLSRLRPASANSCEYLQRQQMREQQWLQLQDLGIQEDCQQDWGDGPQNATSLKCKSCNLLTLYPYGDPHVIDYDSAEVDILGVDGILYKGRVNSQRGAQPLAVAKELAAVKAPSPPSQSLYDRVHSSALFGAICPPLCPRSSACSAASGPHLTMPARPPSLPPLLLLPPLIPSLRDPQQAPGSTRLSRAPHIESRVGRKPPEEPANPTMNSLTLRDKQQTPARVLEKGTVSTRKWTAQGSVEIHPLSKYEQCSKTQRTFQTQELEVALCQKNSIPANLGGLPYSGKKTGVKGLICPVPGTAVKAPQRPPGPQQPHPAPQSASETAWFPVADRRVFSENPGWTAAKTLGTLSSPCQAGAGVGRQDGDPGQELTSQEKPWVGRKIPEHAVADKGYRQQCGAGEARGGPVFWAAAPRTSWQQASYT

SEQ ID NO: 53580 - protein, 29 aa, Homo sapiens
VLRNIESLCLDRRNPGTSGTCSSGSRRIC

SEQ ID NO: 53581 - protein, 56 aa, Homo sapiens
RPCQWRWRSECGAELLFDGIKKHRVTLPGQEEPWDIRNLLIWIKKNLLKERPHQCT

SEQ ID NO: 53582 - protein, 118 aa, Homo sapiens
STVEFGGGAAPGLTVLRNIESLCLDRRNPVSIGFLNPSLGAIEQELVHGEHSAPFRPVFCIRVLSCLSSRQRNKNKSLHGWARWLMPVIPALWEAKVGGSQGQEFETSLANMVKSCLY

SEQ ID NO: 53583 - protein, 71 aa, Homo sapiens
  misc_feature (1)...(71): Xaa = X or * as defined in Table 2
KGEVVRSSCLTVLRNIDVTLPGQEEPWDIRNLLIWIKKNLLKERPELFIQGDSVRPGILVLINDADWELLX

SEQ ID NO: 53584 - protein, 381 aa, Homo sapiens
  misc_feature (1)...(381): Xaa = X or * as defined in Table 2
PPPARTRPCASLTPEKAKWWRSKPGLTRAPARCGLSSPQTGSCSAPASAGXVSGNSRSGTRRGLRPTRGXGPCGPSSRARAISSPRASLRMSQRELGLWDPNNFEEPVALQEMDTSNGVLLPFYDPDSSIVYLCGKVLTAGQGEQGTGWRCGGPCPGAPLNRLILQGDSSIRYFEITDEPPFVHYLNTFSSKEPQRGMGFMPKRGLDVSKCEIARFYKLHERKCEPIIMTVPRKSDLFQDDLYPDTPGPEPALEADEWLSGQDAEPVLISLRDGYVPPKHRELRVTKRNILDVRPPSGPRRSQSASDAPLSVRSALLHSGPIYISPNRPYTTRPLCPPPQQQHTLETLLEEIKALRERVQAQEQRITALENMLCELVDGTD

SEQ ID NO: 53585 - protein, 633 aa, Homo sapiens
MSRKGPRAEVCADCSAPVGPDFALAISELVSPDIFMQSHSENAISVKEIVTEIESISQGVGQIQLKGDILPNPCHTPKKNSIHELLLERAQTPENKPGHMEQDEDSCTAQPELAKDSGMCNPEGCLTTHSSIADLEEGEQLRGNKSSRAQGCTQNSKNDSSVADLAPKGKSDEAPPEHSFVLKEPEMSKGKGKYSGSEAGSLSHSEQNATVPAPRVLEFDHLPDPQEGPGPEASNGLKVSQKSEGSQPSSSRSPLEFLKEAGVPNQTLSSGTPDPYFMALLGPKLNSRRPHLHPVSHTLDLGNSPPLPQQFAKCQRGRKGPEGKYPLHYLVWHNRHRELEKEVRAGQTLITQTLSQANPTAITAEEYFNPNFELGNRDMGRPMELTTKTQKFKAKLWLCEEHPLSLCEQVAPIIDLMAVSNALFAKLRDFITLQIPIFHILNARITFGNLNGCDEPVPSVRGSPSSETPSPGSDSSSVSSSSSTSEAPRENACPSALPGVASCRGCEISPALFEAPRGYSMMGGQREAATRDDDDDLLQFAIQQSLLEAGSEYDQVTIWEALTNSKPGTHPMSYERSPTGQGQVPAATCSGRYDEQLRLAMELSAQEQEERRRRARQEEEELERILRLSLTEQ

SEQ ID NO: 53586 - protein, 123 aa, Homo sapiens
PLKNKYLDWAYRSGGYKKARPVFKSLQESRPFSVDFFRKMIHFEKGQESCNMANIREYYERALREFGSADSDLWMDYMKEELNHPLGRPENCGQIYWRAMKMLQGESAEAFVAKHAMHQTGHL

SEQ ID NO: 53587 - protein, 220 aa, Homo sapiens
TSDLMAEIIQERIEDRLPELEQLERIGLFSHAEIKAIIKKASDLEYKIQRRTLFKEDFINYVQRIGYSFKKDEIENSIVHRVQGVFQRASAKWKDDVQLWLSYVAFCKKWATKTRLSKVFSAMLAIHSNKPALWIMAAKWEMEDRLSSESARQLFLRALRFHPECPKLYKEYFRMELMHAGKTGGRRRKNLKKPVWMWRILIILKKSLRASWHGSSTKIL

SEQ ID NO: 53588 - protein, 107 aa, Homo sapiens
  DOMAIN (53)..(77): PROTEIN NUCLEAR RIBONUCLEOPROTEIN SMALL MRNA RNA domain identified by eMATRIX, accession number PD01861A, p-value=4.836e- 11, raw score of 14.06
  DOMAIN (37)..(103): Sm protein domain identified by PFam, accession name Sm, E- value=2e-06, PFam score of 34.8
TESVVTIMSLLNKPKSEMTPEEREEEEFNTGPLSVLTQSVKNNTQVLINCRNNKKLLGRVKAFDRHCNMVLENVKEMLTEGDRYISKMFLAGDPVIVVLRNPLIAGK

SEQ ID NO: 53589 - protein, 178 aa, Homo sapiens
  misc_feature (1)...(178): Xaa = X or * as defined in Table 2
STRLDLPKCWDYRSLFNKPKSEMTPEELQKREEEEFNTGPTPLCLTQSVKNNTQSAQSTCRNNKKLPGAAXRPFDRASPPCSPPGTCNMVLENVKEMWTXGTQEVGKGKEGSSKPVNKDRLTSSKMFPGGGGFSSFVVPCGNPFHSAGQIRGPPVLFDKNSHPLVLLKTACHLVFENY

SEQ ID NO: 53590 - protein, 201 aa, Homo sapiens
  DOMAIN (93)..(136): Ribosomal protein L19e proteins domain identified by eMATRIX, accession number BL00526C, p-value=3.217e-19, raw score of 20.60
  DOMAIN (4)..(148): Ribosomal protein L19e domain identified by PFam, accession name Ribosomal_L19e, E-value=3.6e-33, PFam score of 123.6
VTSGCGKKKVWLDPNETNEIANANFRSADPGRLIKDGLIIRKPVTVHSRARLPEKTPLARCKGHGTLGIGKRKGTANARMPKEGHHGMRRMRILAPACSRRYRESKKIDRHMYHSLYLKVKGNVFKNKADFSWEHIHKAEGRARPRKEASWLDQAEARRSKDQGKHGKRREERLPGQRKEEINQRLYSKEGRRPRNKNLTL

SEQ ID NO: 53591 - protein, 949 aa, Homo sapiens
  DOMAIN (225)..(273): Cadherins extracellular repeat proteins domain proteins domain identified by eMATRIX, accession number BL00232B, p-value= 6.667e-23, raw score of 32.79
  DOMAIN (31)..(669): Cadherin domain identified by PFam, accession name cadherin, E-value=8.6e-82, PFam score of 285.1
MFGFQRRGLGTPRLQLWLLLLEFWEVGSGQLHYSVSEEAKHGTFVGRIAQDLGLELAELVQRLFRVASKTHGDLLEVNLQNGILFVNSRIDREELCGQSAECSIHLEVIVDRPLQVFHVNVEVKDINDNPPVFSLREQKLLIAESKQSDSRFPLEGASDADIEENALLTYRLSKNEYFSLDSPTNGKQIKRLSLILKKSLDREKTPELNLLLTATDGGKPELTGTVRLLVQVLDVNDNDPEFDKSEYKVSLMENAAKETLVLKLNATDRDEGVNGEVTYSLMSIKPNGRHLFTLDQNNGEVRVNGTLDYEENKFYKIEVQATDKGTPPMAGHCTVWVEILDTNDNSPEVAVTSLSLPVREDAQPSTVIALISVSDRDSGVNGQVTCSLTPHVPFKLVSTFKNYYSLVLDSALDRENVWAYELVVTARDGGSPSLWATARVSVEVADVNDNAPAFAQPEYTVFVKENNPPGCHIFTVSARDADAQENALVSYSLVERRLGDRALSSYVSVHAESGKVYALQPLDHEELELLQFQVSARDAGVPPLSSNVTLQVFVLDENDNAPALLATQAGSAGGAVNKLVPRSVGAGHVVAKVRAVDADSGYNAWLSYELQPAAGGSRIPFRVGLYTGEISTTRALDEADSPRHRLLVLVKDHGEPALTATATVLVSLVESGQAPKASSRTLAGAASPEAALVDVNVYLIIAICVVSSLLVLTLLLYTALWWSATPTEGACAPGKPTLVCSRAVGSWSYSQQRRQRVCSEEGPPKTDLMAFSPSLPLGLNKEEEGERQEPGSNHPGQPRQPNPDWRYSASLRAGMHSSVHLEEAGILRAGPGGPDQQWPTVSSATPEPEAGEVSPPVGAGVNSNSWTFKYGPGNPKQSGPGELPDKFIIPGSPAIISIRQEPTNSQIDKSDFITFGKKEETKKKKKKKKGNKTQEKKEKGNSTTDNSDQ

SEQ ID NO: 53592 - protein, 941 aa, Homo sapiens
  DOMAIN (546)..(564): CADHERIN SIGNATURE domain identified by eMATRIX, accession number PR00205B, p-value=2.765e-11, raw score of 11.39
  DOMAIN (138)..(670): Cadherin domain identified by PFam, accession name cadherin, E-value=6.4e-76, PFam score of 265.6
MVIIGPRGPGSQRLLLSLLLLAAWEVGSGQLHYSVYEEAKHGTFVGRIAQDLGLELAELVPRLFRVASKRHGDLLEVNLQNGILFVNSRIDREKLCGRSAECSIHLEVIVDRPLQVFHVDVEVKDINDNPPVFREREQKVPVSESAPLDSHFPLEGASDADIGVNSLLTYALSLNENFELKIKTKKDKSILPELVLRKLLDREQTPKLNLLLMVIDGGKPELTGSVQIQITVLDVNDNGPAFDKPSYKVVLSENVQNDTRVIQLNASDPDEGLNGEISYGIKMILPVSEKCMFSINPDTGEIRIYGELDFEENNAYEIQVNAIDKGIPSMAGHSMVLVEVLDVNDNVPEVMVTSLSLPVQEDAQVGTVIALISVSDRDSGANGQVICSLTPHVPFKLVSTYKNYYSLVLDSALDRESVSAYELVVTARDGGSPSLWATARVSVEVADVNDNAPAFAQPEYTVFVKENNPPGCHIFTVSAWDADAQKNALVSYSLVERRVGEHALSSYVSVHAESGKVYALQPLDHEELELLQFQVSARDAGVPPLGSNVTLQVFVLDENDNAPALLATPAGSAGGAVSELVPRSVGAGHVVAKVRAVDADSGYNAWLSYELQPAAVGAHIPFHVGLYTGEISTTRILDEADAPRHRLLVLVKDHGEPALTSTATVLVSLVENGQAPKTSSRASVGAVDPEAALVDINVYLIIAICAVSSLLVLTLLLYTALRCSAPPTVSRCAPGKPTLVCSSAVGSWSYSQQRRQRVCSAESPPKTDLMAFSPSLQLSREDCLNPPSEPRQPNPDWRYSASLRAGMHSSVHLEEAGILRAGPGGPDQQWPTVSSATPEPEAGEVSPPVGAGVNSNSWTFKYGPGNPKQSGPGELPDKFIIPGSPAIISIRQEPTNSQIDKSDFITFGKKEETKKKKKKKKGNKTQEKKEKGNSTTDNSDQ

SEQ ID NO: 53593 - protein, 952 aa, Homo sapiens
  DOMAIN (226)..(274): Cadherins extracellular repeat proteins domain proteins domain identified by eMATRIX, accession number BL00232B, p-value= 6.667e-23, raw score of 32.79
  DOMAIN (32)..(670): Cadherin domain identified by PFam, accession name cadherin, E-value=8.6e-82, PFam score of 285.1
AMFGFQRRGLGTPRLQLWLLLLEFWEVGSGQLHYSVSEEAKHGTFVGRIAQDLGLELAELVQRLFRVASKTHGDLLEVNLQNGILFVNSRIDREELCGQSAECSIHLEVIVDRPLQVFHVNVEVKDINDNPPVFSLREQKLLIAESKQSDSRFPLEGASDADIEENALLTYRLSKNEYFSLDSPTNGKQIKRLSLILKKSLDREKTPELNLLLTATDGGKPELTGTVRLLVQVLDVNDNDPEFDKSEYKVSLMENAAKETLVLKLNATDRDEGVNGEVTYSLMSIKPNGRHLFTLDQNNGEVRVNGTLDYEENKFYKIEVQATDKGTPPMAGHCTVWVEILDTNDNSPEVAVTSLSLPVREDAQPSTVIALISVSDRDSGVNGQVTCSLTPHVPFKLVSTFKNYYSLVLDSALDRENVWAYELVVTARDGGSPSLWATARVSVEVADVNDNAPAFAQPEYTVFVKENNPPGCHIFTVSARDADAQENALVSYSLVERRLGDRALSSYVSVHAESGKVYALQPLDHEELELLQFQVSARDAGVPPLSSNVTLQVFVLDENDNAPALLATQAGSAGGAVNKLVPRSVGAGHVVAKVRAVDADSGYNAWLSYELQPAAGGSRIPFRVGLYTGEISTTRALDEADSPRHRLLVLVKDHGEPALTATATVLVSLVESGQAPKASSRTLAGAASPEAALVDVNVYLIIAICVVSSLLVLTLLLYTALWWSATPTEGACAPGKPTLVCSRAVGSWSYSQQRRQRVCSEEGPPKTDLMAFSPSLPLGLNKEEEGERQEPGSNHPGQKRVTAHKIPQASDPLKLIVPTQRPSFSAMVIIGPRGPGSQRPAALASAPCSLGGGERPAPLLRLRGGQTRHLRGPHRSGPGAGAGGAGAAPVPGGVQKTRGPSGGKSAEWHFVCEFSDRPREAVRAERGVQYPPGGDRGQAAAGFPCGRGGEGH

SEQ ID NO: 53594 - protein, 244 aa, Homo sapiens
  DOMAIN (38)..(47): Zinc finger C3HC4 type (RING finger), proteins. domain identified by eMATRIX, accession number BL00518, p-value=8.000e-09, raw score of 12.23
  DOMAIN (23)..(63): Zinc finger, C3HC4 type (RING finger) domain identified by PFam, accession name zf-C3HC4, E-value=1e-08, PFam score of 32.5
NSPVVPVMASGQFVNKLQEEVICPICLDILQKPVTIDCGHNFCPQCITQIGETSCGFFKCPLCKTSVRRDAIRFNSAVAEIWWEKIQALQASEVQSKRKEATCPRHQEMFHYFCEDDGKFLCFVCRESKDHKSHNVSLIEEAAQNYQGQIQEQIQVLQQKEKETVQVKAQGVHRVDVFTDQVEHEKQRILTEFELLHQVLEEEKNFLLSRIYWLGHEGTEAGKHYVEIPLMPTVERSQEARCYP

SEQ ID NO: 53595 - protein, 126 aa, Homo sapiens
  misc_feature (1)...(126): Xaa = X or * as defined in Table 2
AINWTSARPVSQCWDPCPPSQVVCLAGLPPXRVCQNPVKGPNCPLAHTSEPTGHCLLXTRGMCFPSLCGQLCPXSGPPDCPSPRALHHTGFCPVALLVAESQVRARACGPEPHRAGRASRWCLHAG

SEQ ID NO: 53596 - protein, 119 aa, Homo sapiens
PQTHTGNHSERGRQPITRSPEKPEPCPSKRAPQTQQPPWAPSLCPPALGPCKGTRRPRVQVHRPTSSQKCPLPAWFHHLPLWPTSAARSSSTETPTGQQMRKLRHPAAPRSANALSLGE

SEQ ID NO: 53597 - protein, 145 aa, Homo sapiens
  DOMAIN (26)..(38): KH domain proteins family of RNA binding proteins domain identified by eMATRIX, accession number PF00013, p-value=7.300e-09, raw score of 5.78
  DOMAIN (15)..(109): KH domain identified by PFam, accession name KH-domain, E- value=5.4e-16, PFam score of 66.6
ALNSVPEPSITLTLRMLMHGKEVCSIIGKKGETVKRIREQDLCAAPANGGNVSRPPVTLRLVIPASQCGSLIGKAGTKIKEIRETTGAQVQVAGDLLPNSTERAVTVSGVPDAIILCVRQICAVILESPPKGATIPYHPSLSLCT

SEQ ID NO: 53598 - protein, 32 aa, Homo sapiens
TGSPVSIALAQYLITAWAAAGLGGLHCQDGSS

SEQ ID NO: 53599 - protein, 68 aa, Homo sapiens
  misc_feature (1)...(68): Xaa = X or * as defined in Table 2
PWPLASNPRGCLPXPSTLNXPTPSSQPGMSLDSLDRHPPXTRETASGIGGQRPGSDPARTPHFISQTQ

SEQ ID NO: 53600 - protein, 48 aa, Homo sapiens
APSQALEPPSSHHSQAWAGQCGYAGTGGRASPMGAPPRDPCWSWRCAW

SEQ ID NO: 53601 - protein, 507 aa, Homo sapiens
  DOMAIN (165)..(177): KH domain proteins family of RNA binding proteins domain identified by eMATRIX, accession number PF00013, p-value=7.300e-09, raw score of 5.78
  DOMAIN (154)..(413): KH domain identified by PFam, accession name KH-domain, E- value=4.8e-32, PFam score of 119.9
SSCPTTRVLIMKGAGHPCYLDKPEEWHTGLLDFLQGLQLWLMHMQQLMSLAVVSGRLSRGQCGTERPSRRAAAAAAAGQPQRGHFQHIEERLETNVQNCQSPDTLCPTHCSPVLNEPCPEVSVVAVAPASPDRMSGSDGGLEEEPELSITLTLRMLMHGKEVGSIIGKKGETVKRIREQSSARITISEGSCPERITTITGSTAAVFHAVSMIAFKLDEDLCAAPANGGNVSRPPVTLRLVIPASQCGSLIGKAGTKIKEIRETTGAQVQVAGDLLPNSTERAVTVSGVPDAIILCVRQICAVILEGFSVQGQYGAVTPAEVTKLQQLSSHAVPFATPSVVPGLDPGTQTSSQEFLVPNDVSRGWDGWRLIGCVIGRQGTKINEIRQMSGAHIKIGNQAEGAGERHVTITGSPVSIALAQYLITACLETAKSTSGGTPSSAPADLPAPFSPPLTALPTASPLACWAHPMPSPSPTLIGFKAHALLGFTTCFPRAAAGLGGLHRQDGSS

SEQ ID NO: 53602 - protein, 120 aa, Homo sapiens; identical to SEQ ID NO: 31185

SEQ ID NO: 53603 - protein, 154 aa, Homo sapiens
LDGAGLLAPVKAHLQKKGPRLGTRGCAMPRLGSTPFLKGQCLANSRNTLEAVSLTESSASRVPPAPVLGSRRPHSPSPWPPYYTPVPPPPRMALVPPNMHGQGTVGLTSVPLACTVAMLGSYKQAGAFGPLANCYGGLGHAQCWGQEFCPTQCP

SEQ ID NO: 53604 - protein, 213 aa, Homo sapiens
GSRLRRLQAAAARPALPLPLPPWEWKHLPHVPEAKWWLTTARHSAAYRADPLRVSSRDKLTEMAASSQGNFEGNFESLDLAEFAKKQPWWRKLFGQESGPSAEKYSVATQLFIGGVTGWCTGFIFQKVGKLAATAVGGGFFLLQLANHTGYIKVDWQRVEKDMKKAKEQLKIRKSNQIPTEVRSKAEEVVSFVKKNVLVTGGFFGGFLLGMAS

SEQ ID NO: 53605 - protein, 56 aa, Homo sapiens; identical to SEQ ID NO: 31770

SEQ ID NO: 53606 - protein, 49 aa, Homo sapiens; identical to SEQ ID NO: 42392

SEQ ID NO: 53607 - protein, 212 aa, Homo sapiens
  DOMAIN (16)..(38): TRANSFORMING PROTEIN P21 RAS SIGNATURE domain identified by eMATRIX, accession number PR00449A, p-value=3.077e-16, raw score of 13.20
  DOMAIN (17)..(212): Ras family domain identified by PFam, accession name ras, E- value=4.5e-16, PFam score of 46.0
APALPGCEHMMAIRELKVCLLGDTGVGKSSIVWRFVQDHFDHNISPTIGASFMTKTVPWENDFTKFLIWDTAGQERFSFIGLPLYYSRLQLAAVYSCYGYLPSRDFIFITLKEWVKRLKELGPENIVMAIAGNKCDLSDIREVPPEGMLKEYAESIGAIVVETSAKNAINIEELFQGISRQIPPLDPPMKNGKQWDHQKLRSQPMQASRRCC

SEQ ID NO: 53608 - protein, 96 aa, Homo sapiens
  DOMAIN (44)..(68): PROTEIN NUCLEAR RIBONUCLEOPROTEIN SMALL MRNA RNA domain identified by eMATRIX, accession number PD01861A, p-value=5.200e- 21, raw score of 14.06
  DOMAIN (28)..(94): Sm protein domain identified by PFam, accession name Sm, E- value=8.9e-19, PFam score of 75.8
VTSTMAYRAQGQKVQKVMVQPINLIFRYLQNRSRIQVWLYEQVNMRIEGCIIGFDEYMNLVLDDAEEIHSKTKSRKQLGRIMLKGDNITLLQSVSN

SEQ ID NO: 53609 - protein, 128 aa, Homo sapiens
  DOMAIN (65)..(89): PROTEIN NUCLEAR RIBONUCLEOPROTEIN SMALL MRNA RNA domain identified by eMATRIX, accession number PD01861A, p-value=2.588e- 19, raw score of 14.06
  DOMAIN (49)..(121): Sm protein domain identified by PFam, accession name Sm, E- value=0.00054, PFam score of 26.7
HESCSQRQRAGCALCENSHPWRSRGPGVQKSAEGLWCQPICRTSSSRYLQNRIAGFQVWLYEQVNMRIEGCIIGFDEYVNLVLDDAEEIHSKTKSRKQLGRIMLKGDNITLLQTCLPPRMVHGSGEIV

SEQ ID NO: 53610 - protein, 98 aa, Homo sapiens
  DOMAIN (45)..(97): Amidases proteins domain identified by eMATRIX, accession number BL00571, p-value=3.323e-23, raw score of 25.69
  DOMAIN (1)..(92): Amidase domain identified by PFam, accession name Amidase, E- value=1.4e-23, PFam score of 87.2
  misc_feature (1)...(98): Xaa = X or * as defined in Table 2
MGKTNLDEFAMGSGSTDGVFGPVKNPWSYSKQYREKRKQNPHSENEDSDWLITGGSSXGSAAAVSAFTCYAALGSDTGGSTRNPAAHCGLVGSNQAMA

SEQ ID NO: 53611 - protein, 55 aa, Homo sapiens
  misc_feature (1)...(55): Xaa = X or * as defined in Table 2
ENSSSHHIIKPFSSGCSIHGFSGHINVTSVTILXPIKSCHIRCHFXCAQYMVADN

SEQ ID NO: 53612 - protein, 164 aa, Homo sapiens
  DOMAIN (40)..(161): Amidase domain identified by PFam, accession name Amidase, E- value=1.7e-28, PFam score of 104.8
PLFPPCLSPVVAGWARGHMLGQSHQQVAAPLKHRPITPTELCQKCLSLIKKTKFLNAYITVSEEVALKHAEESEKRYKNGQSLGDLDGIPIAEKDNFSTSGIETTCASNMLKGYIPPYNATVDQKLLDQGALLMGKTKLNDFAMGSGSTDGVFGPVKNPWSYSK

SEQ ID NO: 53613 - protein, 261 aa, Homo sapiens
  DOMAIN (73)..(95): RECOVERIN FAMILY SIGNATURE domain identified by eMATRIX, accession number PR00450C, p-value=1.000e-26, raw score of 12.22
  DOMAIN (109)..(137): EF hand domain identified by PFam, accession name efhand, E- value=1.5e-06, PFam score of 35.2
ILAARMGKQNSKLRPEVMQDLLESTDFTEHEIQEWYKGFLRDCPSGHLSMEEFKKIYGNFFPYGDASKFAEHVFRTFDANGDGTIDFREFIIALSVTSRGKLEQKLKWAFSMYDLDGNGYISKAEMLEIVQAIYKMVSSVMKMPEDESTPEKRTEKIFRQMDTNRDGTWVPHLALIYRTAEGGFAVQRASVSFYPPPSAGNAMVNEAAVFLEIPLGSSPGQVSAVCHSGRKLSLEEFIRGAKSDPSIVRLLQCDPSSAGQF

SEQ ID NO: 53614 - protein, 240 aa, Homo sapiens
MDGNLRKIRFEKHAITEEFRTTEPGLAALRLPSTWIRGVRTSESKREVGKGGQSQQYENRDTEGEGHVMTKARDWSKAAASQRLPANHLKLRLCIDGFRSHSLPEEGPKKPCQHHAAQEEPCTRSGRLPQAHEGSISDCCTSSEQGSMDIGSVEPGTGYNLLVCHLLSTLEKRSIWAGVSRFSRYHLSRLPLARKGNPLTPCASQLLLPLPSTTQKRQSGHALYSFPYRPQPKNDNLVMP

SEQ ID NO: 53615 - protein, 159 aa, Homo sapiens
  DOMAIN (53)..(103): Acyl-CoA-binding protein domain identified by eMATRIX, accession number BL00880, p-value=4.462e-40, raw score of 17.52
  DOMAIN (22)..(112): Acyl CoA binding protein domain identified by PFam, accession name ACBP, E-value=3.2e-34, PFam score of 127.1
DRAMWGDLWLLPPASANPGTGTEAEFEKAAEEVRHLKTRSPSDEEMLFIYGHYKQATVGDINTERPGMLDFTGKAKWDAWNELKGTSKGDAVEAYLNQVEELKKKYGDMERLDLVTVPCVYPKPETIPFFFSNTVDGWEFRENNPVKPATQRLLTHTGS

SEQ ID NO: 53616 - protein, 218 aa, Homo sapiens
  DOMAIN (128)..(156): IL1/HBGF FAMILY SIGNATURE domain identified by eMATRIX, accession number PR00262A, p-value=4.600e-21, raw score of 28.26
  DOMAIN (87)..(218): Fibroblast growth factor domain identified by PFam, accession name FGF, E-value=1.5e-73, PFam score of 254.0
EVTINSGFIFIMLFMEHPEHYTIMHKWILTWILPTLLYRSCFHIICLVGTISLACNDMTPEQMATNVNCSSPERHTRSYDYMEGGDIRVRRLFCRTQWYLRIDKRGKVKGTQEMKNNYNIMEIRTVAVGIVAIKGVESEFYLAMNKEGKLYAKKECNEDCNFKELILENHYNTYASAKLWTHNGGEMFVALNQKGIPVRGKKTKKEQKTAHFLPMAIT

SEQ ID NO: 53617 - protein, 138 aa, Homo sapiens
SSPKMAATMKKAAAEDVNVTFEDQQKINKFARNTSRITELKEEIEVKKKQLQNLEDACDDIMLADDDCLMIPYQLGDVFISHSQEETQEMLEEAKKNLQEEIDALESRVESIQRVLADLKVQLYAKFGSNINLEADES

SEQ ID NO: 53618 - protein, 682 aa, Homo sapiens
  DOMAIN (305)..(428): Tudor domain identified by PFam, accession name TUDOR, E- value=3.1e-11, PFam score of 50.8
MEYESMVISFDDRVMEKTEYGPIFTVFAMGNRMTFVTEEEGINVFLKSKKVDFELAVQNIVYRTASIPKNVFLALHEKLYIMLKGKMGTVNLHQFTGQLTEELHEQLENLGTHGTMDLNNLVRHLLYPVTVNMLFNKSLFSTNKKKIKEFHQYFQVYDEDFEYGSQLPECLLRNWSKSKKWFLELFEKNIPDIKACKSAKDNSMDSDEDPVNLQSRSALVCEMLHVQRSSSDADAIGPHADHSLSNRWEVILADEHGIIADDMISRYALSEKSQVELSTQVIKSASSKSVNKSDIDTSVFLNWYNPEKKMIRAYATVIDGPEYFWCQFADTEKLQCLEVEVQTAGEQVADRRNCIPCPYIGDPCIVRYREDGHYYRALITNICEDYLVSVRLVDFGNIEDCVDPKALWAIPSELLSVPMQAFPCCLSGFNISEGLCSQEGNDYFYEIITEDVLEITILEIRRDVCDIPLAIVDLKSKGKSINEKMEKYSKTGIKSALPYENIDSEIKQTLGSYNLDVGLKKLSNKAVQNKIYMEQQTDELAEITEKDVNIIGTKPSNFRDPKTDNICEGFENPCKDKIDTEELEGVSQKAQESMCTEDMRKSSCVESFDDQRRMSLHLHGADCDPKTQNEMNICEEEFVEYKNRDAISALMPFSLRKKAVMEASTIMVYQIISQLNYRTPTL

SEQ ID NO: 53619 - protein, 198 aa, Homo sapiens
TRPPTRPGLSPDPTSPTEADRGVCERPHRCFLLPQITHPSSGRRCLCLLSPTSFDFSLLYESQSDRAIFGVGTEPDQEPPPPYHEQVPVSVYHPTPSQTWVATQLTEEEQIRIAQRIGLIQHLPKGVYDPWRDGSEKKIRECVICMMDFVYGDPIRFLPCVHEWYHLDCIDDWLMRSFTCPSCMEPVDAALLSSYETN

SEQ ID NO: 53620 - protein, 160 aa, Homo sapiens
  misc_feature (1)...(160): Xaa = X or * as defined in Table 2
TAARCQGGPTHVPAFVGTACPTRIPGHAPARQCREYYYXYYYDFWKEPRRCHALLLPPWAGLEVGMPPSHTQLGMHPAPPPPHLEVKAQGPSNRQRTDGCRWCSGRASALGGGRQDSRLRERGGGYDHHCPICRSLKIQLKCHPASGPQTVGLGRLASVS

SEQ ID NO: 53621 - protein, 577 aa, Homo sapiens
  DOMAIN (532)..(565): RECEPTOR INTERLEUKIN-1 PRECURSOR domain identified by eMATRIX, accession number PD02870B, p-value=6.400e-10, raw score of 18.83
  DOMAIN (32)..(549): Immunoglobulin domain identified by PFam, accession name ig, E-value=6.2e-45, PFam score of 149.8
MAAPRDHLAGGAGWDCSSPLPTHPICTQTHGSLLRLHQVTPADSGEYVCHVASVLVTIEASVIPGASTTLTPIPTAAGPIPPVRIESSSSTVAEGQTLDLSCVVAGQAHAQVTWYKRGGSLPARHQVRGSRLYIFQASPADAGQYVCRASNGMEASITVTVTGTQGANLAYPAGSTQPIRIEPSSSQVAEGQTLDLNCVVPGQSHAQVTWHKRGGSLPVRHQLGPEWVPWSTDTVMEASLGPDPFSTRHTYSPESAESPYLKGQPLGSGPGQCLQGWWPRRAPGLAQPIYIEASSSHVTEGQTLDLNCVVPGQAHAQVTWYKRGGSLPARHQTHGSQLRLHLVSPADSGEYVCRAASGPGPEQEASFTVTVPPSEGSSYRLRSPVISIDPPSSTVQQGQDASFKCLIHDGAAPISLEWKTRNQELEDNVHISPNGSIITIVGTRPSNHGTYRCVASNAYGVAQSVVNLSVHGPPTVSVLPEGPVWVKVGKAVTLECVSAGEPRSSARWTRISSTPAKLEQRTYGLMDSHAVLQISSAKPSDAGTYVCLAQNALGTAQKQVEVIVDTGAMAQGSSGPS

SEQ ID NO: 53622 - protein, 236 aa, Homo sapiens
  DOMAIN (129)..(139): w KINASE ALPHA ADHESION T-CELL domain identified by eMATRIX, accession number DM00179, p-value=2.421e-10, raw score of 13.97
  DOMAIN (8)..(213): Immunoglobulin domain identified by PFam, accession name ig, E-value=2.4e-16, PFam score of 57.7
  misc_feature (1)...(236): Xaa = X or * as defined in Table 2
MAEEPNWGSPAPTIHWSKLRSPLPWQHRLEGDTLIIPRVAQQDSGQYICNATSPAGHAEATIILHVESPPYATTVPEHASVQAGETVQLQCLAHGTPPLTFQWSRVGSSLPGRATARNELLHFERAAPEDSGRYRCRVTNKVGSAEAFAQLLVQAGSTPTVQVTPQLETKSIGASVEFHCAVPSDRGTQLRWFKEGGQLLRVTACRMGCSGSGQPLGRPPVAGMMVSEPDEESPLX

SEQ ID NO: 53623 - protein, 663 aa, Homo sapiens
  DOMAIN (398)..(412): LAMININ CHAIN EGF-LIKE DOMAIN P domain identified by eMATRIX, accession number PD00320A, p-value=3.455e-11, raw score of 14.49
  DOMAIN (236)..(368): Laminin B (Domain IV) domain identified by PFam, accession name laminin_B, E-value=7.9e-38, PFam score of 139.1
MGIGEGPTTSEGCRESVEYSHQKSELPLSGDSQVPGPIGCNCDPQGSVSSQCDAAGQCQCKAQVEGLTCSHCRPHHFHLSASNPDGCLPCFCMGITQQCASSAYTRHLISTHFAPGDFQGFALVNPQRNSRLTGEFTVEPVPEGAQLSFGNFAQLGHESFYWQLPETYQGDKGEAYFARMRRAHQNRTSLSEEQLRAAVTAGRIPEPPEGRDWAQRASQFSLSYEGFSLLPGSLYYWQLPRAFLGDKVAAYGGKLRYTLSYTAGPQGSPLSDPDVQITGNNIMLVASQPALQGPERRSYEIMFREEFWRRPDGQPATREHLLMALADLDELLIRATFSSVPLAASISAVSLEVAQPGPSNRPRALEVEECRCPPGYIGLSCQDCAPGYTRTGSGLYLGHCELCECNGHSDLCHPETGACSQCQHNAAGEFCELCAPGYYGDATAGTPEDCQPCACPLTNPENMFSRTCESLGAGGYRCTACEPGYTGQYCEQCGPGYVGNPSVQGGQCLPESSELHFPSVQPSDAGVYICTCRNLHQSNTSRAELLVTEAPSKPITVTVEEQRSQSVRPGADVTFICTAKSKSPAYTLVWTRLHNGKLPTRAMDFNGILTIRNVQLSDAGTYVCTGSNMFAMDQGTATLHVQGSAEAGERSMYSISVLLKYTS

SEQ ID NO: 53624 - protein, 4436 aa, Homo sapiens
  DOMAIN (816)..(829): Laminin-type EGF-like (LE) domain proteins domain identified by eMATRIX, accession number BL01248, p-value=6.897e-13, raw score of 11.02
  DOMAIN (447)..(3682): Immunoglobulin domain identified by PFam, accession name ig, E-value=1.3e-226, PFam score of 735.1
PASGRLRAARSGRRGASERESGAGRAMGWRAPGALLLALLLHGRLLAVTHGLRAYDGLSLPEDIETVTASQMRWTHSYLSDDEYMLADSISGDDLGSGDLGSGDFQMVYFRALVNFTRSIEYSPQLEDAGSREFREVSEAVVDTLESEYLKIPGDQVVSVVFIKELDGWVFVELDVGSEGNADGAQIQEMLLRVISSGSVASYVTSPQGFQFRRLGTVPQFPRACTEAEFACHSYNECVALEYRCDRRPDCRDMSDELNCEEPVLGISPTFSLLVETTSLPPRPETTIMRQPPVTHAPQPLLPGSVRPLPCGPQEAACRNGHCIPRDYLCDGQEDCEDGSDELDCGPPPPCEPNEFPCGNGHCALKLWRCDGDFDCEDRTDEANCPTKRPEEVCGPTQFRCVSTNMCIPASFHCDEESDCPDRSDEFGCMPPQVVTPPRESIQASRGQTVTFTCVAIGVPAPFLINWRLNWGHIPSQPRVTVTSEGGRGTLIIRDVKESDQGAYTCEAMNARGMVFGIPDGVLELVPQRAGPCPDGHFYLEHSAACLPCFCFGITSVCQSTRRFRDQIRLRFDQPDDFKGALAGGVNVTMPAQPGTPPLSSTQLQIDPSLHEFQLVDLSRRFLVHDSFWALPEQFLGNKVNSWGGGVRDNVRYHLARGMLKPLHRPDVVLVGAGYRLLSRGHTPTQPGALNQRQVQFSEEHWVHESGRPVQRAELLQVLQSLEAELIQTVYNTKMASVGLSDIAMDTTVTHATSHGRAHSVEECRCPIGYSGLSCESCDAHFTRVPGGPYLGTCSGCNCNGHASSCDPVYGHCLNCQHNTEGPQCNKCKAGFFGDAMKATATSCRPCPCPYIDASRRFSDTCFLDTDGQATCDACAPGYTLGRRCESCAPGYEGNPIQPGGKCRPVNQEIVRCDERGSMGTSGEACRCKNNVVGRLCNECADGSFHLSTRNPDGCLKCFCMGVSRHCTSSSWSRAQLHGASEEPGHFSLTNAASTHTTNEGIFSPTPGELGFSSFHRLLSGPYFWSLPSRFLGDKVTSYGGELRFTVTQRSQPGSTPLHGQPLVVLQGNNIILEHHVAQEPSPGQPSTFIVPFPGSKHWQRPDGQPATREHLLMALAGIDTLLIRASYAQQPAESRVSGISMDVAVPEETGQDPALEVEQCSCPPGYRGPSCQDCDTGYTRTPSGLYLGTCERCSCHGHSEACEPETGACQGCQHHTEGPRCEQCQPGYYGDAQRGTPQDCQLCPCYGDPAAGQAAHTCFLDTDGHPTCDACSPGHSGRHCERCAPGYYGNPSQGQPCQRDSQVPGPIGCNCDPQGSVSSQCDAAGQCQCKAQVEGLTCSHCRPHHFHLSASNPDGCLPCFCMGITQQCASSAYTRHLISTHFAPGDFQGFALVNPQRNSRLTGEFTVEPVPEGAQLSFGNFAQLGHESFYWQLPETYQGGKVAGYGGKLRYTLSYTAGPQGSPLSDPDVQITGNNIMLVASQPALQGPERRSYEIMFREEFWRRPDGQPATREHLLMALADLDELLIRATFSSVPLVASISAVSLEVAQPGPSNRPRALEVEECRCPPGYIGLSCQDCAPGYTRTGSGLYLGHCELCECNGHSDLCHPETGACSQCQHNAAGEFCELCAPGYYGDATAGTPEDCQPCACPLTNPENMFSRTCESLGAGGYRCTACEPGYTGQYCEQCGPGYVGNPSVQGGQCLPETNQAPLVVEVHPARSIVPQGGSHSLRCQVSGRGPHYFYWSREDGRPVPSGTQQRHQGSELHFPSVQPSDAGVYICTCRNLHRSNTSRAELLVTEAPSKPITVTVEEQRSQSVRPGADVTFICTAKSKSPAYTLVWTRLHNGKLPTRAMDFNGILTIRNVQLSDAGTYVCTGSNMFAMDQGTATLHVQASGTLSAPVVSIHPPQLTVQPGQLAEFRCSATGSPTPTLEWTGGPGGQLPAKAQIHGGILRLPAVEPTDQAQYLCRAHSSAGQQVARAVLHVHGGGGPRVQVSPERTQVHAGRTVRLYCRAAGVPSATITWRKEGGSLPPQARSERTDIATLLIPAITTADAGFYLCVATSPAGTAQARIQVVVLSASDASQPPVKIESSSPSVTEGQTLDLNCVVAGSAHAQVTWYRRGGSLPHHTQVHGSRLRLPQVSPADSGEYVCRVENGSGPKEASITVSVLHGTHSGPSYTPVPGSTRPIRIEPSSSHVAEGQTLDLNCVVPGQAHAQVTWHKRGGSLPARHQTHGSLLRLHQVTPADSGEYVCHVVGTSGPLEASVLVTIEASVIPGPIPPVRIESSSSTVAEGQTLDLSCVVAGQAHAQVTWYKRGGSLPARHQVRGSRLYIFQASPADAGQYVCRASNGMEASITVTVTGTQGANLAYPAGSTQPIRIEPSSSQVAEGQTLDLNCVVPGQSHAQVTWHKRGGSLPVRHQTHGSLLRLYQASPADSGEYVCRVLGSSVPLEASVLVTIEPAGSVPALGVTPTVRIESSSSQVAEGQTLDLNCLVAGQAHAQVTWHKRGGSLPARHQVHGSRLRLLQVTPADSGEYVCRVVGSSGTQEASVLVTIQQRLSGSHSQGVAYPVRIESSSASLANGHTLDLNCLVASQAPHTITWYKRGGSLPSRHQIVGSRLRIPQVTPADSGEYVCHVSNGAGSRETSLIVTIQGSGSSHVPRVSPPIRIESSSPTVVEGQTLDLNCVVARQPQAIITWYKRGGSLPSRHQTHGSHLRLHQMSVADSGEYVCRANNNIDALEASIVISVSPSAGSPSAPGSSMPIRIESSSSHVAEGETLDLNCVVPGQAHAQVTWHKRGGSLPSYHQTRGSRLRLHHVSPADSGEYVCRVMGSSGPLEASVLVTIEASGSSAVHVPAPGGAPPIRIEPSSSRVAEGQTLDLKCVVPGQAHAQVTWHKRGGNLPARHQVHGPLLRLNQVSPADSGEYSCQVTGSSGTLEASVLVTIEPSSPGPIPAPGLAQPIYIEASSSHVTEGQTLDLNCVVPGQAHAQVTWYKRGGSLPARHQTHGSQLRLHHVSPADSGEYVCRAAGGPGPEQEASFTVTVPPSEGSSYRLRSPVISIDPPSSTVQQGQDASFKCLIHDGAAPISLEWKTRNQELEDNVHISPNGSIITIVGTRPSNHGTYRCVASNAYGVAQSVVNLSVHGPPTVSVLPEGPVWVKVGKAVTLECVSAGEPRSSARWTRISSTPAKLEQRTYGLMDSHTVLQISSAKPSDAGTYVCLAQNALGTAQKQVEVIVDTGAMAPGAPQVQAEEAELTVEAGHTATLRCSATGSPARTIHWSKLRSPLPWQHRLEGDTLIIPRVAQQDSGQYICNATSPAGHAEATIILHVESPPYATTVPEHASVQAGETVQLQCLAHGTPPLTFQWSRVGSSLPGRATARNELLHFERAAPEDSGRYRCRVTNKVGSAEAFAQLLVQGPPGSLPATSIPAGSTPTVQVTPQLETKSIGASVEFHCAVPSDRGTQLRWFKEGGQLPPGHSVQDGVLRIQNLDQSCQGTYICQAHGPWGKAQASAQLVIQALPSVLINIRTSVQTVVVGHAVEFECLALGDPKPQVTWSKVGGHLRPGIVQSGGVVRIAHVELADAGQYRCTATNAAGTTQSHVLLLVQALPQISMPQEVRVPAGSAAVFPCIASGYPTPDISWSKLDGSLPPDSRLENNMLMLPSVQPQDAGTYVCTATNRQGKVKAFAHLQVPERVVPYFTQTPYSFLPLPTIKDAYRKFEIKITFRPDSADGMLLYNGQKRVPGSPTNLANRQPDFISFGLVGGRPEFRFDAGSGMATIRHPTPLALGHFHTVTLLRSLTQGSLIVGDLAPVNGTSQGKFQGLDLNEELYLGGYPDYGAIPKAGLSSGFIGCVRELRIQGEEIVFHDLNLTAHGISHCPTCRDRPCQNGGQCHDSESSSYVCVCPAGFTGSRCEHSQALHCHPEACGPDATCVNRPDGRGYTCRCHLGRSGLRCEEGVTVTTPSLSGAGSYLALPALTNTHHELRLDVEFKPLAPDGVLLFSGGKSGPVEDFVSLAMVGGHLEFRYELGSGLAVLRTAEPLALGRWHRVSAERLNKDGSLRVNGGRPVLRSSPGKSQGLNLHTLLYLGGVEPSVPLSPATNMGAHFRGCVGEVSVNGKRLDLTYSFLGSQGIGQCYDSSPCERQPCQHGATCMPAGEYEFQCLCRDGFKGDLCEHEENPCQLREPCLHGGTCQGTRCLCLPGFSGPRCQQGSGHGIAESDWHLEGSGGNDAPGQYGAYFHDDGFLAFPGHVFSRSLPEVPETIELEVRTSTASGLLLWQGVEVGEAGQGKDFISLGLQDGHLVFSSYFLGLDDCRYQLGSGEARLVSEDPFNDGEWHRVTALREGRRGSIQVDGEELVSGRSPGPNVAVNAKGSVYIGGAPDVATLTGGRFSSGITGCVKNLVLHSARPGAPPPQPLDLQHRAQAGANTRPCPL

SEQ ID NO: 53625 - protein, 428 aa, Homo sapiens
  DOMAIN (343)..(390): Intermediate filaments proteins domain identified by eMATRIX, accession number BL00226D, p-value=5.941e-22, raw score of 19.10
  DOMAIN (89)..(391): Intermediate filament proteins domain identified by PFam, accession name filament, E-value=1.5e-91, PFam score of 317.5
HYLVFFLPSLRRYTVSLSPNSTSYQLLVPGPSYSALPISSAASLYAGAGGSGSRMSVSHSTSLRDGISSGGLATGMARGLGGMGGIQNKKETTQSLNDSLAVRVRSLETENRKLESKIREHLEKKGPQVRDWSHYFKTIEDLRAQIFANTVDNVRIFLQIDNARLAADDFRVKYETELAMRQSVESDIYGLHKVIDDTNVINGCSFFMKKNHGEEVKCLQAQIASSGLTMEVDAPKSQDLAKITADISTRYDELARKNREELDKYWSQPIEESTTEVTMQSAKVRAAEMTFMELRRTVQSLEIDLDLMRNPKASLENSLREVEACYALQMEQLNLDPGILLHLESELTQTRAEGQLQAQKYKALLNIKNKLEAEIATYCLLLEDGKDFNLGDTLDSSNPMQTIQKTTTSRIVDGKVVSETNDTKVWRH

SEQ ID NO: 53626 - protein, 257 aa, Homo sapiens
  DOMAIN (56)..(97): Nuclesosome assembly protein (NAP) domain identified by eMATRIX, accession number PF00956B, p-value=7.947e-19, raw score of 23.14
  DOMAIN (42)..(255): Nucleosome assembly protein (NAP) domain identified by PFam, accession name NAP_family, E-value=1.7e-50, PFam score of 181.2
MASKCQSPLLPQKKKPRPLPALGPEKTSASAGLPKKGEKEQQETIEHIHEVQNEMDRLNEQANFWVTIFVNHPEVSALPGEEDEEALHYLTRVEMTDFDDIKSGYRIDFYFDENPYFENNILAKEFHLNESGDPSSKPTEIKWKYGKDLMKRSSQTQNKAHRKRQHEEPESFFTWFTDHSDVGADELGEVIKDIWPNPLQYYLVPDMDNEEGEGEEDDDDDEEEEGLEDIDEEGDEDEGEEDEDEGEKGEEDEGEND

SEQ ID NO: 53627 - protein, 308 aa, Homo sapiens
  DOMAIN (107)..(148): Nuclesosome assembly protein (NAP) domain identified by eMATRIX, accession number PF00956B, p-value=2.098e-27, raw score of 23.14
  DOMAIN (83)..(307): Nucleosome assembly protein (NAP) domain identified by PFam, accession name NAP_family, E-value=2.1e-54, PFam score of 194.2
SCSWTSPAAWPPNASLHSCLKRRNQDHLLLWDWRFLDFPSSMASKCQSPLLPQKKKPRPLPALGPEKTSASAGLPKKGEKEQQETIEHIHEVQNEMDRLNEQAKRSELISKIPDFWVTIFVNHPEVSALPGEEDEEALHYLTRVEMTDFDDIKSGYRIDFYFDENPYFENNILAKEFHLNESGDPSSKSTEIKWKYGKDLMKRSSQTQNKAHRKRQHEEPESFFTWFTDHSDVGADELGEVIKDIWPNPLQYYLVPDMDNEEGEGEEDDDDDEEEEGLEDIDEEGDEDEGEEDEDEGEKGEEDEGEND

SEQ ID NO: 53628 - protein, 304 aa, Homo sapiens
  DOMAIN (100)..(141): Nuclesosome assembly protein (NAP) domain identified by eMATRIX, accession number PF00956B, p-value=1.000e-30, raw score of 23.14
  DOMAIN (56)..(304): Nucleosome assembly protein (NAP) domain identified by PFam, accession name NAP_family, E-value=6.6e-76, PFam score of 265.6
ARRLVVWFWDFPNSMAPKRQSPLPPQKKKPRPPPALGPEETSASAGLPKKGEKEQQEAIEHIDEVQNEIDRLNEQASEEILKVEQKYNKLRQPFFQKRSKLSAGIPNFWVTTFVNHPQVSALLGEEDEEALHYLTRVEVTEFEDIKSGYRIDFYFDENPYFENKVLSKEFHLNESGDPSSKSTEIKWKSGKDLTKRSSQTQNKASRKRQHEEPESFFTWFTDHSDAGADELGEVIKDDIWPNPLQYYLVPDMDDEEGEGEEDDDDDEEEEGLEDIDEEGDEDEGEEDEDDDEGEEGEEDEGEDD

SEQ ID NO: 53629 - protein, 308 aa, Homo sapiens; identical to SEQ ID NO: 53627
  DOMAIN (107)..(148): Nuclesosome assembly protein (NAP) domain identified by eMATRIX, accession number PF00956B, p-value=2.098e-27, raw score of 23.14
  DOMAIN (83)..(307): Nucleosome assembly protein (NAP) domain identified by PFam, accession name NAP_family, E-value=2.1e-54, PFam score of 194.2

SEQ ID NO: 53630 - protein, 304 aa, Homo sapiens; identical to SEQ ID NO: 53628
  DOMAIN (100)..(141): Nuclesosome assembly protein (NAP) domain identified by eMATRIX, accession number PF00956B, p-value=1.000e-30, raw score of 23.14
  DOMAIN (57)..(304): Nucleosome assembly protein (NAP) domain identified by PFam, accession name NAP_family, E-value=1e-71, PFam score of 251.7

SEQ ID NO: 53631 - protein, 463 aa, Homo sapiens
  DOMAIN (314)..(346): Surfactant associated polypeptide SP-C palmitoylation site proteins domain identified by eMATRIX, accession number BL00341C, p -value=3.972e-09, raw score of 11.93
  DOMAIN (332)..(360): Surfactant associated polypeptide domain identified by PFam, accession name PSAP, E-value=5.3e-10, PFam score of 40.5
MGKQKGGGPQAWEAEGLGREWMRMPQEGKGSQRKSTQKQTKREIDAYIVQAKERSYETVLSFGKRGLNIAASPAVQAATKVLWAPSPPAAPIPPLRPFGLIQLLCQGAQRWQPGSREVKGRLCQARLAETSSIAGNLRVQSYERPVDPGVTMDPLLPGRTIVFAAGDHTLWRAPVSSCAQRSGVWSLDNMGVNSGSVPFHGVRIQASQLISLSFNFSFCEADLKTPLHGFLILPAGPKEEVTVKKEKRERDRDRQREGHGRGRGRPEVIQSHSIFEQGPAEMMKKKGNWDKTVDVSDMGPSHIINIKKEKRETDEETKQILRMLEKDDVDHHALSEHLVTTATFSIGSTGLVVYDYQQVECGGHVRADLKTQDLYSHAQFGDNNYPGGVDWYRAGGLQDSDTEDECWSDTEAVPRAPARPREKPLIRSQSLRVVKRKPPVREGTSRSLKVRTRKKTVPSDVDS

SEQ ID NO: 53632 - protein, 95 aa, Homo sapiens
YLGFFSSNHPYLGQRQYPIPQQALKGLKPVITCLLQHVLLKPVNSPYNSPILPVQKLDMPYRLVQDLCLINQIVLPIHAMVPNPETFIPLTVLNP

SEQ ID NO: 53633 - protein, 49 aa, Homo sapiens
  misc_feature (1)...(49): Xaa = X or * as defined in Table 2
CMKFGAVTPIGGPPLGDQSPVLLLFALXKRSTYNLGSSDPPAQGISHQF

SEQ ID NO: 53634 - protein, 56 aa, Homo sapiens
  misc_feature (1)...(56): Xaa = X or * as defined in Table 2
PAGIRHEERSTYDLWSSDRPGQGTSHQFXIIRFQIPWNSGPRLSEXLLPRSSRLSS

SEQ ID NO: 53635 - protein, 359 aa, Homo sapiens; identical to SEQ ID NO: 35623
  DOMAIN (315)..(327): RNase H domain identified by eMATRIX, accession number PF00075C, p-value=7.848e-10, raw score of 11.58
  DOMAIN (213)..(346): Reverse transcriptase domain identified by PFam, accession name rvt, E-value=5.5e-06, PFam score of 15.3

SEQ ID NO: 53636 - protein, 356 aa, Homo sapiens
MNVRPKTIKTLEENLGITIQDIGMGKDFMSKTPKAMATKAKIDKRDLIKLKSFCTAKETTIRVNRQPTKWENIFTTYSSDKGLISRIYKELKQIYKKKTNNPINKWAKDMNRHFSKEDIYSAKRHMKKCSSSLVIREMQIKTTMRYHLTPVRMAIIKKSGNNRIKKNNFRIPVEAKKSPYSQDSPKQKEQSWNHHTTQLQTILQGYSNQNSKLKTDTAQLPRKPTGPSQTLWVTLTVEDKSVPFLVNTEATHSTLPSFQGPVSLVSITAVGIDGQASKPLKTPQLWDPEPQALSVSQSTENNRSNVITTRAVEAVHLREHLRSNRKAKCPEKQLPISKQRLVFSQLKFLFMEAFMI

SEQ ID NO: 53637 - protein, 743 aa, Homo sapiens
  DOMAIN (401)..(412): RNase H domain identified by eMATRIX, accession number PF00075B, p-value=1.346e-09, raw score of 12.56
  DOMAIN (572)..(705): RNase H domain identified by PFam, accession name rnaseH, E- value=1.3e-10, PFam score of 48.6
NWLPSVSRCQETHKIAANQSLTQRQMPLTSLYCDVVILPVSVGLESLQSPYYRTSPCDPVSQFCLIKISASSLPVLSLWKTLKNAQSYQRDYRHDNKAHYFQKLVTMQENLYVLLCDEELDAVSLEAVHQQKMKNRQAHSSSGCCQKVANAPRNEESSGQFRVIGNEKFEKGPCGVRQQIFEKVLLPNRTCEFVTPRFNRNFEDLIKDLKAAETLIDFLVYEPKNQRRLVNRFRLPCKLLHNLGHPLKTDAAQSPRKPPGPSWMPSFGSKPPSHPPLVSPHLNPQVWDTSSPSLATEHASLTISLKPNHPYPAQSQYSIPQHALKGSKPVITRLLEHGLLKPINSPYNSPILPVQKLDKSYRLVQHLCLIYQIVLPIHPMVPNPYTLLSSIPFTTHYSVLDLKHAFFTIPLYPSSQPLFAFTWTDPDTHQAQQITLAVLPQCFIDSPHYFSQAQISSSSVTYLGIILMKTHIGLGAVEQGVVLVGEARAAQEPMEWVGGSGMVGCRSRALPRGKAAKARREIERSAVTIVPVLDFNPAFHIIPDTTPDHHDCISLIHLTFTPFPHISFFPVPHLEHTWFIDGSSTRPNCHSPAKAGYAIVSSTSIIEATALPRSTTSQQAKLIAYTDSKCAFHILHHHAVIWEERNFLTMQGASIINAFLIKTLLKDILLPKEAGVIHCKGHQKASDPITQDNAYADKVAKKQLAFQLLSLTAVFLLLIRPLSPTSPLKLPLINLFPHKANDS

SEQ ID NO: 53638 - protein, 497 aa, Homo sapiens
  DOMAIN (284)..(295): RNase H domain identified by eMATRIX, accession number PF00075B, p-value=1.346e-09, raw score of 12.56
  DOMAIN (217)..(388): Reverse transcriptase domain identified by PFam, accession name rvt, E-value=0.00025, PFam score of -8.2
MAKAVLSKKNKTGSTTLPDFKIYYKDIVTEEPGIETLRHTSSTKFSKGLPSRESFSEKQNKTTTHLHPGEINSFIAHTKPAWRSLHTDAHEIWCRDSDQVNSPGRSIPCPPALCSMRKIHLRPLVLRPASPRNISPILNPLHLIAALLPNPKPPFRPPLVSPDLNPQVKDISTPSWATDHVHLTVSLKPYHPYPAQCQYPIPQHALKGLKPVITRLLQHGLLKPINSPYNSHILPVLKPDKPYKLVQDLCLINPIVLPIHPMVPNPYTLLSSIPPSTIHYSVLDLKHAFFTIPLHPSSQPLFAFTWTDPDIHQAQQITWAVLPQAFTDSPHFKSPKQLLRLLVFSGNFISLIVFNLQERQNGLVVFERHTSPSSASNLKRTGQYFYLLPFSELRACPRDATGYSPFELVYGCAFLLSPNLVPDTSPLDRSSKTSPDISHQQAAALLHTYIKNLSPYINSTPPIFGPLTTQTTIPVATPLCISQQRPTGIPLGNLSPS

SEQ ID NO: 53639 - protein, 146 aa, Homo sapiens
  DOMAIN (9)..(59): Gag P30 core shell protein domain identified by PFam, accession name Gag_p30, E-value=3.9e-07, PFam score of 28.4
  misc_feature (1)...(146): Xaa = X or * as defined in Table 2
MAHLAVTLRRFTALDPEGPEGRLILNMHFITQSTPNIRKKLQKLNSGPQTPQQDLINLAFQLKTDIARSPRKPTGPSQMLWVTLTMEESGGADIEKKLRFLLKDPSMERSSQIPWGEVMKTWDKALSHRKKMTMKSLGKQMQRKAX

SEQ ID NO: 53640 - protein, 902 aa, Homo sapiens
  DOMAIN (222)..(267): kw TRANSCRIPTASE REVERSE II ORF2 domain identified by eMATRIX, accession number DM01354N, p-value=1.000e-40, raw score of 13.17
  DOMAIN (756)..(899): Reverse transcriptase domain identified by PFam, accession name rvt, E-value=0.00026, PFam score of -8.5
MGDFNTPLSTLDRSTRQKVNKDTQELNSALHQPDLIDIYGTLHPKSTEYTFFSAPHHTYSKIDHILGSKALLSKCKRTEIITSYLSDHSAIKLELRIQNLTQNHSTTWKLNNLLLNDYWLHNEMKAEIKMFFETNENKDTTYQNLWDAFKAVCRGKFIALNAHKRKQERSKTNTLTSINKIDRPLARLIKKKREKTQIDAIKNDKGDITTDPTEMQTTIREYYKHLYANKLENLEEMDKFLNTYTLPRLNQEEVESLNRPITGAEIVAIINSLPTKKSPGPDGFTAEFYQSCFKENKIPRNPTYKDVKDLFKENYKPLLNEIKEDTNKWKNIPCSWIGRINIVKMAILPKVIYRFNAIPIKLPMTFFTEVEKTTLKFIWNQKRARIAKSILSQKNKAGGIMLSDFKLYYKATVTKTAWYWYQNRDIDQWKRTEPSEIMPHIYNYLIFDKPEKNKQWGKDSLFNKWCWENWLAICRKLKLDPFLTPYTKINSRWIKDLNIRPKTIKTLEENLGITIQDIGTGKDFMSKTPKAMATKAKIDKWDLIKLKNFCTAKETTIRVNRQPTNWEKIFATYPSDQGLITRIYNELKQIYKKKTNNPIKKWAKDMNRHFSKEDIYAAKKHMKKCSASLAIREMQIKTTMRYHLTPVRMAIIKKSGNNRSSMDWMMSSCLGEINSHVAHTKPVWWSLHTDVHEVWCRDSDWGTSLGRSIPRPPALCSVRKIRLRPQVLRPTSPRNISPISNPHALKGLKPVITRLLKHGLLKPINSPYNSPILPVLKPDKPYKLVQDLCLINQMVLPIHPMVPNPYTLLSSIPPSTIHYSVLDLKRAFFTIPLHPSSQPLFAFTCTDPDTHQAQQITWAALPQGFTDNPHYFSQAQISSSSVTYLNIILVKTHVLSLLIMSS

SEQ ID NO: 53641 - protein, 196 aa, Homo sapiens
  DOMAIN (152)..(164): RNase H domain identified by eMATRIX, accession number PF00075C, p-value=7.848e-10, raw score of 11.58
  DOMAIN (50)..(183): Reverse transcriptase domain identified by PFam, accession name rvt, E-value=0.00019, PFam score of -6.5
QLKTDTAQSPQKPTGPSRMPELRVTLTVEGQYPIPQLALKRLKPVITRLLQHGLLEPISSPYNSPILPVLKPDKPYKLVQDLRLVNQIVLPIHPMVPNPYTLLSSIPPSTTHYSVLDLKHSFVTIPLHPSSQPLFTFTWTDPDTHQAQQITWAVLPQGFTDSPHYFSQAQISSSSVTYLGIILIKTHVLSLLIVFD

SEQ ID NO: 53642 - protein, 360 aa, Homo sapiens
  DOMAIN (46)..(67): UBIQUITIN SIGNATURE domain identified by eMATRIX, accession number PR00348A, p-value=5.500e-22, raw score of 7.86
  DOMAIN (36)..(70): Ubiquitin family domain identified by PFam, accession name ubiquitin, E-value=2.6e-17, PFam score of 58.0
MTSNKSIAPDSRNHRKKRHTKQAFRYTICSGTTIKMQIFTKTLTEKTITLEVETSDTIENVKAKIQDKEGNLPAHLHPGEINSFIAHTKPVWWSLHTDTHEIWCCDSDRGTTLGRSIPCPPVLCSKRKIHLRPWSSDRPAQETSHQFQIHLLCVLLLYSPTLTLKYISTPSLATDHAPLTISLKPNHPYPAQCQYPIPQHALKGLKPAITRLLQHGLLKPINSPYNSPILPVLEPEKIYRLVVQDLRLINQFVLPIHPMVPNPYTLLSSIPPSTTYYSVLDLKHAFFTIPLHPSSQPLFAFTWTDPDTHQAQQITWAILPQSFTDSPHYFSQAQISSSSVTYLGIILIKTHVLSLPIMSD

SEQ ID NO: 53643 - protein, 181 aa, Homo sapiens
  DOMAIN (102)..(113): RNase H domain identified by eMATRIX, accession number PF00075B, p-value=1.346e-09, raw score of 12.56
MHYFHSSVQIGLPLTRRSQVLILPQPLLPNPIILLSPPLLTPVPAYSFILPTSPPPPARQFPLKKVAEAKGIVKQLKTDTARSPRKPTGPSQTLWVTLTVEDLKHAFFTIPLHPSSQPLFAFTWTDPDTHQAQQITRAVLPQVFTDSPHYFSQAQISSSSVTYLGIILIKTHVLSLLIMSG

SEQ ID NO: 53644 - protein, 297 aa, Homo sapiens
  DOMAIN (219)..(230): RNase H domain identified by eMATRIX, accession number PF00075B, p-value=1.346e-09, raw score of 12.56
  DOMAIN (152)..(297): Reverse transcriptase domain identified by PFam, accession name rvt, E-value=0.0013, PFam score of -18.3
  misc_feature (1)...(297): Xaa = X or * as defined in Table 2
MEVHKHPFNTLALRHESGCELVWAEKHRNQIFPFPKSTASPKQWDTGRHNSDAKQQEPGGREERNTMEMETKETHFIRGPKTLASVTDWEGSLPLVFNHCRGTSLIIHPRFKGVRPRRDACLGPSPLAASPAFLGKGQHALKGLKPVITRLLQHGLLKPINSPFPSPILPVLKPDKAYKLVQNLRLINQIVLPIHPVVPNPYTLLSSIPPSTTHYSVLDLKHAFFTIPLHPSSQPLFAFTXTDPDTHXAQQITWAVLPQGFTRQPPLLQLSPNFILICYLSRHNSHKNTRALPADRV

SEQ ID NO: 53645 - protein, 309 aa, Homo sapiens
  DOMAIN (164)..(298): Reverse transcriptase domain identified by PFam, accession name rvt, E-value=0.0063, PFam score of -28.0
  misc_feature (1)...(309): Xaa = X or * as defined in Table 2
MIQEHADKQVQRLQGVLLGSIPTAASRARLHPGEINNHVAHTEPVWWSLHMDAYEIWCRGSDRRTSLGRSIPLPPALCSLRRIHLRPQVLRSTSPRNISPISNPGHLSDYTPTFQGCQTMQGRLPWSFTLSGKSRFSGEGATQRQYPIPQQALKGLMPAITRLLQHGLLKPINSPYHSPILPVLKPDKPYKLVQDLRLINQIVLPIHPMVPNPYTLLSSIPASTTHYSVLYVKHAFFTIPLHPSSQPLSTFTWTDPDTHQAQQITXAVLPQVFTDSPHYFSQAQISSSSVTYLGIILHENTRALPADHV

SEQ ID NO: 53646 - protein, 401 aa, Homo sapiens
  DOMAIN (102)..(113): RNase H domain identified by eMATRIX, accession number PF00075B, p-value=2.904e-09, raw score of 12.56
  DOMAIN (35)..(214): Reverse transcriptase domain identified by PFam, accession name rvt, E-value=0.0013, PFam score of -18.4
  misc_feature (1)...(401): Xaa = X or * as defined in Table 2
RLGSFSSNHPYLGQRQYPIPQQALKGLKPVITCLLQHVLLKPVNSPYNSPILPVQKLDMPYRLVQDLCLINQIVLPIHAMVPNPYTLLTSIPPSTTHYSVLDLKPAFFTIPLRLSFQPLFTFSWTDPDTHQAQQITRAVLPQSFTDSPHYFSQAQISXRLGSFSSNHPYLGQRQYPIPQQALKGLKPVITCLLQHVLLKPVNSPYNSPILPVQKLDMPYRLVQDLCLINQIVLPIHAMVPNPYTLLTSIPPSTTHYSVLDLKPAFFTIPLRLSFQPLFTFSWTDPDTHQAQQITRAVLPQSFTDSPHYFSQAQISSSSVTYLGIPGFAILTKPLYKLTKGNLADPIDPKSFPHSSFRSLKTALETAPILALPVSSQPFSLPTAEVWAAQSEFLHKNRDRTE

SEQ ID NO: 53647 - protein, 15 aa, Homo sapiens
  misc_feature (1)...(15): Xaa = X or * as defined in Table 2
RSECARWMEKXCPWL

SEQ ID NO: 53648 - protein, 99 aa, Homo sapiens
  DOMAIN (19)..(55): Synapsins proteins domain identified by eMATRIX, accession number BL00415Q, p-value=7.142e-09, raw score of 2.23
EGVSVFLLLSPYQGQPQVSRRCSRQVSQRCPHRGRGPRCPQVSRSHGPSWVGHPGMPLYGSEQFYCGAPGLAGPPNGSRGESLKISVWIFPCRDFGNFN

SEQ ID NO: 53649 - protein, 184 aa, Homo sapiens
MLSGPAWWNSAGSAGRARLRGAALEETEAAGGPEAQEEDEDEEEALPHSEAMDVFQEGLAMVVQDPLLCDLPIQVTLEEVNSQIALEYGQAMTVRVCKMDGEVMPVVVVQSATVLGPEEGHPEIRAAQAGALKGAFSTSAGPTCGGRTILTSAGEKLTEDRKKLRDYGIRNRDEVSFIKKLRQK

SEQ ID NO: 53650 - protein, 3781 aa, Homo sapiens
  DOMAIN (1853)..(1878): DNA polymerase family A proteins domain identified by eMATRIX, accession number BL00447B, p-value=2.837e-12, raw score of 19.76
  DOMAIN (1192)..(1242): Viral (Superfamily 1) RNA helicase domain identified by PFam, accession name Viral_helicase1, E-value=0.0055, PFam score of 13.1
MATRWFYYGHPPRDARVPRIVAEAKEKNLTPGKIIEVDVTIEAQIRQEFLDAERDTGGFVKFFRITKKKLQEFFLGEEEEQVPHVSPVELGAKPTAFNAFIANAVGKTLAVQHASLKAPEPEMTVTHERFYGNYAVWITDVDPRNHRIEVIHVIREISGRTSEYVNNLLAQPTPFKVFDWLTETQAKEFVRRLNNTQGVISVYNKLEDGIPVKVAVKATEPTNKEKLEAASTKLKAMGAVATDAYEFHTDLNENEETIVAVVNDKVVPDVQNLHRHIRQSANLKDYKGFTKFLERLSTVIDKRRHSVEDLMKFMEKGDLPIADDGSIVIFKRLESKDNPEHLKDVMDDVFVDCHSKKIEQCVGMRVMVKENLVDQNRRKDCSHGLHVASLQYIRNFSGNVTIIGKVAPEDVFAVPEYDVTKMRVSAYHIITKLPDAIRDHVNNGNPISTIEGGTEILNMVLSGNHPEPSRQVLVGGHYGTNLTYSELTRNYLDDDEDSVIPDEPVIKKTALNMEESFTATNPKAEPVKATDVKPIKKTKMEILKDLWNQFLKAETSNEAITLADEIIAAKGKCKKSWASLGFSGDMVQKLIDARANKPKPEKAVKQDKTVAPKKTTVTRSRNADVIRSYLNDKGMSDYCKAHAIHDVKRAAKKSYAALGLTPEECSQIDKLKHHLKIHTMAKVYRANRKAHDDDIIRMNAVGLSLGTIAKTLGVHPTTVTLRLRSLGIEPADTRRTFMENVLAPLPTHVADWLSEQVGPKYEIRQYVRDLLLEAYNNRHNHKETAHERFLKRYVEVVEMLEELAPNSEEAYDTLHNAIAALTELSELMKSSDKEVYAPNSNRLAILDALADQIVTATGIGTFLGMNVPGALTEVNRSNYSKFEDGEPVFNENKKVMKEAAAEGFFDFLLDPNASELRISGPGGTGKTFTMAHMIDEIMPRYHETCSLMGIPALYNEVIMTATTNKAAEVLARATGRPTSTYHSFQGLTVRNNLKTGEADLIPSKSFSIKKNKVIFIDEASMIDRKLKKFINEGTHQSKIVYLGDKCQLLPVKETSSPVYNDSSIKEFMLTQQMRTDVPELHALHEQLRGTIEELVSNSAIQIGAGDRLSIEQECQIVDQDSATRKILIDSSGIELEVRDCTLDTGYGGVFEGIPIPVDMDYFIRLQKYYAHQKNWERHFYLKETFPELRALHASTVHKSQGSTYDTIFIDATDLSTCRQPDVVARLLYVAVSRARHRVVFYGSLAEKFGGELMQLGEKQIREMTNSSELVQELFLAELRRLDKVLDSIITRNGETFAVYNSTGFLYLGEFYSSSRSSQQPPSGHRLALANHLLDDMREYLEQAGKLLLEVHMVNQMVFRLVQGCKTYQDVRDALPECLIAMDKQGHLKSLQRTRKAAFTLDNDAMALRHMRKSCRLSNTMREPILSFEVCMRYITFNNEGIYPIAILTTTLRKDDIVKAYMEPWDVDKDSVMILELHTAPGKKKTPAKEMQEFITQELVPAFEAAQTQYIICGDSEYYKQLTKQGKADANIGYVMDCAYGNQKVIYVPNYRQIFYDPDKIKTKIALSMQALIDYVSGSYVEPGTKIIHYADYPLTPEAISKWLDKLLEMDVPLAVDIETFSLKHYDCGIGTITFCWNKHEGIAFPVDYEPIEGATEAPYGRQVHNMLVRSMLRDFFIKYLNRQMYHNIAFDVYALIYQLFMTDLLDTEGLLHGMSIMLRNWDCTKLITYLATNSCAGNKLSLKDQAQEYAGNYAQEEINDITRIPLAELLEYNLVDGLCTWYVYEKHWDTLVNDQQLDVIQTSLDLHNHTQDTSILEILDALIDYKAVDKILTAFIPALKNARQGPDGWHYLFGNLNLGGTVSGRLSSSEPNLQNLPSGSRYAKMIKKCFEAPPGWIFCGLDFASLEDRISALTTKDPNKLKVYTDGYDGHSLRAYAYFGEMMPDIEDTVESVNSIQEKYKAYRQDSKAPTFALTYQGTYITLMKNCGFPEQKARMVEERYHTLYKVSDDWVQAKLDQAAKDGYVTVAFGLRVRTPLLQQVIRGTSKTPYEAEAEGRTAGNALGQSWCLLNNRAGSEFMRKVRNSKHRLDIRPSTHIHDAQYFLIRDDMDVVIYTNTHLVKAVQWQDHPDIAHPDVHLDGQEGAVIVQNTMLLTEEKQVTFRDLGRAQSALFQNLNDRFGQVVDVRDIVFLNVSYLGHMSQPDFQQNLVTNPQRMEQPPYQAECEDIIQALNMTFDEGCLFKALWRNAAARLGNGKPGNNAVYDAEKMVHYANRIFIKESGGQKKEAEEPVSAALKKGEEIHMSLSELFTLLTGEAAEAVWLLHDEYDYVKDKKYLSVTTLLKPIKHIVMKHRVDLSVESMDIMDLVSTSMGYPERVVQNVVINPTPEQIASNPNLIPVWIEQRATKKIAGWTIGGKFDIVTEGLLQDVKSTSTYTWVKGGRDEEHRLQGSMYRWLHDDKITEDVIRINYIFTDWMKALATSQENYPKHRVLHKDIPLMSYEATEEWIKAKLALIDKYWDAPESEIPECTDEELWRSDPVFKYFADPEKAKQPGARSTKNFPTLFEARKFMAEKGKGTILHVPEIFPMIDLTGVSHHPAIEEIVDVLCNKTQNTDRGFFRVEVAYFLAKMASCMGATIITKDRGEIPVNIYAVALATSGFGKGHSVNIVEDGFMAGFKKRFMEDTMPALAEDRLWKIANERSARNATDQKEEFDKVEAEYRRTGAYPFTFDSGTPPAVKQLRHKLLLAGCGAINLQIDEIGSNLLANADVLTVFLELYDQGKIKQKLTKNTAESIRSEEVDGKTPANLLLFGTPSKLLNGSQTEELFYDFLDTGYSRRCLFAVDASKFGWKMTVEDDVGIALIDYKIQCEKQAAALADHEEIRKAELEHRYFKALKLAGAFAFVDNSIMVEMEHLKQAILLVEESGVAFQTILNREKAYVKLAKYIASVGTEVTHADLLEALPFYKSGNAARNEMMTLATAWGYKQHIIIKKTYNEGIEFFRGETLKETDTNEMIVSYGENFAYDYIAEKVPFDQLHVLTQQAGYHWANHHFRRGHRAEENAIAGFNMIVIDVDGTCSLDVCHELMKEYRFMTYTTKRHTDEENRFRLIIPMNYQLELDGAEYKEFMDNVMAWLPFKTDESANQRAKKWESCAKGTYYYNMDAPLLDVRDFIPRTSKNEAFQQGMQKVQNLDNLERWFAQRIATGNRNNHMIKYALALVDSGIGFNEVKQRVHEFNKKLSNPLSADELDSTVMITVAKLLFLVEEDCQLKEETMSEEFEHGEMNDQLILIVGFSAAGKSASLRNIRNQERWVYLNTEAGKRLPFKNNFNGVRITDPYQILEYFDQCIEHRDDVDGIIVDSLTFMMDMLETQYVLTAANTQKAWGEFAQFFKILLQEKVVKFAKPVIFTAHVKDEVDERAMELKTFVPVKGSLKNNGIEAYFSTVVSAERIDLKELEKYSNGMLEITEDEQELGYKHVFQTRPTKKTVGKRIRSPMGMFSKQETYMDNDAQKLLDHLAEYYSTGQAAKAEKATDNLGGGFGAKESDIYLANLKVAYAGKAASGANFIQIIADLTDLDGHSAGEYREQLYITSGTEKGCKCTYEKNGKEYFLPGYTVINDILVMTSGETIPEAVFEEKVVNVYDFDEKKEVAKSVMVPVNAIGGKFAVAILKSEEDKQTKDGSGNYVSTGETRFTNTIEKVFHPDLHLTVVEAEELTERGKELTVEEAVFWDKWLEKNKGVTRDKTTKGGASGKAGQPPKPGATNTGAGASAAKSLFDTCAWS

SEQ ID NO: 53651 - protein, 95 aa, Homo sapiens
  misc_feature (1)...(95): Xaa = X or * as defined in Table 2
LSSLAWVWQWNHRISVLFHSNSVRTNLVPQFNQLVITESNSCPEFFNQTSAFFKTXVESGCMCLQDXGIEWFRLRLDVYNSRLVFLTGATDYCTG

SEQ ID NO: 53652 - protein, 523 aa, Homo sapiens
PEDLSGLPRFKENGRAEFAPFDELFPLEGDAVPEGFNGWLLFLDEFNSARKEIQAAAYKLVLDRMTGQKKLHPYVAIVCAGNKATDRAITNNLSTAMQSRLIHLEMETDFDVFMEDVAIPNKWDERVIAFLNANPNKLNDFEPDHQEKTFCCSRTWEFVNKIVSILPPGPINSEMTLLLAGTITSGVATSFVQFTQVYSNMVSLNEILDNPKKARMPEDNNLLWAVVTSLINNTDEDNHSKIFDYVERMPFTFKVLYYRSVELSKERQLWLSPNKTMIQADLAEVQRMLDEWSEDQMFIDGNAEAITDDMASDMAVFVLQAMAEKRAQDAMAFGISEDPAFFQILSANLYSNQKLAMVRETLCNSWDAHIEGNKTDIPIHVTIDKDGFLIFRDYGSGIPKDKIQEVYGVYGASTKKANTASTGGFGLGCKSPMAYTDSFTVTSMCDGTKTVYHIAKSSVETNGKPGIIPIVSVPTEESGLEVKIQLQSEDILEIDSYIRAIVLHVSNMLICVRNGEIWKLTVN

SEQ ID NO: 53653 - protein, 33 aa, Homo sapiens
  misc_feature (1)...(33): Xaa = X or * as defined in Table 2
GASVAPSIGSXSTGNAIPSCLFQQNVIVPIPQS
